United States Patent Application Publication US 2011/0004955 A1 - sequence listing, part 4

SEQ ID NO: 13274 - protein, 1220 aa, Ustilago maydis 521
MLEHISPRSLPTAARTTLRSLSRWCGSNLNFYRVHVLVFTFTPLLAACIFYACNGETHISFVDGLYVCVSAMTVTGLVTFNISTANPGQQAILFILMCIGNISAVSITMIWIRRSFFRKKFDHVVRRSAKVRKRMHDVEEQERRERRHNIAKIQRMVGLKSSDSVTTISDTEEHDRTDTSSSSQIELRRLEKNKQKSKAKRKPLRADMIRRIDGPAFLINSAGDPSNTIPDSANTTPFTNDPHASLTQEPASLRSTTPPPAQAAVGILNAQQDHHASVTSDDPSHQPSIRISLPHHSLPSDEFTQHKATADPTQPPRQTFSLPRCDHRHDPDADTDSDQASLTHQGDTHFTQPPLSPPLRARFPDHQIPGRARRVSDPPQSQFRRGSDTGLVHTYATHEKHDMFPRAQTVEFAIPSNYRSPIDAQQREQSYTTGHGVNPTGGLRHRNTTFNRTVTSRSYVSGRLSNGRSGVPLARTQTSAKQRGFGGFPTPFEIAGMALKKAAPGVQERFQRTMTMPRTATFTSVRSGGGLTETANKAAPYLSFDATVTGNSRFHALTETQRDELGGVEYRALDLLAKLVPAYWLIVNLGMVTLVAPYISSNAFRKYRPPFEAQGNNRPDNTWFWFFQVISAYSNTGMSLIDTSMTQMQDAYFLLIPMGFLILAGNTGFPILLRFFIWTISVCVPSNSRIYETLRFLLDHPRRCFVYLFPSSQTWFLFFVLVLFNSVDWLAFLILDIGNPVIESITLSIRIFDGLFQSIAVRAAGFTVVSLLALAPAVQFLYVIMMYLSAFPLALSVRSTNVYEEKSLGVYVDEPADPGLAPQESDNPKVWGSFLASHARRQLAFDIWWLGFALWLICIIERNDILDPNSNGWFTIFSCLFELTSAYGTVGLSLGTPFDNFSLSGRFHTLSKLVVCAVMIRGRHRGLPVAIDRAILLPSELEQEDMLDDDLSHLGDSWDRDSTFVSDPLVPTPGAPRPSMNGPDQQRSNSIGSVAGESNSGMSSVRRTPSGVSFAVHPLASKPRRSSSMSPMAMEPLSPKQQAELALQEPRRSLTLTLPPSSLPAHYAGPTLGVGGFAHHLGGLGGALPPSSSSNASTVGGVLGAMMVSSPGQLTAIDEMPSGLGAMPTSESRCESPAGVNASAAASNAQSQAHVLPTTFCTNVESTSSTSSGSGGSGCSVKGKERAAMRIADEDRERLVAQHAGCSTPDGRHDPVDGQD

SEQ ID NO: 13275 - protein, 153 aa, Frankia sp. FE141
ITREEYSRDPRNTAKKAESYLRGTGFADTAYFGPEAEFYIFDDVRYDYNPYGSLHAVDSIEAAWNTARKEEGGNLGYKPRFKGGYFPVPPTDHFTDLRSEMSRALIRAGITVEMQHHEVGTAGQAEIDIRYDTLLRTADNLMLYKYIIRNVAL

SEQ ID NO: 13276 - protein, 320 aa, Xanthomonas arboricola pv. pruni
VQQHITFPANIIEPALFEEGKMFDGSSIAGWKGINESDMVLLPDAGTAYLDPFFADPTIVLTCDILDPATMQSYERDPRGIAKRAEAYLKSSGTADQAFFGPEPEFFIFDSVRFANDMGHTFFQVGSEEAAWNTGAKYDGGNSGYRPGVKGGYFPVPPTDTLHDLRAEMIKTLEQVGIETEVHHHEVATAGQCEIGTKFSSLVQKADELLTMKYIIKNVAYRNGKTATFMPKPIVGDNGSGMHVHQSLTKGGVNLFSGDGYGGLSQMALWYIGGIFKHARAINAFSNSGTNSYKRLVPGFEAPVMLAYSARNRSASCRIP

SEQ ID NO: 13277 - protein, 703 aa, Aspergillus nidulans FGSC A4
MAGQVMADAVHSLLRRAADYDIDPDDGDAPEAGTKEFFSSWALFIMITLLMLALFTSYILQQRKIEAVHETVLSIFGGMFVGLIIRLTDSPITNFVAFDYQFFFNLLLPPIILASGYELHQANFFRNIGTILTFAFAGTFISALVLGLVLFAWTRIPLDGFSISFVEAISVGATLSATDPVTILAIFNLYKVEPKLYTVIFGESILNDAIAIVLFETAQKYAESDAGSLSILNLFEAIGLFLLVFFGSMLVGVIVGIMTALGLKYTHVRRQPKIESCLIVLIAYASYFFSNGVLLSVSGIVSLLFCGITLKHYAYYNMSRRTQLTTKYLFQVMAQLSENFIFIYLGLDLLVQRDVQFKPLFILVAVVGICLARYLAVFPLSKAINWFIRYRARRRGVEVADELPFAYQAMLFWAGLRGAVGVALAAGLKGANGPALRATVLVVVVITVIIFGGTTARMLEILGIRTGVVEELESDDEFDIEVSNGGTYYKRSDTGLGYTPRRADNIPLDGVSRRDLDRNNSYSSGNSRRPSPPSSSRPSRGHSRMYSDAFGPKDTQTPRDRSTTATLLGNRPGSRSDSEDGSENEYGLKSSGKRRALDHDHPDAFELDIDDIHSDDDLPPAAPTRMRRSPSQPPQQSSSSQAPQDSVSPSRREAGRSAREAIRDLFSGGPSGDHVAWFRQLDEDYIKPRLLLDQSNHKGPGAV

SEQ ID NO: 13278 - protein, 444 aa, Geobacillus kaustophilus HTA426
MAKYTRDDILHIVKEENVKYIRLQFTDILGTIKNVEIPISQLEKALNNKIMFDGSSIEGFVRIEESDMYLYPDLDTFVIFPWTSEKGKVARFICDIYNPDGTPFEGCPRYNLKRMLKEMEALGFNAFNLGAEPEFFLFKLDEKGHPTMELNDRGGYFDLAPTDLGENCRRDIVLELEEMGFEIEASHHEVAPGQHEIDFKYADAVKACDDIQTFKLVVKTIARKHGLHATFMPKPIFGINGSGMHCNLSLFRNGENAFFDPNGDLQLSDTARQFIAGVLKHAPNFTAVTNPTVNSYKRLVPGYEAPCYVAWSARNRSPLIRIPASRGMSTRIEVRSVDPSANPYLAMAVLLAAGLDGIRNKLTPPAPVDRNIYVMTKEERLEEGIVDLPATLHEALENLKSDEVMIHALGKHLFEHFVEAKEIEWDMYRTTVHQWELDQYMELY

SEQ ID NO: 13279 - protein, 159 aa, Frankia sp. FE2
ITREEYSRDPRNTAKKAEAYLRGTGFADTAYFGPEAEFYIFDDVRYDYNPYGSLHAVDSIEAAWNTARKEEGGNLGYKPRFKGGYFPVPPTDHFTDLRSEMTRALIRAGITVEMQHHEVGTAGQAEIDIRYDTLLRTADNLMLYKYIIRNVALSRGKTV

SEQ ID NO: 13280 - protein, 156 aa, Corynebacterium diphtheriae NCTC 13129
MSILDTEVTLINGEKASMDQWAGHCLLIVNTASECGYTPQLETLEELYEDYAMRGFFVIGVPCNQFGEEEPGKDAQVARRYEEKFGVRFPLLAKSDVNGPNTIELYKKLKGDGPDIEWNFEKFIVAPSGEVVGRFAPSLDPDDMKIINVLEEYLPI

SEQ ID NO: 13281 - protein, 159 aa, Frankia sp. FE138
ITREEYSRDPRNTARKAEAYLRGTGFADTAYFGPEAEFYIFDDVRYDYNPYGSLHAVDSVEAAWNTARKEEGGNLGYKPRFKGGYFPVPPTDHFTDLRSEMTRTLIRAGVTVEMQHHEVGTAGQAEIDIRYDTLLRTADNLMLYKYIIRNVAVARGKTV

SEQ ID NO: 13282 - protein, 486 aa, Desulfitobacterium hafniense DCB-2
MIAFSVIFYMVMMLAIGYYSYKRTTNLSDYMIGGRTLGPAVTALSAGASDMSGWLMMGLPGAMFAAGISSGWIVVGLTIGAYFNWLYVAPRLRSYTEIASNSITIPSFLGHRFRDTSHVIRLVSALVIIIFFTFYVSSGLVSGAVLFNTTFGIGYHTGLWLILLVIVGYTLIGGFLAVSFTDFVQGLIMVTALTMVPVVTLWHSGGLGSSFTTIQTIDPALLNIFTGTSVIGIISLLAWGLGYFGQPHIIVRFMAISSVSEIKKSRRIGMSWMVFSEVGAMLTGLLGIAYFATHGLTLADPETVFIELGKILFHPIVTGLLISAILAAIMSTISSQLLVTSSSLTEDIYRILFHREAKDKELVFVSRLCVLLVALLATYLAWTQNDTILNLVGYAWAGFGSAFGPVILLSLYWKRMNKWGALAGMIVGSATVILWEQFPTFAAVYEMIPGFIMGLLSIIIVSLLTTEPSQEILDEFAKSAAETKGN

SEQ ID NO: 13283 - protein, 159 aa, Frankia sp. FE37
ITKEEYSRDPRNTAKKAEAYLRGTGFADTAYFGPEAEFYIFDDVRYDYNPYGSMHAVDSVEAAWNTARKEEGGNLGYKPRFKGGYFPVPPTDHFTDLRSEMVRALFRAGITVEMQHHEVGTAGQAEIDIRYSTLLRTADNLMLYKYIIRNVALSRGKTV

SEQ ID NO: 13284 - protein, 698 aa, Leuconostoc mesenteroides subsp. mesenteroides ATCC 8293
MAILELIVILIVAVTISNIVSHFIPEIPISLFQIAIGLFLALVCGIYVEVDSEWFMLLFIAPLLFNDAWRFPKHELWELRGPILGNSIILVILTTLVGGFLMHLLMPQLPKSVALALAAVISPTDPVAVQAIARRVKLPENVMHIVSGESLINDASGLVSFNTAIKATIAGTFLIGEAIGNFFWMTIVGLAVGLILGSFVSWLRDSFDRVGLNDVVFHTVVTLLMPFVIYWVAEDIFHSSGVIAVVAGGVLSKILSDQHMNARSPEINVVTVRTWEVFVYLLNGTIFILLGIELPAAMKDIVRSTQVHTGMAIFYGVAVWFIIFTIRTFWAYGTQITYHLKHKERAISFRMAIISGLTGVRGAVTMAAVLTVPSTIADGSAFPQRNLLVFVAAVVVIISLLVATIMLPIVTKQRTTHDFTQPEVGEVETSSTHESKVDLTEAQARIFSIRIGIQVLREQQNDHNRIIVYELIGRKQQIIDQIYRQLNKSNDHKVNIEDDRELRRVALEAQRNCLRQLLADEKISILTYSSQNRRLDRLENMIDSDKHYHLSTQWIIILWRRTLRSIRIWISDESTDQFREESSMATKEMAKEAIQSLSEYMEKYTGDTVSHRMERQAAYNLIIFYRNQIEKERHPDTPEQRELDDRYRMELEIKALNVERETIQQLYEQGRISRQAGVNIRQFINYAETAALAGRDEE

SEQ ID NO: 13285 - protein, 326 aa, Brassica napus
  misc_feature (312)..(312): Xaa can be any naturally occurring amino acid
MVLMDGRDGSSPPQPKMDAVDSYNQESPSDSFSDAEKVEKKRGGWRAVTFILGNETPERLGTIGLLSNFMVYLTRVFHLEQVNAANVINIWFGFTNLTPLVGAFISDAYVGRFKTIAFASFATLLGLVTLTLTASLPQLHPATCISKDSVSCSGPNKLQFGTLFLGLVFLSIGTGGIRPCSIPFGADQFDQRTEEGVNGVASFFNWYYLTFTVVLLITQTVVVYIQDQVSWIIGFSIPTGLMACALVIFFAGMKLYIYVKPEGSIFSGIAQVVVAARKKRKMKLPAEDDGTATYYDPPVKDSVLPKVHRSNXFRFLNKAAVIKKGT

SEQ ID NO: 13286 - protein, 241 aa, Nicotiana sylvestris
MGRGRVELKRIENKINRQVTFAKRRNGLLKKAYELSVLCDAEVALIIFSNRGKLYEFCSSSSMLKTLERYQKCNYGAPETNISTREALEISSQQEYLKLKARYEALQRSQRNLLGEDLGPLNSKELESLERQLDMSLKQIRSTRTQLMLDQLTDLQRKEHALNEANRTLKQRLMEGSQLNLQWQQNAQDMGYGRQTTQTQGDGFFHPLECEPTLQIGYQNDPITVGGAGPSVNNYMAGWLP

SEQ ID NO: 13287 - protein, 336 aa, Brassica napus
  misc_feature (8)..(8): Xaa can be any naturally occurring amino acid
  misc_feature (31)..(31): Xaa can be any naturally occurring amino acid
  misc_feature (44)..(44): Xaa can be any naturally occurring amino acid
ALQVTHRXFGSCPPMQSFDPAKLLTDSGKLXTLDILLKRLRAGXHRVLLFAQMTKMLNILEDYMNYRKYKYLRLDGSSTIMDRRDMVRDFQQRSDIFVFLLSTRAGGLGINLTAADTVIFYESDWNPTLDLQAMDRAHRLGQTKDVTVYRLICKETVEEKILHRASQKNTVQQLVMTGGHVQGDDVFGTADVVSLLMDDAEAAQLEQRFPARPLQVRDRQKKKQPVKCIRIDAEGDAALEELEDAAERQDKEQEPSQEPEKTKPSNKKRKAAASTPKLRVPPKANEEGDAPLQPQRTKRVKRQTKSVNESLEPIFSASVTAANGEVNPSSSNPDAN

SEQ ID NO: 13288 - protein, 126 aa, Oryza sativa
  misc_feature (44)..(44): Xaa can be any naturally occurring amino acid
  misc_feature (70)..(70): Xaa can be any naturally occurring amino acid
  misc_feature (90)..(90): Xaa can be any naturally occurring amino acid
  misc_feature (117)..(117): Xaa can be any naturally occurring amino acid
IGSKQTWVSCGGNNGVLGGAVRFSEENEALVIKSWYIMIKDSGXLDSELFLKIFDVVPSSTNMFSFLRKXSTLLLDKNPMLITQGMYVFXMKCEVADRVPESGVEFTARDTRMNRFXSTHFKYGVR

SEQ ID NO: 13289 - protein, 656 aa, Blastocystis hominis
MSKTYTGESVGIDLGTTYSCVGVWQNDKVEIIANDQGQRTTPSYVAFTDTERLIGDAAKNQVAMNPTNTVFDAKRLIGRKFDDPSVQSDMKHWPFTLKAGPDGKPLIEVEYKGEKKTFSPEEISSMVLSKMKQIAEAYLGKEVKNAVITVPAYFNDSQRQATKDAGVIAGLNVMRIINEPTAAAIAYGLDQKGGEKNILIFDLGGGTFDVSLLSIEDGIFEVKATAGDTHLGGEDFDNRMVEYFCTEFQRKFRKDLTTSQRALRRLRTACERAKRTLSSSTQATIEIDSLFEGIDFNSQITRARFEELNMDYFRKTMAPVEKVLRDAKLSKSEVDEVVLVGGSSRIPKVQKLLQEFFNGKELCQSINPDEAVAYGATVQAAVLSGKGAGSKLDDLLLLDVAPLSLGLETAGGVMTVLIPRNTTIPTKKTQVFSTYSDNQPGVLIQVYEGERSMTRDNNLLGKFHLDGIPPMPRGVPQIEVTFDIDADGILNVSAVEKSTGKENKITIKNEKGRLSADEIEKMVQEAEKFKAEDEANKARIEAKNSLENYTFTVRNSLRDEAVSSKLPEADKKAIEAKIDAAVSWLDDHPNAEKEEYEQKQKELEAAIMPIFSKMAGNAPAGGMPGGMPGGMPTGGMPTNEDSGAKEDDGPHIEEVD

SEQ ID NO: 13290 - protein, 288 aa, Triticum aestivum
EHRHRPGLKMKLNNLMIQLRKNCAHPDLFNAAFDSTSLYPPTDKLLEQCGKFQLLDRLLESLLKQKHKVLIFSQWTKVLDIIEYYLYMKGLNICRIDGSVKLEDRMRQIAEFNDLNSSMNVFILSTRAGGLGINLASADTCILYDSDWNPQMDLQAMDRCHRIGQTRPVHVYRLATSNSVEGRIIKKAFGKLKLEHVVIGKGQFQQDAAKPNALDEGELLALLRDEQAEEDRMIQTDISDEDLLKVMDRSDLTGARAAADAAPHFPLKGPGWEVVVAAGGGMLSALTS

SEQ ID NO: 13291 - protein, 1086 aa, Ashbya gossypii ATCC 10895
MENQEYAEKLRPFQEGLGHKPDAVETRARYLVGGGQNRRRFDTEGTTKRFQHLLGLSPLFRHFIERKAAKDERFGQVLRVLDDGRQAGRHEDKRRRKTEREEDAELLREEDAELLREEEEGPDAAAADYEFQFRESPGFVDGRLRPYQVQGVNWLVSLHKNNLAGILADEMGLGKTLQTITFLGYLRYIEKKRGPFLVIAPKSTLNNWQREINRWTPDVDAFILQGDKEERARLCQERLLACNFDVAIASYEIIIREKASFKKIDWEYIVIDEAHRIKNEESMLSQVLREFSSRNRLLITGTPLQNNLHELWALLNFLLPDIFSDSAAFDEWFSSEASDDDKDKIVKQLHTILQPFLLRRIKSDVETSLLPKKELNLYVGMSSMQRKWYKQILEKDLDAVNGSNGSKESKTRLLNIMMQLRKCCNHPYLFDGAEPGPPYTTDEHLVYNSAKLKVLDKLLKKLKEDGSRVLIFSQMSRLLDILEDYCYFRGYEYCRIDGSTAHEDRIEAIDEYNAPDSRKFIFLLTTRAGGLGINLTTADVVVLYDSDWNPQADLQAMDRAHRIGQKKQVKVFRLVTDNSVEEKILERATQKLRLDQLVIQQGRTSISKKENAKDAKDALLSMIQHGAVDMFRSTDTSNASSAKGTPQPETGDKDDEVDLESLLNKSENKTKSLNEKYAALGLDQLQKFNQDSAYEWDGQNFKKKLTKDIINPLWIEPTKRERKENYSIDNYYKGVLNTGGARPNQAAVPRMPKPQPFNSHQLLPPQLKILYEKERMWMAKRTKYTPTMEDVKTTYGDIESEEERASKLELLKIAVANAQPLTEEEEKNKAEWEREGFHNWNKLEFRRFITASGKYGRNSIKAITAELGGTKTEEEVRAYAEAFWTHLERIEDYEKYVKAIETEEEKLKRVKMQQEALRRKISQCTNPLFDLSLKHPPSSNNKRTFSEEEDRFILIMLFKYGLDRENVYELIRDEIRDCPLFELDFYFQSRTPAELQRRAFTLLQCLEKEFSTGVVLDDAMKARMKEEDTAAEKLRAEEAKRIKEEEDAEKERESPMPVHVDAVADPVAEVPTANEDGPEAKKPRIE

SEQ ID NO: 13292 - protein, 638 aa, Candida albicans SC5314
MAENTVHLLTQGAGYGVLVGVGAVFAGGMILTTFLLQKYLHENAYSTETFSVANRSVGTFLSASAVYSSWSWATEFLLVTSMTYNYGIQAGFYFGAGLAVQIAVMSVLGIHAKKKIPTAHTSLEAVQLRYGKAAHLLYLLLSLICNICSCSSMILACAANISIIAGNLHIVASTMLIPFGVLLYTVVGGLKATFLTDFIHTTILLIVLCYINTAVLTSEQVGGLNGLYDKIVEVSTTKYIEGNYDGAILTGKSQGSVMFGLILTICNFGLTVMDSSFWQKTFSASPRATVPAYLLTAFLIFSNVWPIGAIIGGASHFLENDPSFPTYPRKMTQEEIDSGFVLPYALKAILGNGGLGALLLIFYLAVTSTVSAQMVSVSSIVSFDIYKRYINPRAQNKSMINVSHITCVVFGLGIAGFSVMLHYVGVHMTWFGYFTPMMICPGILPLIFTVTWNRQTYWAAFISPLVGFVVGLAVWVSTAYHFYGEVTIKSTGGQLPALYGSLTSMMLPGVLSIIISLVKPEKFDWDKLKTADLLIGEEEEEGSSPNIQPKNEEGDLNKEKQAGVEVNFESVETSSLEQQQQKSSSQLTNKELDFWIKIATGAAIFVLLITWVIWPMSVYRDWIFTGTYFKGYVTVGLI

SEQ ID NO: 13293 - protein, 556 aa, Prosthecochloris aestuarii DSM 271
MKRWYRQLLLSSVVVLTTASFFFHPLFARQSGMFSIVRSIDLLGDVFREVSLSYVDSIDVGKFMFAGIDGMLETLDPYTVFLDKEESVELGEITSGQYGGIGVTIAGIDNGVYVVSVLDGFSASRAGIKVGDQLISVDGISIRQDSLETVKNLLKGTPGTSLNLVLRRYGAQANRKLTLTRQEIRVNSIRYAGLIGDIGYFEMSSFGNRSAEELSAAISELNAEAEGSGQRMKAVILDLRNNPGGLLDVAVDVTGLFVRQGSEVVSIRGRLPESENRYVTKRDPVAGDLPLSVLINSKSASASEIVAGAIQELDRGVVIGARSFGKGLVQSIIPLPYDCKLKMTSARYYTPSGRLIQKYHAREDGWRSVIHGPGRQDSSRVFYTLNRRKVYGGGGILPDIPVSEPEFDDYEAKLQKKGMFFRYASAYRSLHPKAPGLPMKREGLLKGFNAFLEEERFSFESEPEVLLDQMKLSTAELGRSSRLDSLFNEVEREVSMLTERYRVDDRERIALAVEREILRHYDEDAARRLSLEQDPVVKKALDVLNSPKQYRSVLKP

SEQ ID NO: 13294 - protein, 408 aa, Zea mays
MARTMLDEYKTLDRFWVEAINTACYSINRLYLHRILKKISYELLTGKKPNVSYFRVFGSKCFILVKRGRKSKFAPKAVEGFLLGYDSNTRAYRVFNQSTRLVQVSCDIVFDETNGSQVEQVDLDELDDEEALCVALRNMSIGDVCPKESEEPTQAQDQPSSSNQATPPTQDEDQAQDNEDEDQEDEPPKEEDNDQGRDEENKDKEDEQEIQGQRPPHPRVHQAIQRDHPVNSILGDIHKGPYMVEDALRDLDWVVAMQEELNNYTRNEGLGMSEVEANTGGGGKEQDRFLPVANIGLIMRRAVPENGKIARDARESIQECVSEFISFITSEASDKCVKERRKTINDNDIIWSLGTLGFEEYVEPLKIYLNNYRERWAMGQQPCFGRIDGFRVRELLTLHHKSLQQFPR

SEQ ID NO: 13295 - protein, 537 aa, Solanum lycopersicum
MVFDFGTLVASLNRLSTSDHQSVVSINLFVALICACIIIGHLLEENRWMNESITALVIGLCTGVVILLISGGKNSHILVFSEDLFFIYLLPPIIFNAGFQVKKKSFFRNFSTIMLFGAVGTLISFIIISFGATSIFKKWNIGYLEIGDYLAIGAIFSATDSVCTLQVLSQDETPLLYSLVFGEGVVNDATSVVLFNAVQNFDLSHINTSKALELVGNFLYLFASSTILGVVAGLLSAYIIKKLYFGRHSTDREVAIVILMAYLSYMLAELFYLSAILTVFFSGIVMSHYTWHNVTESSRVTTKHAFATLSFIAEIFIFLYVGMDALDIEKWRFVSDSPQLSVQVSPILLGLVLVGRAAFVFPLSFLSNLMKKSPEERISFNQQIIIWWAGLMRGAVSVGLAYNQFTRGGHTQLRANAIMITSTITVVLFSTGVFGLMTKPLIRLLQPSPKHLTRMISSEPTTPKSFIVPLLESTQDSEADLGPNVPRPHSLRMLLSTPSHTVHRYWRKFDNAFMRPVFGGRGFVPFVPGSPTEPSGH

SEQ ID NO: 13296 - protein, 776 aa, Listeria monocytogenes str. 4b F2365
MIKLDMTMLDSFKEDPKLRKLLFSGHFGLEKENIRVTSDGKLALTPHPAIFGPKEDNPYIKTDFSESQIEMITPVTDSIDSVYEWLENLHNIVSLRSENELLWPSSNPPILPAEEDIPIAEYKTPDSPDRKYREHLAKGYGKKIQLLSGIHYNFSFPEALIDGLYDKISLPEESKQDFKNRLYLKVAKYFMKNRWLLIYLTGASPVYLADFSKTKHDESLPDGSSALRDGISLRNSNAGYKNKEALYVDYNSFDAYISSISNYIEAGKIESMREFYNPIRLKNAHTDQTVESLAEHGVEYLEIRSIDLNPLESNGISKDELAFIHLFLIKGLLSEDRELCSNNQQLADENENNIALNGLAQPALKNCDNEEISVVEAGLLELNKMSDFIQSLRPEDTKLQAIIEKQKERLLHPEKTIAAQVKQQVTKEGYVDFHLNQAKTYMEETEALAYKLIGAEDMELSTQIIWKDAIARGIKVDVLDRAENFLRFQKGDHVEYVKQASKTSKDNYVSVLMMENKVVTKLVLAEHDIRVPFGDSFSDQALALEAFSLFEDKQIVVKPKSTNYGWGISIFKNKFTLEDYQEALNIAFSYDSSVIIEEFIPGDEFRFLVINDKVEAVLKRVPANVTGDGIHTVRELVEEKNTDPLRGTDHLKPLEKIRTGPEETLMLSMQNLSWDSIPKAEEIIYLRENSNVSTGGDSIDYTEEMDDYFKEIAIRATQVLDAKICGVDIIVPRETIDRDKHAIIELNFNPAMHMHCFPYQGEKKKIGDKILDFLFE

SEQ ID NO: 13297 - protein, 68 aa, Arabidopsis thaliana; identical to SEQ ID NO: 12245

SEQ ID NO: 13298 - protein, 104 aa, Triticum aestivum
  misc_feature (95)..(95): Xaa can be any naturally occurring amino acid
MSELTHPTIKDGWFREISDMWPGQAMTLKVKNIIHHEKSKYQDVLIFESTDYGTVLVLDNVIQCTERDEFAYQEMITHLANELTPKIPKKVLVIXGGGDGGVPP

SEQ ID NO: 13299 - protein, 340 aa, Solanum tuberosum
MEVISTHTNGSTITITTNGHHNNGKSDHRNGGTIHDNGNKLLLGNSNSIKPGWFSEFSALWPGEAFSVKIEKLLFQGKSDYQDVMLFESATYGKVLTLDGAIQHTENGGFPYTEMIVHLPLGSIPTPKKVLIIGGGIGFTLFEVLRYSTIEKIDIVEIDDVVVDVSRKFFPYLAANFNDPRVTLVLGDGAAFVKAAQAGYYDAIIVDSSDPIGPAKDLFERPFFEAVAKALRPGGVICTQAESIWLHMHIIKQIIANCRLVFKGSVNYAWTTVPTYPTGVIGYMLCSTEGPEVDFKNPVNPIDKDTTHVKSKLEPLKFYNTDIHKAAFILPSFARSLIES

SEQ ID NO: 13300 - protein, 215 aa, Ashbya gossypii ATCC 10895
MIRIGSRLTPSLRHYTSSSQRITKFTMSGFYDLSPLDAKGEPFPFSQLKGKVVIIVNVASKCGFTPQYEELEELYKKYKDQGFEVIGFPCNQFAHQEPATNEEIVQFCKLNYGVTFPVLKKVDVNGADADPVYVYLKSQKSGLLGFKGIKWNFEKFLVDRKGQVKDRYSSITKPLSLEKTIETLLKEEGGPAPTATTEATATATADAAKPSGESL

SEQ ID NO: 13301 - protein, 473 aa, Synechocystis sp. PCC 6803 [sequence omitted]

SEQ ID NO: 13302 - protein, 578 aa, Penicillium chrysogenum
MVFLPPKESGQLDPIPDNIPISEFMLNERYGRVRHASSRDPYTCGITGKSYSSKEVANRVDSLARSLSKEFGWAPNEGSEWDKTLAVFALNTIDSLPLFWAVHRLGGVLTPANASYSAAELTHQLLDSKAKALVTCVPLLSISLEAAAKAGLPKNRIYLLDVPEQLLGGVKPPAGYKSVSELTQAGKSLPPVDELRWSAGEGARRTAFVCYSSGTSGLPKGVMISHRNVIANTLQIKAFEQNYRDGGGTKPASTEVALGLLPQSHIYALVVIGHAGAYRGDQTIVLPKFELKSYLNAIQQYKISALFLVPPIIIHMLGTQDVCSKYDLSSVTSLFTGAAPLGMETAADFLKLYPNILIRQGYGLTETCTVVSSTHPHDIWLGSSGALLPGVEARIVTPENKEITTYDSPGELVVRSPSVVLGYLNNEKATAETFVDGWMRTGDEAVIRRSPKGIEHVFIVDRIKELIKVKGLQVAPAELEAHILAHPDVSDCAVIAIPDDRAGEVPKAIVVKSASAGSDESVSQALVKYVEDHKARHKWLKGGIRFVDAIPKSPSGKILRRLIRDQEKEARRKAGSKI

SEQ ID NO: 13303 - protein, 154 aa, Zea mays
MVREQDRFLPIANISRIMKKAIPANGKTIPANGKIAKDAKETVQECVSEFISFITSEASDKCQREKRKTINGDDLLWAMATLGFEDYIEPLKVYLQKYREMEGDSKLTAKSSDGSIKKDALGHVGASSSAAQGGAYNQGMGYMQPQYHNGDISN

SEQ ID NO: 13304 - protein, 736 aa, Candida glabrata CBS 138
MSKRRSLLEVNQRELLQRTRGVENGRIRYRSSKRIHVQEQAKKQRTLTEFNIPTTSVLTVKNKRPISERVTESIELLSDEESLNGTDKNIQAFYTQETNTIVIDVEDGDSSFSTECNVVDKSEVYDGCSKSLNLSNTKPSQRECYNDDHLKIKSSTGSINRGHNLKTSNSNSEKGETKTPNTSLMKTDHSDRDIKNIPQRNITTKPILECPICSKNLTGMKLFQREAHCDNCFEQKPLSNFIEGRSAMVCQSKKIQTHLESTVEKEVGDKPNPISKSKNPRRNRIPESFKILTFTSGYQIIVDGFTYPLKEDNKIKDFFLSHFHSDHYIGLKKSWTSGNLYSSPVTYELLKYRYTPKRKTNEDNENITNCLKALKPYNRVWLTDTISVTTLDANHCPGASLFLFEEWDSMKTGILKTILHTGDFRSDDKLIEEVLKYTNHREIDEIYLDTTYLLSTFTFPAQEELLNMVARFIETINNPNFRQSFFGDKQKSIFHFMSLPSSIDKKSEIPMLYLVGTYSIGKEKLAIKIAETLNTKIYVQSNSIKRKMVSIYWDQCFDNSLLTDDPSESQIHLVSLKVLRDFNAIDNYLKTIKELTGNKIKYDNVFGFIPTGWTFGNRYKKDFQYDGELSYDDNFKLRVKYCMDLLKQDEARPTQNFADVSSLEWLRMQYKPRERYQIFRVPYSEHSSFRELLKFCISVPSKNIISTVNVDNGVNSAETSEWFKAFKYIRNKLSNN

SEQ ID NO: 13305 - protein, 1449 aa, Yarrowia lipolytica CLIB122
LTQNRGAMSISSILSGGERRASDASQQPPAPPLQQQSPLQQQPPPALHHPPPPPHLSPHQTHQAPHISPQHSPQNGHTMPGPPMMGHEQHYMQQQHPQHPQHPQQQSPPMLPQHHQHHPHPHHSPQHSPPMLQHQHHSSTSPPMYHKQQPHPQHQHPPPPHPGHMSPQGHPNMSPHPVQHQGPHPGHQGHPGHPGHQGHPAPPDMYAPRIYMSQQQIPQQAPWPIQIPIQGHTSVDGDHSAPESPPADADDPAYADAKTGFLQQVQSRLEAVVQLEELRDKVVIDEYTKTKAYTNAARYAAVKQSAKTSLQKEAIVRVAFVEYEEGGGLAGAHTSASPAASSSSSAAPVSSTSSAPASASSAAGAAAAAAATTSSVSTPKAKKRSKAVSKTSAAASVAAGTSSKEASPAPKPKTKKQLQAEQREKDREIREENAAAKEAAAAAKQLDQAYDSIWKDMARRDAAKVHKTVAATIAVKQSNHRKTAVLASKEARRWQYRTNKSIKDMQGKARRAMREMLSFWKRNEKEERDLRKKAEKEALDQAKKDEEDRESKRQARKLNFLLTQTELYSHFIGRKIKTDEMEDGEAAKDGDEDYEAMEKIAKSGSDVETKRAAELDFDEDDDDKLRQIAMQNAHNQVRRNQQQAQAFDAQSETPTAESGAAADSDDAFQNPTSLGDLQLSQPKLLNCTLKEYQLKGLNWLANLYEQGINGILADEMGLGKTVQSISVMAYLAETHNIWGPYLVIAPASTLHNWQQEISKFVPDFKVLPYWGNGKDRKILRKFWDRKNVKYTRDSPFHVLVTSYQLVVSDAQYFSRVKWQYMILDEAQAIKSSSSSRWKSLLAFQCRNRLLLTGTPIQNSMQELWALLHFIMPSLFDSHDEFSEWFSKDIESHAKEKSQLDQQQLKRLHMILKPFMLRRVKKHVQQELGDKIEIDVYCNLTTRQRVMYKILKSQINLQELLAKAQSGSEENTQSLMNLVMQFRKVCNHPDLFERADVKSAYNFGPSNCGSDKDTWIGSSNRNLISFEVPKLVYREGGFLDVPGEHSKAGSLNKLLKVDLNIWEPSWMGRKRDLVVEEEGGVGRVSRVSQMGVMERVINEVNRDVPSVGALPRYTPAPSPFDVFETLYDSYLHRLEPAYDPRVVAPPVDFVCRDRGFQIEQEEKMGGVDVRRALTPLTLGQELWWLEKAEAEVKGTNVTALTPGSVSLPPNDLFPSRVLDFNGINTLRMPSMSKFISCSGKLAKLDELLAELKAGGHRVLVYFQMTKMMDLAEEYLTFKQYNYCRLDGSSKLSDRRDLVNDWQTKPELFVFLLSTRAGGLGINLTAADTVIFYDSDWNPTIDSQAMDRAHRLGQTRQVTVYRLLVKGTIEERMRDRAKQKEHVQNVVMSGQSQSHEEEVNSKPSRDVALWLLDDDQDEASFVKGKENRGVKRGAEGEEEKKVEEIKKPKTE

SEQ ID NO: 13306 - protein, 180 aa, Coccidioides immitis RS; identical to SEQ ID NO: 706

SEQ ID NO: 13307 - protein, 147 aa, Sesbania rostrata
GFTDKQEALVNASYEAFKKNLPGHSVLFYSFILEKEPAAKGLFSFLKDSDGVPQNNPSLQAHAEKVFGLVHDAAAQLRATGVVVLADASLGSVHVQKGVTDPHFVVVKEALLKTLKEAAGATWSDEVSIAWEVAYDGLAAAIKKAMS

SEQ ID NO: 13308 - protein, 638 aa, Buchnera aphidicola str. Sg (Schizaphis graminum)
MGKIIGIDLGTTNSCVAIMDGNKPRVLENSEGDRTTPSIIAYTEKGEVLVGQPAKRQAITNPKNTLFAIKRLIGRKFRDDEVQRDIKIMPYSIINSENGDAWIDVKKQKMAPPQISAEVLKKMKKTAEDYLGESIKEAVITVPAYFNDAQRQATKDAGRIAGLEVKRIINEPTAAALAYGLDKGEGNRTIAVYDLGGGTFDISIIEIDDVDKEKTFEVLATNGDTHLGGEDFDSRLINYLVQEFKKEQGIDLRNDSLAMQRLKEAAEKAKIELSSAQQTDVNLPYITADSNGPKHLNIKVTRSKLESLVEDLVMRSIEPLKVALKDAGLSVGDINDVILVGGQTRMPMVQSKVADFFGKEPRKDVNPDEAVAVGAAVQGGVLSGDVKDVLLLDVTPLSLGIETMGGIMTSLINKNTTIPTKHSQVFSTAEDNQSAVTIHILQGERKRALDNKSLGQFNLDGIEPAPRGTAQIEVTFDIDSDGILHVSAKDKKTGKEQKITIKASSGLNEEEIKKMINDAEANSEADRKFEELIQVRNQGDQLIHSIRKQLDENKNQIEKKELEKIKSALDELERSLKGENKSEIEKNIQNLLNISSKLTEINQKKSEENLKKEDTSSESKKDENVVDAEFEEIKDPKK

SEQ ID NO: 13309 - protein, 491 aa, Neisseria gonorrhoeae FA 1090
MSKPVFKKIALYTLGAISGVAVSLAVQGFAAEKDGRDNEVLPVQSIRTMAEVYGQIKANYYHDKPDADLFEGAMKGMVAGLDPHSEYMDKKGYAEIKESTSGEFGGLGMEIGQEDGFVKVVSPIEDTPAERAEVKSGDFIVKIDNVSTRGMTVSEAVKKMRGKPGTKITLTLSRKNADKPIVVNLTRAIIKVKSVRHHLIEPDYGYIRVSQFQERTVESVNTAAKELVKENKGKPLKGLVLDLRDDPGGLLTGAVGVSAAFLPSEAVVVSTKGRDGKDGMVLKAVPEDYVYGMGGDPLAGIPAELKTIPMTVLVNSGSASASEIVAGALQDHKRAVIVGTQSFGKGSVQTLIPLSNGSAVKLTTALYYTPNDRSIQAQGIVPDVEVKDKERTFESREADLVGHIGNPLGGEDVNSETLAVPLEKDADKPAAKEKGKKKKDEDLSSRRIPNPAKDDQLRKALDLVKSPEQWQKSLGLAAKKPVSNKDKKDKK

SEQ ID NO: 13310 - protein, 683 aa, Shewanella sp. MR-4
MRKLTLATSIATVFVGFSAWAVPPTIQISELPTLKQEAQHKVASKRVTDLYTRSHYHRFALDDAFSAQIFDRYLQQLDYRRNVLTQADVDSFKPYVNQFDDMLSSGELEPAYKMFDLVQKRRYEGFVYALSLLDKEMDFTVPGDAYEYDREDVAWPKDQAEINELWRQRVKYDALNLKLTGKKWPEIVDILQKRYNNAIKRLTQTNSEDVFQAVMNAFSRSIEPHTSYLSPRNAERFQMEMNLSLEGIGAQLQLEDDYTVIKSLIAGGPAASSEKLSPEDKIVGVGQEGGEIVDVIGWRLDDVVDLIKGPKGSKVVLQILPKKGGSNAKPFNLTLVRDKIRLEDRAATSKIIEPKDGEYANRKVGVIQIPGFYMNLSQDVEKELVKLNEAKVEGVVIDLRGNGGGALTEAVLLTGLFIDMGPVVQVRDADGRVSAHRDNDGKTTYAGPLTIMVDRYSASASEIFAAALQDYDRALIVGESSFGKGTVQQHKSLGRIYDMYEKPIGHVQYTIQKFYRINGGSTQLKGVTPNIAYPSALEPGEYGEAEEKNALPWDKVPMAQYGTLNDITPELVASLDKKHLARIQNNVEFNYINQDIADFKKHHKEKTVSLVESERIASREADEKKVLDRTNERRVAHGLAAVKSMEDIKDKDDIEAPDAFLDETAYITLDMADAKKLANAGTK

SEQ ID NO: 13311 - protein, 169 aa, Triticum aestivum
  misc_feature (127)..(127): Xaa can be any naturally occurring amino acid
  misc_feature (144)..(144): Xaa can be any naturally occurring amino acid
MAFSEAQEELVLRSWKAMKPDSESIALKFFLRIFEIAPAAKPMFPFLRDAGEDAPLESHPKLKAHAVTVFVMACESATQLRKTGDVKVREATLRRLGATHVRAGVADAHFEVVKTALLDTIEGAVPXMWTLEMNAAWEEAYDQXLAAAIKEEMKLAAAGLMWHAWSLLS

SEQ ID NO: 13312 - protein, 886 aa, Candidatus Kuenenia stuttgartiensis
MNFELNAIVMPNGTLQLEWNEVKERIDKNQQLLQNEIHSRFKTDFKSFLLFLSFSDQSIPLSPSLDYWRYFTSEFSNKLRHIPDLETIRNNIAIPLGKEDIAEMLIRAPLMTGFEYLNAELLKLLWHMLNAQFQYEISIYRGTVEDFIHTYSPDLHIVGRIYFHLVENKRQDYPFAFLATYSTQGDKQGKSKHLPLKYALTEYGGNNEKLLDLLSTVHLAAKESDLISHLVDSGELFHPLAWDEKEAYRFLKEIPTYEKYGILCRIPNWWKSASSPLKVNIQLEGKKETFLGMDSLLDFNVNLLLGDTPITEEEARRLLAETDGLAYIKGKWVAVDAEKLEQVLHAYENARKLTEDKHFSLRDALRLQLNPNNLLGLTENDDNIEVSNGKWLEQVMEKLANHDLIPPACLDHTFKAQLRPYQEKGVNWLCFLDSLHFGACLADDMGLGKTIQILAFLHLLKNKKKKNASLLIIPASLISNWSNEINRFAPDLNYFVAHPEAHKDKKFEVKDEESLNKLDLVITTYTLVQKYEWLKTYVWHYVILDEAQAIKNPGTKQTRNIKTLQSQNRIIMTGTPVENRLSDLWSLFDFLNPGLLGNAKEFSEFAGSVKKNHTGYTRLKKIISPYILRRLKTDKTVISDLPEKVEMYTYAGLSRKQIVLYQNTVKELSKKLEATEGVQRRGLILASLMKFKQLCNHPDQFLGTGGYEEADSGKFMRLREICETIYEKREKVLIFTQFKEITGHLHAFLKTIFGREGLVMHGSVSVGMRKNIVEQFQNREYIPYMVLSLKAGGVGLNLTEANHVIHFDRWWNPAVENQATDRAFRIGQKKNVIVHKFITKGTIEEKINDMLREKTKLTTDVIQVTGESMITEMENKALVDLFKLTL

SEQ ID NO: 13313 - protein, 51 aa, Glycine max
  misc_feature (10)..(10): Xaa can be any naturally occurring amino acid
SIRALLSTPXHTVHRLWRKFDDAFMRPVFGGRGFVPIEPGSPTERNGHQWR

SEQ ID NO: 13314 - protein, 574 aa, Oryza sativa Indica Group
MEHSLVAEAEAQVFFKAKAKGGFRALPFIISNEILEKVAGFGLNINFITYLNMQYHLSHANAGSLLFVWGAVSNFAPIPGAVIADMYLGRFIVVAIGSIACFVGMVFLWLSAMIPGARPPPCDMRASPELCAPPEARHMAWLLAGFVFLSVGAGGVRPCSMAFGADQFSRHPKERRSRILQVYFNAYYGSIGVAFMVAVTVVVYVQDNLGWKVGLAVPTCLMLLSAASFLLGSGLYIKDRGSKRMFAGIGAAVAAAVRYRRAWLPAKTEDGVYHHLKDCKLTVPTDRLRFLNKACMIRNTKEDKSGSGGADGISDRGRLCTVDQVEQLKSAIRVMPIWSSTIFLAQAMNQYFAVPQADAMDRRVGAGGFRVPSGTFAVFNMLTMSLWSGCYDRWTAPALRRLTGNPRGLTMKQRIGGGLVFGTAAMAAAAVVEAARRRQALGGGGMSAFWLVPQYALAGLAEAFGVIGVIEFFYTELPKSMASFSMALLYMALGAGSLVGSLIIKLVHEVSRRGGRTSWLAEDLNAGRYDYYYWLLAGLGAVNFVCFLWCGWAYGEEGQNVEWEDEGEGETTIA

SEQ ID NO: 13315 - protein, 585 aa, Oryza sativa Indica Group
MEEALSKKTTSKGGLRTIPFIISNEVFEKVATFGLHANMILYLTERYHMTAATGTVVLYFWNALSNFLPIFGAVLSDSCLGRFRVIALGSVVSLAGMCLLWLTAILPADRRTPECEARRDDCQLVPWQLPLLFASFVLMSVGSGGIRPCALAFGADQLDRRDNSARNVRTLQTFFNWYYTVLGLSIVLASTVIVYIQQAKGWVIGFAVPVVLMLTALTLLLLGSPFYLKAEADRSVLVGLVQVLVASYRKRRGPLPPETADASRFHNRAGYKPRTPSNRLRWLNRACALGDNPDKEVNPDDGSARDPWTLCTVQQVEDVKAAVRVLPIWSTGFMPGVIIGQQMFPVLQAKTMERRVGGLEIPAASFGVFSILTLTVWVAVYDRALVRPLSRLTGHARGVTLRQRMGIGLALFAVAMAVAARTEAARRAEALAEGLRDYGPQSGRAVRMSAMRLVPQHCITGLAEALNLIGQIEFYYSEFPKTMSSIGVSLLALGMGFGSVAGSAIVGAINAGTRSGGGRDSWLSSNLNRGHYDYYYLVLAALCVANLAYFVWCGWAYGEEGQNRVTAEEEAVEDTKTKEEQQQKL

SEQ ID NO: 13316 - protein, 167 aa, Citrus sinensis
MASQSKTSVHDFSVKDAKGQDVDLSIYKGKLLLIVNVASQCGLTNSNYTELSQLYDKYKNQGLEILAFPCNQFGAQEPGDNEQIQEFACTRFKAEFPIFDKVDVNGDNAAPLYKHLKSSKGGLFGDSIKWNFSKFLVDKEGNVVERYAPTTSPLSIEKDIKKLLETA

SEQ ID NO: 13317 - protein, 574 aa, Shewanella oneidensis MR-1
MHESQLTTSAAKPSRLGWFDDVLLLGIMAVLAGCGLIYEYLLSHYAGRILGALEAAIYTMIGLMIVSMGLGAFAARKIKDAFTGFVVLELTVALCGSLAILITAAVIGFGQQLPMLIASTLGLPPDQLPEGGMIGTLQKLSEYLPYFWGVLLGLMIGMEIPLIARVRQSLSDEHLLHNAGTIYGADYIGAGIGAAIWVGFMLAIDIQLAAALTASFNLLAGFVFIWRFWQKIQRPKLLLAAHLVVTGVLLLLAIQGPSWEQQFNNLLYKDKVVYAKATRFQQLTFTERLRGNGLSPVYALYINGRLQFSSSDEHIYHAFLVHPTLAASARHNKVLIIGGGDGLGLKQVLRWEPEQVTLLDLDAALVQLFKSPDPDMPERLSQALLSLNGNAFNDPRVTVIHDDAFNGVDKLIAKGDKYDAIIVDLPDPSHPDLNKLYSDYFYRKLKELISNDGALTVQSTSPYHAQKAFISVAKTLALAGFDVKQYHHNVPSFGEWGWSIATLDGKDAQHRLAQLTKLPIADDWLTLGLVKGAFEFPANFYQDATNIKPNELGSLQLYHYHQQAWSETQGLDLF

SEQ ID NO: 13318 - protein, 161 aa, Brassica napus
MDPMDIVGKSKEDASLPKATMTKIIKEMLPADVRVARDAQDLLIECCVEFINLISSESNEVCNKEDKRTIAPEHVLKALHVLGFGEYVEEVYSAYEQHKYETMQDSQRSVKMNTGAEMTEEEAAAEQQRMFAEARARMNGGGVSVPQPEQQLDTQQPNLQS

SEQ ID NO: 13319 - protein, 710 aa, Desulfotalea psychrophila LSv54
MKLMKSFFFSVLVLLFLSPVLHADSLTAEEQERDSLIGHMLSKQLPTLHYSDKELNDSLGEAAFSLYLKQLDYQKRFLLQEDVDVLHSHADSIDDNMRSGQVVLPSLGSEILLKRVAQVQQMVTKMVAAEIGHTPGEVYQSDPKKLSYAKSLAELEDRWRKILKAQVMSRYLDLEEEAQAAKGADLAGKKSGEGTRKSVSSNFKKMWAEATEKVAKQNKTFLHRLTQETLQDHTDRFFNSVARAFGPHTNYIPPASKEQFDINMRGSLEGIGALLKEEDGMIKVVRVIPGSASARQGGLEIEDAILSVGQGDEEPVDVSDMRLRDAVRLIRGAKGTEVRLTVRKNGGLKSVVPIIRDVVQMEDTFVKSLVVKGDDGARIGYINIPSFYRDFEKSKKGEKGRNSTDDTRVEVLKLKALGVDGIVLDLRNNGGGALVDAIDIAGLFVKEGPMVQVRTSMGDKRILFDQDEGIVYAGPLVILVNKFSASASEIVAAALQDYHRAVIMGGAHTHGKGSVQTVLDLNEYVPWLSMANYEDLGALKIMIQKFYRVNGGSTQYKGVEPDIVLPSIYEHLKSGERYLDYSLPWDSIEAIDYTTFSLSPDIEKIRKNSLVRVKKNKEFDIIRDEVAKAEERSLDTYIYLDIERMRGDRRMAKAARKRLGAEVGLLEEEPKSTISETEAEKESHWRQGVSRDPWVQEAGRVIADIGRQVS

SEQ ID NO: 13320 - protein, 166 aa, Zea mays
  misc_feature (25)..(25): Xaa can be any naturally occurring amino acid
  misc_feature (27)..(27): Xaa can be any naturally occurring amino acid
  misc_feature (31)..(31): Xaa can be any naturally occurring amino acid
  misc_feature (39)..(40): Xaa can be any naturally occurring amino acid
  misc_feature (43)..(43): Xaa can be any naturally occurring amino acid
  misc_feature (61)..(61): Xaa can be any naturally occurring amino acid
  misc_feature (77)..(77): Xaa can be any naturally occurring amino acid
  misc_feature (95)..(95): Xaa can be any naturally occurring amino acid
  misc_feature (120)..(120): Xaa can be any naturally occurring amino acid
MALAEADDGAVVFGEEQEALFSLSXAXMKKXGGHFFFSXXLKXFEIAPGAKQTPPLLRDSXVPLEKNPQSSTHAHCXLVMTCEAAAQLRKAGKVXVRETPLQRLGATHLRYGVADGHFEXVTGFALLETIKEALPADMWSLEMKKAWAEAYSQLVAAIKREMKPDA

SEQ ID NO: 13321 - protein, 1235 aa, Saccharomyces cerevisiae
MHFRRTMSRVPTLASLEIRYKKSFGHKFRDFIALCGHYFAPVKKYIFPSFIAVHYFYTISLTLITSILLYPIKNTRYIDTLFLAAGAVTQGGLNTVDINNLSLYQQIVLYIVCCISTPIAVHSCLAFVRLYWFERYFDGIRDSSRRNFKMRRTKTILERELTARTMTKNRTGTQRTSYPRKQAKTDDFQEKLFSGEMVNRDEQDSVHSDQNSHDISRDSSNNNTNHNGSSGSLDDFVKEDETDDNGEYQENNSYSTVGSSSNTVADESLNQKPKPSSLRFDEPHSKQRPARVPSEKFAKRRGSRDISPADMYRSIMMLQGKHEATAEDEGPPLVIGSPADGTRYKSNVNKLKKATGINGNKIKIRDKGNESNTDQNSVSSEANSTASVSDESSLHTNFGNKVPSLRTNTHRSNSGPIAITDNAETDKKHGPSIQFDITKPPRKISKRVSTFDDLNPKSSVLYRKKASKKYLMKHFPKARRIRQQIKRRLSTGSIEKNSSNNVSDRKPITDMDDDDDDDDNDGDNNEEYFADNESGDEDERVQQSEPHSDSELKSHQQQQEKHQLQQNLHRMYKTKSFDDNRSRAVPMERSRTIDMAEAKDLNELARTPDFQKMVYQNWKAHHRKKPNFRKRGWNNKIFEHGPYASDSDRNYPDNSNTGNSILHYAESILHHDGSHKNGSEEASSDSNENIYSTNGGSDHNGLNNYPTYNDDEEGYYGLHFDTDYDLDPRHDLSKGSGKTYLSWQPTIGRNSNFLGLTRAQKDELGGVEYRAIKLLCTILVVYYVGWHIVAFVMLVPWIILKKHYSEVVRDDGVSPTWWGFWTAMSAFNDLGLTLTPNSMMSFNKAVYPLIVMIWFIIIGNTGFPILLRCIIWIMFKISPDLSQMRESLGFLLDHPRRCFTLLFPKAATWWLLLTLAGLNITDWILFIILDFGSTVVKSLSKGYRVLVGLFQSVSTRTAGFSVVDLSQLHPSIQVSYMLMMYVSVLPLAISIRRTNVYEEQSLGLYGDMGGEPEDTDTEDDGNDEDDDEENESHEGQSSQRSSSNNNNNNNRKKKKKKKTENPNEISTKSFIGAHLRKQLSFDLWFLFLGLFIICICEGDKIKDVQEPNFNIFAILFEIVSAYGTVGLSLGYPDTNQSFSRQFTTLSKLVIIAMLIRGKNRGLPYSLDRAIILPSDRLEHIDHLEGMKLKRQARTNTEDPMTEHFKRSFTDVKHRWGALKRKTTHSRNPKRSSTTL

SEQ ID NO: 13322 - protein, 1187 aa, Arabidopsis thaliana; identical to SEQ ID NO: 11968

SEQ ID NO: 13323 - protein, 540 aa, Glycine max
MQRSGYGSDGIYRSLRPSIVFPKNSNLSLVSHLFNRVAAFPSKPALIDADSSETLSFAELKLLTVRVAHGLLRLGVTKNDVVLFLAPNDIRYIVCFLAVASLGAAVTTVNPAYTAAEVSKQANDSKPKLLVTVAELWDKLEHLKLPAVFLRCSNAPHAPSSATSFDALVQLAGSVTEFPEIKIKQSDTAALLYSSGTTGLSKGVVLTHGNFVAASLMIGFDDDLAGVLHSVFLCVLPMFHVFGLMVISYGQLQRGSAVVSLKKFEFELVLKTIEKFKVTHLWVVPPIILALAKHGLVDKYDLSSLKHIGSGAAPLGKELMKECAKRFPHAIVSQGYGMTETCGIVSVENARMGIRNSGSTGMLVAGMEAQVVSVDTLKPLPPGQLGEIWVRGPNMMQGYHNNPQATRLTMDKKGWVHTGDLGYFDEDGQLFVVDRIKELIKYKGFQVAPAELEGLLVSHAEILDAVVIPYPDAEAGEVPVAYVVRSPNSSLTEEDVQKFIAKQVAPFKRIRRVTFINAVPKTASGKILRRELIEKVRSKI

SEQ ID NO: 13324 - protein, 658 aa, Chlamydia muridarum Nigg
MFNMSEKRKSNKIIGIDLGTTNSCVSVMEGGQPKVIASSEGTRTTPSIVAFKGSETLVGIPAKRQAVTNPEKTLASTKRFIGRKFSEVESEIKTVPYKVAPNSKGDAVFEVENKLYTPEEIGAQILMKMKETAEAYLGETVTEAVITVPAYFNDSQRASTKDAGRIAGLDVKRIIPEPTAAALAYGIDKEGDKKIAVFDLGGGTFDISILEIGDGVFEVLSTNGDTHLGGDDFDEVIINWMLGEFKKQEGIDLSKDNMALQRLKDAAEKAKIELSGVSSTEINQPFITIDANGPKHLALTLTRAQFEHLASSLIERTKQPCAQALKDAKLSASDIDDVLLVGGMSRMPAVQAVVKEIFGKEPNKGVNPDEVVAIGAAIQGGVLGGEVKDVLLLDVIPLSLGIETLGGVMTPLVERNTTIPTQKKQIFSTAADNQPAVTIVVLQGERPMAKDNKEIGRFDLTDIPPAPRGHPQIEVTFDIDANGILHVSAKDAASGREQKIRIEASSGLKEEEIQQMIRDAELNKEEDKKRREASDIKNEADGMIFRAEKAIKDYQDKIPADLVKEIEEQIEKVRQAVKEDASTTAIKAASDELSARMQKIGEAMQAQSASAANAQGGPNINSEDLKKHSFSTRPPAGDNSSSTDNIEDADVEIVDKPE

SEQ ID NO: 13325 - protein, 270 aa, Zea mays
MPQVANEFDDDDKENIPCPKSPEKSANPRSKRYRTDCSPKAREVTDFSFDHQITPVLFDSLTRDDSEEEQPKQPALEKRGGYVSQSAVALRCRVMPPPCVKNPYLNTDPCIDAAVYGGRQCNSAVFSPSIGGNGLSRYRTDFHEIEKIGYGNFSVVFKVLNRIDGCLYAVKRSIKQLHNDMERRQAVKEVQAMAALGSHENIVRYFTSWFENEQLYIQMELCDRCLSMNRNQPVKRGEALELLYQVYHSSMLTKSNPYKMQRNIGCMPVL

SEQ ID NO: 13326 - protein, 463 aa, Vitis vinifera
MARLNKSFSFRCGLFSVSYGLRPKLRKYTASLQKELNCSEKFKHHVSVHFVRLVVGVMLVMSVSVGVSRPPSWALTEENLLFLEAWRTIDRAYVDKTFNGQSWFRYRENALRNEPMNTREETYIAIKKMLATLDDPFTRFLEPDKFKSLRSGTQGALTGVGLSIGYPTGFDGSPAGLLVISASPGGPASRAGILSGDVILTIDGTSTETMGIYDAAERLQGPEGSSVELTIRSGPEVKSLSLMRERVSLNPVKSRLCKMPGLGKDSPKIGYIKLASFNQNASGAVKEAIESLRSNDVNAFVLDLRDNSGGLFPEGVEIAKIWLEKGVIVYICDGRGIRDIYDTDGSSVVAASEPLAVLVNKGTASASEILAGALKDNKRAVLFGEPTFGKGKIQSVFELSDGSGLAVTVARYETPAHIDIDKVGIAPDHPLPTPFPKDAEGFCGCLMDPTSACYLNRVQLFSR

SEQ ID NO: 13327 - protein, 638 aa, Pseudomonas syringae pv. phaseolicola 1448A
MDRIIGIDLGTTNSCVSILENGNVKVIENAEGTRTTPSIIAYANDGEILVGQSAKRQAVTNPHNTLYAVKRLIGRKFEEDVVQKDIQMVPYKIVKADNGDAWVEVNGQKMAPPQISAEILKKMKKTAEDYLGEAVTEAVITVPAYFNDSQRQATKDAGRIAGLDVKRIINEPTAAALAYGMDKAKGDHTVIVYDLGGGTFDVSVIEIAEVDGEHQFEVLATNGDTFLGGEDFDIRLIDYFVDEFKKESGMNLKGDPLAMQRLKEAAEKAKIELSSSTQTEVNLPYITADATGPKHLVVKISRSKLESLVEDLVQRTIAPCEMALKDAGIDRSKINDVILVGGQTRMPLVQKLVTEFFGKEARKDVNPDEAVAMGAAIQGAVLAGDVKDVLLLDVSPLTLGIETMGGVMTALIEKNTTIPTKKSQVFSTADDNQNAVTIHVLQGERKQAGQNKSLGKFDLAEIPPAPRGVPQIEVTFDIDANGILHVGAKDKATGKQQSIVIKANSGLSEEEIQQMVRDAEVNSEEDRKFEELASARNQGDALVHSTRKMIADAGDKVTAEEKTAVEAALVALEAAIKGDDKAAIEAKVEELSKVSAPIAQKMYAEQAENPEAAAKPAEENGKADDVVDAEFEEVKDHK

SEQ ID NO: 13328 - protein, 638 aa, Xylella fastidiosa Dixon
MGKIIGIDLGTTNSCLAIIEGGKGRVIENSEGDRTTPSIVAYTKDGEVLVGAAAKRQAVTNPKNTFYAVKRLIGRKFGDAEVQKDLDLVPYKITQHDNGDAWVATADGKKLAPQEISAKVLEKMKKTAEDFLGEKVTEAVITVPAYFNDSQRQATKDAGRIAGLDVKRIINEPTAAALAYGLDKKGGDRKIAVYDLGGGTFDVSIIEIAEVDGEKQFEVLATNGDTFLGGEDFDKRVIDYLVDEFNKDQGIDLRKDPLALQRLKDAAERAKIELSSSQQTEVNLPYITADASGPKHLNIKLTRAKLEALVDDLVRKSIEPCRIALNDAGLRTSDVQEVILVGGQTRMPKVQQAVADFFGKEPRKDVNPDEAVALGAAIQGGVLAGDVKDVLLLDVTPLSLGIETMGGVFTKIIEKNTTIPTKASQVFSTAEDGQSAVTVHVLQGEREQARFNKSLAKFDLAGIEPAPRGQPQIEVSFDIDANGILHVSAKDKKTNKEQKVEVKAGSGLSDSEIQQMVADAEAHREEDKKFQELVQARNHADGLIHSTRSAIKEHGSKVGGELIGRVEASLAELEAAVKGDDKNQIEAKSKTLEEVAQSLHMAATAEQQSASTGAGAGSSAKVDDVVDAEFTEVKGDKK

SEQ ID NO: 13329 - protein, 234 aa, Medicago sativa
VSMASFTTFFTPLHNFNQARTYSTPSISLPFVKSSIASSKSPFFQHGFSQPTSFDFPKAVLKSKSFSVNARAVTDKSIYDFTVKDIDKKDVPLSKFKGKVLLIVNVASRCGLTSSNYTELSHLYENFKDKGLEILAFPCNQFGMQEPGSNEEIKKFACTRFKAEFPIFDKVDVNGPFTAPVYQFLKSSSGGFFGDLVKWNFEKFLVDKNGKVVERYPPTTSPFQIEKDIQKLLG

SEQ ID NO: 13330 - protein, 402 aa, Picea sitchensis
MLTAAMSFCCLDSFWKRKTSKDQAPHNEIGDVISSIPDVKVYPYAELKIATNIFHLDNKIGSGGFGSVYKGTLKDGTVVAVKQLSAQSKQGVKEFLTEIATISDVQHENLVKLHGCCAEEEHRILVYEYLEKNSIAQALLDNTRMDMDWTMRAKICMGTARGLSYLHEELVPHIVHRDIKASNVLLDRDLNPKIADFGLAKLFPDNVTHISTRVAGTIGYLAPEYAMRGQLTKKADIYSFGVLVLEIISGRSNTKSTFPLEEQFLLEWTWQLREESRLLDIVDPRLEEYPKEEVLRFIKVALLCTQAASNFRPSMSQVVAMLSKEININENLLSRPGFISDFKNLKVSAGTSRPPARTNLNAFHNAQVTAMHRGVSSSSTTTGNSTSVVSSSPATITQLEPR

SEQ ID NO: 13331 - protein, 644 aa, Gibberella zeae PH-1
MASAKLVGMGFELLKRATDEEETDPEEGDSAQKELFAAWALFISIMLLIVAFFTSYMLQMKKVTAIHETVISIFAGMVVGLVLMIFGGDSIRTMISFDYQIFFNLLLPPIILSSGYELHQANFFRNIGTILTFAFAGTFLSAVVIGFILYLFTLIPGSLEMSFVDAISVGATLSATDPVTILAIFNAYKVDPKLYTIIFGESILNDAIAIVIFETAQKYKKGEAAGLSIISFFEGTGIFLLVFFCSLFIGFLVGVATALLLKFTYLRRTPKIESCLMVLIPYATYFFSHGLHMSGIVSLLFCGITLKHYAYFNMSRRTQLTTKFIFQILSQLSENFIFIYLGLALFTDNHLQFQPPLIIVTILAVCAARWVAVFPLSKAINWFIRYRAGRRGQEVGDELPYNYQAMLYWAGLRGAVGVALAALLTGENSPALRATVLVVVVLTVIIFGGTTARMLEILGIRTGVVEEVDSDDEFDIETFGGGLQVKRSGTGIGYNPRRNGSVALGSLEAGQSASYVSGASSPHTGGRPTSKVRKNSIPERSDLLRHNDDSDIGSDIDVSDLPPPARRSPLPRSNTATPSRVDSAYATPISETPGGQPITASNAIRQLWTSEDPASVFHHLDEDFIKPRLLLQGDSSRGGNGGPS

SEQ ID NO: 13332 - protein, 593 aa, Physcomitrella patens subsp. patens
MTRRGMDSWHEERGKKDVQQGGLGVQHGVEQGGGQQTRKNPSISQLKGFYPDNGIKYLPLIKHGNHALQKNAVCPAVWDCTAVYFVTNVVLAFLPAATTAKIDERTKTKRRGLIRDSSPGNSKLKSNSATRLGDTPGPNWIRKTRPGPRVSSEPADIFDPRSWPESVLGRACGVPRQPPSSEIRPLRLNVRHKSPRSSSVAADEGLSISVDGILLKMARTNTACELCDGVAALYCEADEAHICWICDAKVHSANFLVARHTRSVLCGTCGTQTSWRASGANPTPLPGVCAECSQGEAQGECITLNDGNVIDTARVTAESCESAVIFETEFSQVSSCESSHSQLSSYDSEGVIVDCGSAHASVSSGISKSLKRKRSLHSLLPVSVPQSKQIAMRVLEDVNSSDAHRQCKCDSTTSSSSSTGSNSRANQDSSFEERGDNRTQFPEFGNTNRVVTNHLLSSAKRQRMDDRVQTMSSFAPAQESAVLSISRSMRTLAKWHWDLHLSSPGTVPLALRMFCKVSRALTPTLFSNSGRRVALAACLRLAAVLDEAQITVPNSGKVAACAGVSARRLAMTELHLLALLGSRRLPVWASSRT

SEQ ID NO: 13333 - protein, 183 aa, Pectobacterium atrosepticum SCRI1043
MSTEIYAIPLTTIDGKATTFEAFKGQVALVVNVASKCGLTKQYDALEKLYETYRDKGLVVLGFPSNEFAGQEPGSEEEIQEFCRGTFGVQFPMFSKIEVNGENRHPLYQLLIRQQPEANGTWKSDFFARLVNKGRKPKNPEDILWNFEKFLVDREGRVIERFAPDMSPDHDTIVKAIEAALAK

SEQ ID NO: 13334 - protein, 303 aa, Brassica napus
LQKCQDFKMKINMIQDLREMTKKVLHYYKGDFLDELPGLDDFTVVLNLSPRQLTEVKKLRREKRKFKVSAVGSAIYLHPKLNAFSEKTDNVSDTTMDEMLEKLDVNEGVKAKFFLNLIDLCDSAGEKLLVFSQYLVPLKFLERLAALAKGWKLGKEVFVLTGESSSEQRELSMERFNNSPDAKVFFGSIRACGEGISLVGASRILILDVPLNPSVTRQAIGRAFRPGQTKKVHAYRLIAGSSPEEEDHNTCFKKEVISKMWFEWNEYCGFRNFEVETIDVDDAGDMFLESPALREDIRVLYKR

SEQ ID NO: 13335 - protein, 246 aa, Picea sitchensis
MASSFSASIACNSSIASFFNTNPVRSSFPSYGFPVQSRLWVQIAHGLRKSELFGDAFSLKSMNAARIRLESVRAPGHAFAAAVTEKSVHDFTVKDIDGKEVPLSKYKGKVLLAVNVASKCGLTTGNYTELSHLYEKYKTQGFEILAFPCNQFGGQEPGKNTEIKEFACTRFKAEFPIFDKVDVNGPNTAPVYKFLKSSKGTGLFGDSIKWNFEKFLIDRDGKVVERYLPTTSPFQIEKDIQKLLAA

SEQ ID NO: 13336 - protein, 538 aa, Hordeum vulgare
MAFEVVAAQLARLSDALATSDHASVVSINLFVALLCACIVLGHLLEENRWLNESITALIIGLCTGVVILMTTKGKSSHVLVFSEDLFFIYLLPPIIFNAGFQVKKKQFFRNFMTITLFGAVGTMISFFTISLAAIAIFSKMNIGTLDVSDFLAIGAIFSATDSVCTLQVLNQDETPFLYSLVFGEGVVNDATSVVLFNALQNFDPNQIDAIVILKFLGNFCYLFVSSTFLGVFSGLLSAYIIKKLYIGRHSTDREVALMMLMAYLSYMLAELLDLSGILTVFFCGIVMSHYTWHNVTESSRVTTKHAFATLSFIAETFLFLYVGMDALDIEKWKFASDSPGKSIGISSILLGLVLVGRAAFVFPLSFLSNLTKKTELEKISWRQQIVIWWAGLMRGAVSIALAYNKFTRSGHTQLHGNAIMITSTITVVLFSTMLFGILTKPLIRFLLPASSNGDPSEPSSPKSLHSPLLTSMLGSDMEAPLPIVRPSSLRMLITKPTHTIHYYWRKFDDALMRPMFGGRGFVPYSPGSPTDPNVIVA

SEQ ID NO: 13337 - protein, 1132 aa, Oryza sativa Japonica Group
MHGDWPESPSQEVLYADEIAAVRAVLGAGLPEARVVAAISRCGGNAERAINALLDDATAGVEDKPEPKKGKGAKTAAPPVKAERDAGGAAPKPPPPPVKVEVLDDEPLGSQESNGCSARVKKEREDELLVKAPPPMPDRVKEEDGVAAKRGAATANAAGISLVPRPKKRSRVHDEADTIDLTATHPVPYLNPRPIRAVPPPEAMEMLESRRVRARPPPPSSDLRMVVAPPDAEFGEFPEERDWFLVGRSYVTGLSTNRGRRRLDAGELVHFSFPSLERTYGGIKVSNKKAAALAEIVRFSTNRAGEIGKLSTEWTKCLVPLVSSSKVKIQGKIVFPTVELRLMQEILLYVSFYIHRSVFTASGNNSSWDLLAPANVDYSTNPLYRLFRLLKLRAFTKADITPEELAAGKRPRNLRGDDNDEDEPMAIVGLENRRTAGQTFPEQGTDEQAISEAALNKIVGTAETYDLEEAEPPSTLVSVLKPYQKEALFWMSQLEKGIDGDQAKKTLHPCWSAYKIVDKRAPAVYVNVFTGEATTQFQSVTQSARGGILADAMGLGKTVMTIALILSNPRGELEQDKRGTRDRDTKAQTSRSSVRGGTLIICPMALLGQWKDELEAHSTPGALSVFVYYGGDRTTDLRFMAQHSVVLTTYGVLQSAHKNDGSSIFHRIDWYRVVLDEAHTIKSPRTKAARAAYELTSHCRWCLTGTPLQNNLEDLFSLLCFLHVEPWGDASWWNKLIQRPYENGDERGLKLVRAILRPLMLRRTKETKDKMGNPILVLPPANIEIVECEQSEDERDFYEALFRRSKVQFDKFVAQGSVLNNYANILELLLRLRQCCDHPFLVISRADTQKYTDLDELAQRFLDGVQRDSARRSAPPSQAYVEEVVEEIRQGATTECPICLESASDDPVLTPCAHRMCRECLLSSWRTPSGGPCPLCRSPITKSELITLPSQCRFQVDPENNWKDSCKVIKLIKILEGLQEKREKSIVFSQFTSFFDLLEVPFNQKGIKFLRFDGKLSQKHREKVLKEFSESKDKLVLLMSLKAGGVGLNLTAASNVFLMDPWWNPAVEEQAIMRIHRIGQKRAVQVRRFIVKDTVEERMQKVQACKQRMISGALTDDEVRSARIEQLKMLFT

SEQ ID NO: 13338 - protein, 345 aa, Arabidopsis thaliana
MGRFKNNKKSRVIGKPIAKKNQEDVSHVTGDKIPKSFVFSRMKLAGPVKQLQMDLRKLMLPYTALSLKEKKRNTLRDFLNVSGPMGVTHFLMLSKTASSLSLRVARTPQGPTLTFKIHQYSLASDIAQSQLRPRCPQDLFKSPPLIVLSGFGSQELHLKLATIMFQNIFPAIDINTVKLSTCQRLVLLNYNKDTKLIDFRHYSIRLQPVGVSRRIRKFVQNHQVPDLRNLQDVSDFVTKAGYGSESEGDEEAATVTLSSDLGRVNKGATKSAVKLQEIGPRMTMQLVKVEEGLCTGGIIFSEYDVDGKKEKLKKKQDEEEEEDSEEEGEEGSEEDGEDMDEDFED

SEQ ID NO: 13339 - protein, 346 aa, Arabidopsis thaliana; identical to SEQ ID NO: 13122

SEQ ID NO: 13340 - protein, 687 aa, Zea mays
FVIGLQQTATSPEPDMVIEEEEKHKNESDGLDDYWKDFALAVESTKLDEVDEAAIEKEDNGKMEDIDCNHDIRIHEDLGHVCRVCGMIVRRADSIIDYQWKKASRRRTNGYGGHSKDADEIDCGTVKLSEDFIVADIAIHPRHARIMKPHQLEGFNFLVKNLIGDKPGGCILAHAPGTGKTFMLISFIQSFMARYPSARPLVVLPKGILGIWKTEIKRWQVQDIPVYDFYSVKAEKRVEQLQILKSWEDKMSILFLGYKQFSTIVTDDGGSNVTAACRDRLLKVPNLLILDEGHTPRNRETNVLESLNRVETPRKVVLSGTLFQNHVEEVFNILNLVRPKFLRMESSRPTARRIMSQVEIVGRSSKGLADGAFTKAVEETLLNDENFKRKAHVIRGLRELTKDVLHYYKGDILDELPGLVDFSVFLKLTPKQKDIIYKLEAHDRFKRNAVGSALYIHPCLSELSEVNAEHRANTFRDDLVDSLVDSITVRDGVKANFFMNILSLANSAGEKVLAFSQYISPMIFFERLLVKKKGWHVGKEIFMISGDTSQEDRELATDHFNNSADAKIMFGSIKACGEGISLVGASRVVILDVHLNPSVTRQAIGRAFRPGQQKKVFVYRLVAADSDEVKVHETAFKKEVIPKLWFEWSEHCTTEDFKLGQIDIDDSGDELLDTKAIRKDIKALYRR

SEQ ID NO: 13341 - protein, 485 aa, Solibacter usitatus Ellin6076
MLRSTLVLLCTACLLSAQDDFEKQMRSVIGAYAIAAENAADPITSEQAFYAGAIPGLLRKLDPHSIFFDPEQFEQLKRMESSTSKGFGSVVSILPGRVIVLQTISGTPSQKAGLAPGDEILAINGYVIGQLDIEQLPQLLEQSRQRQARLDVRRPGVPGLMHFTLTPEEMQSPSVDRAFFLAAGIGYIRVSSFDEKTGQQIKAAIEKLGGDRLAGLVLDLRNNPGGVLGAAIETCSLFLKPGMKIVTVRGRHVPETTEVVPSIAAPYGFKLAILVNEKSASASEVVSGAMQDHDRATIIGVPSFGKGLVQSVFPLTQNTGLALTTALYYTPSGRSIQKPLDSAKFALGPTTAHPNAQSEFHTDKGRRVTGGGGIQPDFVVNPSPSNRLRAVLDASASFTNFATEYLRAHKVDADFEVTPELLDQFRVFLSDREIRPGLAEWLTERDFVSNRLKTELFNQAIGVEKGDEVEAQRDPVILKALEVIG

SEQ ID NO: 13342 - protein, 298 aa, Candida glabrata CBS 138
MAEQKYIKDGWFYEMSDEHFPGQALALKVKQVLYQSKSEFQDILVFESTNHGVCLVLDGIIQCSERDEFAYQEMIAHIPLYCHANPKKVLVIGGGDGGVVREVVKHDKVESVTMVEIDKTVIELAKKYLPGMSCAMDHPKLKLNLCDGFKFLKEASMLSNDDKYDVIITDSSDPDGPAEAFFQKEYFELLQNALKPDGIVIAQASENVWLDINYLASLRKTANEVFTNTMISYTTVPTYTSGQLGLIVCTNSNDYDLTTPQRQPSVSEQNQLRYYNSQIHSASFVLPNWADMLIYDKK

SEQ ID NO: 13343 - protein, 160 aa, Pseudomonas putida KT2440
MSAFHDLKLEALNGGELPLAPFKGQVVLVVNVASKCGLTPQYKALENLYQIYKDKGFNVLGLPCNQFAGQEPGSEKEIQDFCSLNYGVSFPLGSKLEVNGPQRHSLYRLLAGEGAEFPGDITWNFEKFLVGKDGRVLARFSPRTAPDDPAVVQAIEKALA

SEQ ID NO: 13344 - protein, 171 aa, Glycine max; identical to SEQ ID NO: 739

SEQ ID NO: 13345 - protein, 659 aa, Chlamydophila abortus S26/3
MSEQKKSSKIIGIDLGTTNSCVSVMEGGQAKVIVSSEGTRTTPSIVAFKGNETLVGIPAKRQAVTNPAKTLASTKRFIGRKYSEVESEIKTVPYQVASGSNGDVVFPIDGKQFTPEEIGAQVLIKMKETAEAYLGEPVTEAVITVPAYFNDSQRASTKDAGRIAGLDVKRIIPEPTAAALAYGIDKAGDKKIAVFDLGGGTFDISILEIGDGVFEVLSTNGDTHLGGDDFDEVIIKWMIEEFQKQEGIDLSKDNMALQRLKDAAEKAKIELSGMSSTEINQPFITMDANGPKHLTLTLTRAHFEKLASNLIERTKAPCQKALADAKLAASDIDDVLLVGGMSRMPAVQEVVKSIFGKEPNKGVNPDEVVAIGAAIQGGVLGGEVKDVLLLDVIPLSLGIETLGGVMTPLVERNTTIPTQKKQIFSTAADNQPAVTIVVLQGERPMAKDNKEIGRFDLTDIPPAPRGHPQIEVTFDIDANGILHVSAKDAASGREQKIRIEASSGLKEDEIQRMINDAEKNKEEDKKRREASDVRNEADSMIFRAEKAISDYKENIPESLTKEIEERIEKVRSALKEDAPTEKIKEASDELSRHMQKIGEAMQSQSASAAANAQDGPNINTEDLKKHSFSTKPPTGNSSSSANNENIEEADVEIVDKPND

SEQ ID NO: 13346 - protein, 187 aa, Sciadopitys verticillata; identical to SEQ ID NO: 10014

SEQ ID NO: 13347 - protein, 636 aa, Myxococcus xanthus DK 1622
MGKIIGIDLGTTNSVVAIMEGREPKVIVNEEGSRITPSVVAFTKDGERLVGQVAKRQSITNPERTIYSSKRFMGRRHDEVSEEATLVPYKVARGPNGDARVDIDGKQYSAPEISAQVLLKLKRAAENYLGEKVTEAVITVPAYFNDAQRQATKDAGEIAGLTVRRIVNEPTAAALAYGLDKKKDEKIAVYDFGGGTFDVSILEVGENVVDVLATNGDTHLGGDNIDLRIMDWLITEFKKDTGLDVSKDKMVLQRLKEAAEKAKIELSAAMETDINLPFLTADATGPKHLNVKLTRAKFEAMIDDLIERSLEPCRKCLKDAGVEPKDLNEIVLVGGTTRIPKVQEAVKRLFGKEPNRSVNPDEVVAVGAAVQAGVLSGEVKDILLLDVTPLSLGVETLGGVMTKLIERNTTIPTRKSETFSTAADGQTQVEIHVLQGEREMAGDNRSLGRFHLTGMPPAPRGVPQIEVTFDIDANGILNVSAKDKATGKEQKVTITHSSGLAKDEVEKMVADARSNEAADKGRRELVEMKNQAESQSYAAEKLLKENKDKLSADTAKALEDAVAELNKVRDGQDKDAIKTALDALQAASYKAAEEMYRATGGAPGAEGAPGAGPSAAPGSQASAKKDDVVDAEFRQS

SEQ ID NO: 13348 - protein, 403 aa, Halobacillus aidingensis
MHGFHDVFIQILLLLAISVTVIAIAKLLKEPDSVALVLVGLVLGLTQLPFIEEAESYITQSEVFQATVISLFLPILLGDATLKLPFHHLFSQKKTVMGLAFLGTFISSLTIGAASYFLLDLPLAVAFTFAALMSATDPISVLSIFKSLGVKQKMSTIMEGESLFNDGIAVVLFKIASIYLLTYIEMGWAGLGSGVFMFLKFAVGGALVGLILGYVFSQVIRVYDDYPLEVAFSALLFFGSYFIAEHFHTSGVIAVVVGGFVFGDYGAKIGMSEETKTNLNTFWDSVTLLANALIFLMVGLEIRNIDLAGNWGYIVGAIAIVLVGRTIAVYIGTGWIKELSSKERILINWGGLRGSLSIALALSLPMDFDGREQVLLLTFSVVLFSLIVQGLTLKPVIKKLGLA

SEQ ID NO: 13349 - protein, 205 aa, Zea mays
LDSKGLGVCRIDGSVNLEERRRQIAEFNDLNSSLNVFILSTRAGGLGINLTSADTCILYDSDWNPQMDQQAMDRCHRIGQTRPVHVYRLATSYSVEERIIKKAFGKLKLEHVVIGKGQFEQERAKPNVLEEGELLALLRDEQDEEDRMIQTDISDEDLLKLMDRSDLSGPPGAADAAPLIPLKGPGWEVVVPTKSGGGMLSSLTS

SEQ ID NO: 13350 - protein, 308 aa, Trichodesmium erythraeum IMS101
MAGTNINTDLYFTEQITPWDIYKHGIDQVLVYQKTKYQEIYIVKGVYGKALILDGKWQSCTADEFLYHEGLVHPAMICHGSPRKVLVFGGAEGATIREVLRWKTVEQVVMVDIDEKVVEACKKYLPEMHQNSFEDPRVELIIDDAQNFLDSSNETWDVIISDLTDPIEHGLSFPLFTQEYFQKISQVLSALGSFIIQGGSISPAEMYLHARVVKTLQSVFNCVYSLIPYSTSYGCPLGFVVCSEQKFSSTPNPEKVDRLLAEKTTGGFKFMDGVSLLGMLQIPLNLRQAIATETQIYTLKTPPKSIQV

SEQ ID NO: 13351 - protein, 1955 aa, Neurospora crassa
MDHFSTVLQRPPHFDEDGTEGRGDRGNGAGPGPAPPPPPPRGGLRDILNPVSSNSAVQSQAAAAAPPPPPAVASSSLHGIAASVPPPSSTNSMRATPHSSSSFNLRSPTREPSEYRHPLSSLATPAPFAASPPTSIANANNTNNNNALGAAGSLSSQPPPPPPTGPRSILNPPTPSQQHQQQHHHPNPFVAASAPSLPPPPSSLQAPPAITPIAGLSAPAPASGSLPLSAGGIGNSITVSSSSQPPARASQLHAPSAYYSPAESFRDRDSSVREKSSTGGSFYDPTAEASNGISGSSPRKDRDRDRDHRGTTRESQRRSVSGHSDTGSSWRNATQTSASNKTRDPYNYSPSSADYYNTRKKENYPVDNTTSSSIAAPSNFTVATRSPVAALSHPASIAAPASVGSLTGSISPRLSLRPPSMASPTIRSAVLANPTNGTTSTALPALGRNDSPPSKMSPGTSTNPSRAAGVMSFSNILSSSEPVPRPRATSPNNPDDDDDVPMKVERADSSEKVVKEKKERKPRQPKQPRISDIRHSESTPKGRRGSTKQESPLPNIRIPAKRMANGAPKQQKTFSAENEEKIRKAMDRIETRELPHEDEFEEELRLWRERREYKRQQMNQRDLRQRRQRRADYTEVEAQKLKLHADFGKRRYDDLNYDDALQEVRERELFAEKERKKDMQRKRRREKSMATTMEAKAAALARASAAQDEAERQKYMREAERANKKVQQTRLILQKGIKGPSRNTGPIEPNLEGGTMATFQAENMEPGKTKGKGRAGARPKKSKEQKQAEKDAAEAAQAALDAGLELPPKEETNKIRIKLTKTKAPKEADVDKDKENKEPQEPKEPKEPKEKVIKEKVVEEPKDPLELKFQSKGFNQIYDQIWRDLARKDVNKVFRLAIDSYSTKSSNLKKTAILASKEAKRWQLRTNKGTKDLQARAKRVMRDMMGFWKRNEREERDLRKAAEKQELENARKEEADREAARQKRKLNFLISQTELYSHFIGKKIKTNEVERSTDHPDEIAAEKDKIPENEMDIEVPTGPIGAKVTNFENLDFDAEDESTLRAAAMANAQNAIAEAQKKAREFNKEESKLDEDGEMNFQNPTMMGDVEIEQPKLLNCQLKEYQLKGLNWLVNLYEQGINGILADEMGLGKTVQSISVMAYLAEKYDIWGPFLVVAPASTLHNWQQEITKFVPQFKVLPYWGTAGDRKVLPQAIKSSQSSRWKCLLGFHCRNRLLLTGTPIQNNMQELWALLHFIMPSLFDSHDEFSEWFSKDIESHAQSNTKLNEDQLKRLHMILKPFMLRRVKKHVQKELGDKIEMDVFCDLTYRQRAMYANLRNQISIMDLIEKATLGDDDSASLMNLVMQFRKVCNHPDLFERADTASPYSFGHFAETASFIREGSQVTVGYSTRSLIQYELPRLLWRDGGRLHKAGEDNQVAGWRNQWLNEKFNIWTPEHIRESLAGTDNFSWLRFADTSYEEAYRASHKDLFARAVEMSTKKNRLAEIKIAYDEPEDLNFTPAHALFHIREREDRRPLAEITEQGILGSLMNVSRSAFSETGLGRLEQAAAPKASAPPIEVVCDSRSAVVERENIMFNAPMRKVLFGPTLAEEKALVVQKVPPSRYPPPALLPAPDKEKQKFTNITVPSMRRFVTDSGKLAKLDELLRELKENGHRVLLYFQMTRMIDLMEEYLTYRNYKYCRLDGSTKLEDRRDTVADFQTRPEIFIFLLSTRAGGLGINLTSADTVIFYDSDWNPTIDSQAMDRAHRLGQTKQVTVYRLITRGTIEERIRKRAMQKEEVQRVVITGGSSAAGGGVDFSGRRAPENRNRDIAMWLADDEQAEMIEKRERELLESGELDKMQKKSRGGNKRKRGGAGGEGKEVSLDEMYHEEMITGEGNFDDGGNNIKGSGTATPNGAAGGEGGDGKGAVGGAAKKRKTGGSKKAKTTKQRLAIADGEIDI

SEQ ID NO: 13352 - protein, 526 aa, Xanthomonas campestris pv. campestris str. ATCC 33913
MTAIQRGFTAASRIIQPAPRCGASSLFSECFMRVAVLSVALSLALFASPGWAQQASPAAAPATADDPEANEAAVSKVPLDEIRRFVAVYNAVKQAYVDPVEDKKLMHAAVRGLLSDLDPHSTYFDKEDAEAFDEQATGAYDGIGVELLQQQDNTLKVIAPIDDTPAARAGVKAGDVIVAIDGKPIDASKAMEPLRGESGSKVTLTIVRDKVAKPFDITLQRETIRVASVRSKLLEPGYGYIRISTFQADTGADFQKNLKQLQAGGKLRGLVLDLRSNPGGLLTSAVQVADDLLDKGNIVSTRGRISISDAKFDATPGDLLGGAPVVVLVDAGSASASEVLAGALRDNQRARIIGSRTFGKGSVQTVLPLDNGDSVKLTTARYYTPSGKSIQASGIVPEVMLTPEPQPGDADVPASLTDFSEATLPGHLRGDAEGEEGYSAGDVLPGDGPINEALAELKQPGSVAKAQAARKAKAQAQKPKAIKPTPEPKPAAPRPPASEQTTPSEPTDKAKPAAPAPAAVPAEPVK

SEQ ID NO: 13353 - protein, 64 aa, Glycine max
  misc_feature (25)..(25): Xaa can be any naturally occurring amino acid
PRVRKWASTSTLRMLLSCIPTRGVXHYWRKFDDSVMRPVFGGRGFVPYVPGSPLEQSVHQWHCT

SEQ ID NO: 13354 - protein, 328 aa, Clostridium acetobutylicum ATCC 824
MNEDYTKLELSTQILINEALDRKIQVDILDMEDNFIRLKKGDKVEYVKQATKTSLDNYIAPLIMENKEVTKIVLKENGINVPEGVTLKEASEAKEKFSLFYGKDTVVKPKSTNFGKGVIILKQLRSIEDFENAVNQAFEYDNSVMVEEFIAGKEYRFLVIGDETIAVLHRVPANVIGDGVHSIKELVDEKNKDPRRGQGYVKPLEKIVLGTIEKEYLSFSNRDFDYVPDKNEIVYLRENSNVSTGGDSIDFTDEILEGYKKIAVRAANAVGAKICGADIIINDINEEPNAKNHSIIELNFNPAIHMHDFPYRGENRHVERKILDLLGY

SEQ ID NO: 13355 - protein, 530 aa, Mycobacterium leprae TN
MTEVVAVPVRLRPSATAGVRLPELVAQVGAVLADGPGQAATVPDIPVTGVTLRAQEVLSGDLFAALAGASTHGARYAGVALERGAVAVLTDVAGVAELTAQASSVPILIHPEPRSVLGGLAAAAYGHPSNRMTVVGITGTSGKTTTTYMVEAGLRAGGRVVGLVGTIGIRIDGADIPSFLTTPEAPALQAMLAAMVERGVETVVMEVSSHALSLGRVEGTQFAVAGFTNLSRDHLDFHPDMEEYFEAKAVLFDPHSLLRARTVVVCIDDDAGRATAARAGDAITVSALGQPASWRATDIRSPGVGAQEFTAVDPAGVQHRVGIRLPGRYNVANCLVALAILDVVGVSPEQASLGFRDIRIPGRLERIDCGQDFLALVDYAHKPGALHSVLTALLQPDHRLAVVFGAGGERDPGKRAPMGEIAAELADLVVVTDDNPRGEDPAAIRRDILTGTVAAGGAAQVVEIGDRRAAIQYAVAWAGPDDVVLVAGKGHETGQRGAAETCPFDDRVELARALQVRDARLLPAPGRACQ

SEQ ID NO: 13356 - protein, 130 aa, Salmonella enterica
ATFMPKPMFGDNGSGMHCHMSLAKNGTNLFSGDKYAGLSEQALYYIGGVIKHAKAINALANPTTNSYKRLVPGYEAPVMLAYSARNRSASIRIPVVASPKARRIEVRFPDPAAPPYLCFAALLMAGLDGI

SEQ ID NO: 13357 - protein, 1698 aa, Ashbya gossypii ATCC 10895
MSMGNLTLDEYYEIQQNELEAMESIYAGDFVDLTQRKASWDKKPQRVFEISLRSIEKEPAESSLTLHFVLVSTYPHAAPQITFKKVQNVLDSQLALLRDDIRRIHKSARGQEILFEITTRVQEVLDESQANANTQSLEAERLQRLEDEKVKLKLAEQENKEKIELERAKEQELIDELVQKELEKRQDDDSLFGMDKAVNLLPPAEWISTGEAYVFPKAIRAKLPNNSYYWFRAVVNKEPVKIGNDVLSFGKQYTVKPFIPSDSPLIGILANADFMDNFHYLLTEIELQNSYFNTSNGKKEIANLERELDTLLKVNHEHVNKLYSYTVERIGLSSTSFVWKIRLLTEYAESTCIGNIIESVGYVNLATSRGWILRLLEALESLHKHGIAHKQIDLHTVHLIKDTDFGNTVPKLMHASYGHTISNMLNRYPNTKSGSKMIVNNCPWIPPEMVKFNNSKPQRKSDIWNLAVLFIQMISGVDTPLHYQTPVDFLESVDMDESVVDFLNKMLAPDPRLRLGPLELLPMKFLRTNIDAAVGKFYLFPDSVGTGTPTIISTGSNQHLRSRGISRTSDGGHRRSFNVGSRFSSVNSTTRSRYATDFEEIAVLGKGAFGQVVKARNSLDSRYYAIKKVRHTEEKLSSILSEVMLLASLNHQYVVRYYAAWLEEDMLVEEMAITSSDESDIESDDNTESSIIDSFSNANVTTTRTVLNSMNNDWDFISHSFNNSSISNIIFANSTDEEDSANDIPSEGSRSEDELTDKHYEDENDTKSIDQGTSPTLTEGRGGKQYKSGINYRRSRRSLRPADLADEKRSLMKSSRAKPKSTLFIQMEYCENRTLYDLIHNENLSQQRDEYWRLFRQILEALSYIHSQGIIHRDLKPMNIFIDESRNIKIGDFGLAKNVHKSADILRIEGAFGSNVSADDLTSAIGTALYVASEVLTGNGNYNEKIDMYSLGIIFFEMVYHFDTLMERATDLRKLRSSAVELPANFDSSKRNEKKIIRLLLDHDPAKRPTAAKLLASGWLPVKHQDEVTKEALKNLADPSSPWQQQVRESLFSQPYSLSNDILFDNSQNTATPFSQLLRAQMKEEVEKVFRRHGGIENNEPPIIFPKAPFYSSQNVYEVLDRGGSVLQLQYDLTYPMARYLSKNPHCISKQYRMQSVYRPAEQQHGSVEPRRFGEIDFDIISGSSADSALYDAESIKIIDELISVFPVFEKTNTLIIVNHSDIMESIFNLCSIDKAQRSLVSQMLSQVGFAKSFKDVKTELKAQLNISSTSLNDLEMFDFKVDFDNAKKRLNKLMIDSPHLTKVEESLSYIFKVLNFLKPLGVTRNVVVSPLSNYNSAFYKGGIMFQAIYDSGRVKSLLAAGGRYDNLISYIARPSGGKIKHIKRAVGFNLAWDTIYLIVQNYFKLASGKQTKNRSRFLRENAIEWKPKRCDILVASFSDAILNSLGVRIVNKLWKLGISVDLVRNCYSVEDVISAAQIDGCDWIILIKQQNFSASSHKRKYKPLRIRKLDSEIDVDMDLDEFIQLYQQETGIRSTAEILPSSENSQIEEGTSKWEEFSSADGSQDGGSGIAPIGQQKVVHIPNNSARAKAKQNKKDKWVFEESARNASKAIVHSLSSAPVFSVDAIRDEVLEIISITSLAQKDEWLRKVFGSGANSAPRSFATSIYNSLSKEAAKGTKWAILHCHKTGSSCVVDLQR

SEQ ID NO: 13358 - protein, 511 aa, Prochlorococcus marinus str. AS9601
MRSIKLHKLLDLVGIIPSSNLIDQEINNISFNSKEVQKGTLFLGMPGLNVDGGKFCIEAIENGAEAAIIGPAAKQKIGSIDRKRILVIEDNLDYIFGQIVAEFWNRPSRKLKLIGVTGTNGKTTITFLLEYLLKKLGKKTALFGTLFNRWPGFSEVASHTTDFADKLQNKLNAALEAESEFAILEVSSHSIAQNRISGCEFEAAIFTNLTQDHLDYHPDMESYFQTKRKLFFPPYLKEKDGICVLNHDDHWISKLSSDLKKRSLLVSTKITESEFENDDFFFVTDKKFTESGSTCIFHTPREKIQLFVPLVGEFNLMNTIQAITILYKLNFSLKDLSKIIQSFPGAPGRMEKIQIDDNDVSRSLPTVIVDYAHTPDGLKKVLQSIKKLCEGKLITVFGCGGDRDRSKRPLMGSIAEELSDQLFITSDNPRTEEPQKIVNDILMGIKKREKIIIEIDRFKAINESIQFANKKDIVLIAGKGHEDYQILNDKVINFDDRKIAYKLLKEKNKSQ

SEQ ID NO: 13359 - protein, 627 aa, Rhodococcus sp. DK17
MATAVGIDLGTTNSVIASWQGGEPVVISNVEGARTTPSVVAFTESGERLVGQLARRQAILNPKGTIYSAKRFIGRHYDEISEEAKAVSFDVVAGDNGEARFDVRGKKYAPEEISALVLRKLVDDASKFLGEKVKEAVITVPAYFNDAQRNATKDAGRIAGLEVLRIINEPTAAALAYGMDKQTHETVLVFDLGGGTFDVSLLDVGEGVVEVRSTAGDSHLGGDDFDRRLVDYLADEFQRAENIDLRKDAQALQRLFEAAEKAKVELSSVTQAQVNLPFVTADANGPKHLTTTIMRSKFEDLTADLVERCLSPVKQAMSDAKVTANDIDEVILVGGSTRIPAVQALVRRLTGGKDPNMSVNPDEVVALGAAVQAGVLKGEVSDVLLLDVTPLSLGVETQGGVMTKIIERNTTIPARRSEVFSTAEDNQSAVDVVVLQGERERAADNRVLGRFRLEDIRPAPRGEAQVEVTFDIDANGILHVTARDKDTGKEQSITISEQGNLDQSEVERMLAEAERNRGEDEALRKAVDARNELDSVAYQVERRLAELGDSAPPHDKARAEMLIADARKAVKDGASPAEVQPLTSELQQLLYGLAPVPAGGGDGHQAGGGDAASSDDDDVIDAEFDRS

SEQ ID NO: 13360 - protein, 1140 aa, Verrucomicrobium spinosum DSM 4136
MEKGRVRLEGHTHQSIEGRVKTEEETVRVQLTRKGLLWESDSDTEDEDLHHLASCAVILESEGQPESDVSATVPEKTLHEIVEDKLSRQLTPSEEQYLAKVEKRFERYRTLGEIHDHDLVRLNSRWPIQSYDPLKLWPEPPQDVLEFWNYLAAALLERKLTYPAFLENVTDLPGTRARLQSWREQEDLPRWAERIREFSQREAPLPVQRELRLLITPSEARFQVRAPEEEDSAWHNLADPELEKLLELERANALRLPVNSSLIFSSATRWLRDQTRPIIRLEELTPAQWLASLLAQPELGTHLVTLDEAPFNRPVEPLRWQAVEKVTAAGRTQSITLRLFDGNGNEPPKPLRYLPAAEPLYLGTDTIFHGPPSFEEGTTAQTSIEIPVEALSTEEGIRFLEKLDVPLPPSLAARVTRETFKVQLSARCLPKVEQGGTEHVAITAQAVSSNGLLTQTLRGRRWEVTEQVRSSNGVIPCYDRTPLDAVLPVLEGVKATYDAELSAFRARITKAFPEQFHDWAKNLPEVMTLDTDDRLHSILADPLKATVRLEINEAGIDWFDLRLVFDIEGVELKPAEIRRLIAARGGYVRLADGTWRSVRLELSEEQQQAIAALGIDINELTDEAHPIHARQLALQERKEFIPPELWERVKNRLSHLDLQTKPDVPAELQITLRPYQVDGFHFLVYLAVNRFGGVLADDMGLGKTVQSIAWVLWLRLEAIKENKPISPVLIVCPKSVLDVWAIEFGKAAPNLRVHVLREKDTLNLADIKDNADVLVLNYAQLRSCIEQLQKVNWLATILDEGQQIKNPDSKVAKAARQLHAQNRLVLTGTPLENRLLDLWSLLTFATPGALGDRAYFQKHFDRRKDDRAAERLSARLRPFILRRTKGQVARELPPRTEENMLCELTGLQEKLYREQLAQAQHMILTSTGAEMLNKRRFAILQAITRLRQICCHPALVQPGADDEESAKLNALMELLDQLHDEGHKVLVFSQFVAMLKIIRDKLTGLNRPFHWLTGASQNRADIVKSFQETPDPSVFLLSLKAGGSGLNLTAASYVILYDPWWNPAVENQAIDRAHRIGQTQPVMAYRLLAKNSIEEKIRHLQQQKSLLSSDVLGEENFARSLDQQDLEYLFDIGERRGDDE

SEQ ID NO: 13361 - protein, 1097 aa, Oryza sativa Indica Group
MDNPEAEPDDAVLFVGVSLVLGIASRHLLRGTRVPYTVALLVLGVALGSLGANINPDLLLAVFLPALLFESSFSMEIHQIKKCMAQMVLLAGPGVLISTFFLGSALKLTFPYNWNWKTSLLLGGLLSATDPVAVVALLKELGASKKLSTIIEGESLMNDGTAIVVYQLFYRMVLGRTFDAGSIIKFLSEVSLGAVALGLAFGIASVLWLGFIFNDTIIEIALTLAVSYIAFFTAQDALEVSGVLTVMTLGMFYAAFAKTAFKGDSQQSLHHFCLFEGSLMWSYLDGQCPEVSHLAGASWGFLLLLYVFVQISRILVVVILYPLLRHFGYGLDLKEATILVWAGLRGAVALSLSLSVKRASDAVQTHLKPVDGTMFVFFTGGIVFLTLIFNGSTTQFLLHLLGMDRLAATKLRILNYTKYEMLNKALEAFGDLRDDEELGPPADWVTVKKYITCLNDLDDEPVHPHAVSDRNDRMHTMNLRDIRVRLLNGVQAAYWGMLEEGRITQATANILMRSVDEAMDLVPTQELCDWKGDSEVARIVIDESNAEGEEARKFLEDVRVTFPQVLRVLKTRQVTYSVLTHLSEYIQNLQKTGLLEEKEMAHLDDALQVAGIFCLSFNYYYADFVVSVTNHNGNTNSSQFTWQTDLKKFKRNPPLVKMPRVSDLLNTHPLVGALPAAMRDPLLNSTKETVKGHGTILYREGSRPTGIWLVSIGVVKWTSQRLSSRHSLDPILSHGSTLGLYEVLIGKPYICDMITDSVVHCFFIEAEKIEQLRQSDPSIEIFLWQESALVVARLLLPMMFEKMATHELRVLITERSTMNIYIKGEEIELEQNFIGILLEGFLKTKNQTLITPPGLLLPPNADLNLFGLESSAINRIDYCYTAPSYQVEARARILFVEIGRPEIEADLQRSASLISQTLELPRTQSKEHSGLLSWPESFRKSRGAQNGASLTEIRDHPASFSARALQLSMYGSMINDMKSGQGQGQRRQRHRHTKASSNKAHSSSYPRVPSRSSNTQRPLLSVQSEGANMTTARQAAAAGASLPPEPEEAGRRRRRQRKAIEEDEDNSSDESAGEEVIVRVDSPSMLTFRQPSSAADR

SEQ ID NO: 13362 - protein, 142 aa, Salmonella enterica
FMPKPMFGDNGSGMHCHMSLAKNGTNLFSGDKYAGLSEQALYYIGGVIKHAKAINALANPTTNSYKRLVPGYEAPVMLAYSARNRSASIRIPVVASPKARRIEVRFPDPAANPYLCFAALLMAGLDGIKNKIHPGEAMDKNL

SEQ ID NO: 13363 - protein, 474 aa, Anabaena variabilis ATCC 29413
MTTSQEVLKRIQDEKIELIDLKFIDTVGTWQHLTLYQNQIDESSFTDGVPFDGSSIRGWKAINESDMTMVLDPNTAWIDPFMEVPTLSIVCSIKEPRTGEWYNRCPRVIAQKAVDYLVATGIGDTAFFGPEAEFFIFDSARFAQTANEGYYFLDSVEGAWNSGKEGTADKPNLAYKPRFKEGYFPVSPTDSFQDIRTEMLLTMAKLGVPIEKHHHEVATGGQCELGFRFGKLIEAADWLMIYKYVIKNVAKKYGKTVTFMPKPIFGDNGSGMHCHQSIWKDGKPLFAGDQYAGLSEMGLYYIGGLLKHAPALLAITNPSTNSYKRLVPGYEAPVNLAYSQGNRSASIRIPLSGTNPKAKRLEFRCPDATSNPYLAFAAMLCAGIDGIKNKIHPGEPLDKNIYELSPEELAKVPSTPGSLELALEALENDHAFLTDTGVFTEDFIQNWIDYKLANEVKQMQLRPHPYEFSIYYDV

SEQ ID NO: 13364 - protein, 147 aa, Salmonella enterica
TFMPKPMFGDNGSGMHCHMSLAKNGTNLFSGDKYAGLSEQALYYIGGVIKHAKAINALANPTTNSYKRLVPGYEAPVMLAYSARNRSASIRIPVVASPKARRIEVRFPDPAANPYLCFAALLMAGLDGIKNKIHPGEAMDKNLYDLP

SEQ ID NO: 13365 - protein, 434 aa, Synechococcus elongatus PCC 7942
MDSLAALARDRGIRYFLIAFTDLFGVQRAKLVPASSIDLMATSGAGFAGFAAWLDLSPADADVLAIPDRDSLFQLPWQPEVAWMPADLYLNDQPLEQAPRWVLKRVLSVAESLGYRPKTGVECEFFLLDETGDAIADPRDRQAKPCYDQQSLMRRYDLITQISEAMEELGWGPYQSDHEDANGQFEMNWTYADALVTADRQAFFKYMVKTLAERQGLRATFMPKPFADLTGNGCHMHLSLWNREGTTNTFVDPVATAPLSTLGYQFIGGLLHSAASLCALTNPTINSYKRINAPATTSGATWSPNGISYSGNNRTHLIRIPDAGRFELRLADGAANPYLLPAAAIAAGLDGIQNKRDPGPRYDNDNYAQPLPPGTVPTLPEHLLDALRSLQESTVLTEGLGAAFTSAYLKLKHQEWRSFCAEITPWERATTLDC

SEQ ID NO: 13366 - protein, 525 aa, Ralstonia solanacearum GMI1000
MPTPPPDALDASPQPVNRGNALLVLAVFVVASCGLAYELIAGALASYLLGDSILQFSSIIGAYLFAMGIGSWVSRYVADDALLARFVDLELLVGLFGGVSAAALFLLFALESAPFRLVLYALVTVIGVLVGMEIPLVMRMLHRRQAKFSDLVSRVLTFDYLGALAVSLLFPLVLAPRLGLVRTGFLFGLCNTAIAVWTLWHFRAELGLSARLRGAMAWRAGMVGAALLAGFAASDRLTHWSERALFGDEIIHAISSPYQRLVVTRWKDDLRLYINGNLQFSSRDEYRYHEALVLPALESVRGARRVLVLGGGDGLALRQILKYPQVEHVTLVDLDPRMTSLFSHAEALVALNQHAFSDPRVTVVNADAGQWLQTAADMFDVAIVDFPDPSNFSIGKLYSVPFYRLLSRHVADTGLVVIQATSPYFAPRSYWCVDATLKEAGYRTWPYHALVPSFGEWGFILAAPGRADFRPPTTYRVPTRFLDADTTHQMFSFAPDMPRPQVEPNRLNNQSLVRYFEEDWHGVLR

SEQ ID NO: 13367 - protein, 413 aa, Physcomitrella patens subsp. patens
MGWSRSEGDADRELRQPLTEETQVKDDYNLAYITFFLLGVGFLLPWNTFISAVDYFEVFYPSSHMDRVFSLVYMIPCFIFLLILTFYCQKFSARLRINLGLITFLFIFVFVPAMDEWWITGNRGTKVTYALTVGAVAVLGLSDALVQGSLIGLAGELPGRYMQAVIAGTAASGVLASILRVITKATLPQTVRGLKLSADLYFIVTALLLLICLLSFNMVNKLPVMLYHYRMKLRALESTLSTKLDKVTKPVSFVHVWSQIKWLATSVAVVYVVTMSIFPGYITEDVHSAFLGDWYPVLLIVAYNISDLAGKTLTSVCMVENQNLMIWGCFGRLVFFPLFYTVLHGPAIFREEAIVFLLTAMLGLSNGYMTSLVMIVAPKNVPVLESETAGIIMTLFLVSGLTIGSLLGWVWII

SEQ ID NO: 13368 - protein, 646 aa, Blastopirellula marina DSM 3645
MAQGETIIGIDLGTTNSVVAIMEGSEVKIIPNAEGNRLTSSVVAFTDKGDVLVGEPARRQAVTNPKKTVYSIKRFMGRRHNEVDSEEKMIPYEVVGGADEYVKVKIGDAEYTPQEISAKVLQKLKAAAESYLGHKVNKAVITVPAYFNDAQRQATKDAGQIAGLEVARIINEPTAAALAYGLGKQKSEKIAVFDLGGGTFDISILEVSPPEGEEEGERTVFEVISTNGDTHLGGDDFDEELIHYVADEFKKEHGVDLRNDTMALQRLQEACEKAKKELSSQAQTDINLPFITADASGPKHLQMSISRSKFEELTDSLIQRCRVPVEKALADANLKPSDIDEVVLVGGSTRIPKVAEMVKKIFGKDPHKGVNPDEVVAAGAAIQGSVLSGDRKDVLLLDVTPLSLGIETLNGVFTKLVERNTTIPTEKKQTFSTAEDSQSAVTIRVFQGERPMAEDNRLLGQFNLDGIPPAPRGMPQIEVKFDLDQNGILNVSAKDVGTGKEQHVKIEQSSGLSEAEIQRMQKDAEEHASEDKRKRELADLRNQAESMCFQLEKLIKENGEKLSDSDKQPLEQSIEKTREAAKGEDVDAIKSAISELEAASHAVSKVLYEGAAAAGGAAGAEAPGAEAAGSSGDDDAIDAEFEVKKD

SEQ ID NO: 13369 - protein, 561 aa, Francisella tularensis subsp. tularensis SCHU S4
MIPEGYSRRLVGPNLFFKETGTVLDVPLVDNRDELTKLFYQEANRILLALDWQDIKITHKFFNNGVRFAMTAPVDITMPACDVIDFIWLSTREGFETGVFKTIEEAKRKLIPLIDEDKNLTYRKLYELAKSKGFNAFRDKNKAFIGSGRGCYEFDLDNDSIDDIPWQDIYDIPAVIVTGTNGKTTTVRLTDYICRVAGKLTGYTSTDWVKVNDQLIDEGDYSGPTGHQFVLTNKKVEVALLESARGGLLKRGLIETYVNAAAVTNVSADHLGEDGIETVAELAEAKSIVFRALGQGSHGIINLDNSYMKERFDKLSCAKIVVTQNPQQHDMKYYLSKADYACIVEDGNFVWVEANSKKVILPVIEAPLTVRGFAKHNIENAMIAIALSFKLGISFDVIEKALRSYSNDPKVNRGRANVFEWDNKVAILDYAHNEAGMEALLNMVKAYDKGGKKYLMIGTTGDRKYLISGINDIVLKHNLDFIVIKETEKYLRGAKPLELPLLIRKDLADKGYDISNTYISHGEIDGVKFLVEKLESNDMAIFCCQAELEEVANYLEECAKK

SEQ ID NO: 13370 - protein, 940 aa, Francisella tularensis subsp. tularensis SCHU S4
MKILSTNVYVGPNIYANFPVIRHEIDLGVLENWPSAKIGNKFIDQLVESLPGLQEHGCSYREKGGFIRRLREDEGTWMGHIWEHVILELQSMAGSDVTFGRTRSTGEVGHYNMVYEYKQKDVGLRAMELARDLLISILPENLKKQVEFANEDFDFEYEKVRFIKFAQSKEFGPSTASLVEAAKKRDIPYIRLNDQSLVQFGYGKYQQRIRATITGKTTSIAVDLSCDKEQTNTILSSLGLPVPKQRMVTTEEGAVRAAKILGFPLVVKPLDGNHGRGISINLKTIEEIKEAFVEANKVSRYVLLEQYVIGFDHRMLVVDGKLIAVAKRVPGHVVGDGKHTIAELVEIVNQDPRRGIGHEKVLTKLELDYQARTLLRAAGYDENTILKDGEVFYLRSTANLSTGGTAIDVTDIVHPDNRDMAERAIKAIGLDVGGVDFLIDDISQSYHDIGGAICECNAAPGFRMHVAPSEGKPRDVAGAVIDMLIPREYGNARIPIAAITGTNGKTTTSRMVAHMWKNAGKVVGLTTTDGVYINGKLTVAGDTTGPASAQMVLKDPSVEMAILETARGGLLRSGLGYDYCNVGACLNISADHLGLKGINTLEDLAKVKSIVVEAAKDVAVLNADDPNVLKMSAKVTAKHIFYVTMNPEHALVKQHIRAGGKACIIEKGVNGDMITIFDNHIHIPVLWTHLIPATMEGKAIHNVQNSMFAIAICYSMGMSLDDMRDGLRTFVTSFYQAPGRMNWFEEHPFKVLMDYGHNPAAIKLVSQMIMNMEFAGKKICVLASPGDRRDEDIAELAKTAAPYYDYFICKRDDDTRGRAPDEVPRILKEALIEAGISADNIEIIESEKEAVDAALNMAEEGDLVVIFADKLKRTWKQIIYFNKDQEFDGKDKKLEKQEMFSASVIAQDPSLSEEISQVIKAGIISDDSGVRVVYHEEDND

SEQ ID NO: 13371 - protein, 204 aa, Hypocrea jecorina; identical to SEQ ID NO: 768

SEQ ID NO: 13372 - protein, 509 aa, Tropheryma whipplei str. Twist
MTLQGKPYRLSDLIKQTGVRLTDCSNQFSDRFVSGITQIAQSVERDDIFVAFQGKTRHGVEFLDQVQSCAAVLTDNKGRHIMQSDCLPTRSTPILVTDSPRSDLIVLAKRVYPIDDIRIFGITGTNGKTSTMHIAAKLLEMMGISCGISTTIGSSASESDSCLTTPELCQLYARIFTAKQARADFFALEASSHAINRGRLGDIVLEVAAFTNLTPEHMEEHKNMEAYYQAKKALFLNKRSNSAVINIDTPYGIRLFKETGCSASVISENTKYGLDHKLFWQASVRRVGLSFGFTLISPSGYRVESSISLLGKAFALNTCMAIVILCNLGIDIERIDSVLRKAGGLKMVLPGRMEVFQTGNSPRVIVDHGHTVDAVETALVAAKSITRGRLITIINADGQRDPSKRKHLGQLCGAYSDKLFITDGHSRFENPAEIRRMILDGVEGPRRQVEQIPSMTQAVLAAIDIARSDDTVLCSGFGDDPYLDVLGKKIPYSLRDEVRRGLERFAQGT

SEQ ID NO: 13373 - protein, 93 aa, Brassica napus
SIVVRLTRSVNFDSLFPPSTKSVSTMTTSKRLADRKIEKFDKNITKRGFVPETTTKKGKDYPVGPILLGFFVFVVIGSSLFQIIRTATSGGMA

SEQ ID NO: 13374 - protein, 538 aa, Hordeum vulgare
MAFEVVAAQLARLSDALATSDHASVVSINLFVALLCACIVLGHLLEENRWLNESITALIIGLCTGVVILMTTKGKSSHVLVFSEDLFFIYLLPPIIFNAGFQVRKKQFFRNFMTITSFGAVGTMISFFTISLAAIAIFSKMNIGTLDVSDFLAIGAIFSATDSVCTLQVLNQDETPFLYSLVFGEGVVNDATSVVLFNALQNFDPNQIDAIVILKFLGNFCYLSVSSTFLGVFSGLLSAYIIKKLYIGRHSTDREVVLMMLMAYLSYMLAELLDLSGILTVFFCGIVMSHYTWHNVTESSRVTTKHAFATLSFIVETFLFLYVGMDALDIEKWKFASDSPGKSIGISSILLGLVLVGRAAFVFPLSFLSNLTKKTELEKISWRQQIVIWWAGLMRGAVSIALAYNKFTRSGHTQLHGNAIMITSTITVVLFSTMLFGILTKPLIRFLLPASSNGDPSEPSSPKSLHSPLLTSMLGSDMEAPLPIVRPSSLRMLITKPTHTIHYYWRKFDDALMRPMFGGRGFVPYSPGSPTDPNVIVA

SEQ ID NO: 13375 - protein, 609 aa, Mycobacterium smegmatis str. MC2 155
MTALEPDAAAPAPAPASTPDPEPPVEDHTEAITMGLHDASPQHLVDAMADDVELELGWGRLIFGQTFADPEKLAEALQQERPGRRDICIYARESHVLVARSPAELFIDPSHTYRKRFTGELPPAEPIGFTVRTLESPEDADSMNRVYVRCGMVPAPVDVIWRNHTENPAVIYLVAVRDDDGSIVGTVTGVDHKQLFDDPEDGSSLWSLAVDPAASLPGVGAALTRTLAGMLHARGRAYLDLSVAHDNAAAIGLYEKLGFQRVPVLAVKRKNAINEPLFTHPPETVDDLNPYARIIADEAIRRGIWVEVLDAGAGEMRLSHGGRTVITRESLSEFTSAVAMSRCDDKRQTRRIVSDAGITVPKGRLATFDEADHKFLAEVGDVVVKPTRGEQGKGITVGVGSPEELDAALHRAREQHPEVLIEQRAKGDDLRLVVIDGKVVAAAIRRPAEIVGTGGHTIRELIETQSRRRAAATGGESRIPMDDVTASTVAEAGWSLDDVLPEGQRLRVRRTANLHQGGTIHDVTAEVNPELCRVGVRAAEAIGIPVTGIDLLVPDVRGTEYVFIEANERPGLANHEPQPTAAAFVDFLFPQQPGLPQAWTPSETPIRPD

SEQ ID NO: 13376 - protein, 136 aa, Helianthus tuberosus
ISHYTWHNVTEKSRVTTKHAFATFSFIAELFISLYVGMDALDIEKWSFVKDSPGTSAEVSAILLGLVLVGRAAFVFPLSFLSNLTKKAQHEKIDFRQQVLIWWAGLMRGAVSMALAYNQFTKEGHTTMPGNAIMIT

SEQ ID NO: 13377 - protein, 541 aa, Triticum aestivum
MMGLGLGDPPADYGSIMAVGLFVALMCICIIVGHLLEENRWMNESTTALLLGLGAGTVILFASSGKNSRLMVFSEDLFFIYLLPPIIFNAGFQVKKKQFFRNFMTITLFAVVGTLISFSIISLGAMGLISRLNIGSLELGDYLALGAIFSATDSVCTLQVLNQDETPFLYSLVFGEGVVNDATSVVLFNAIQNFDLGNFSSLKFLQFIGNFLYLFGASTFLGVASGLLSAYVIKKLYFGRHSTDREVAIMMLMAYLSYMLAELLDLSGILTVFFCGIVMSHYTWHNVTESSRVTTKHAFATLSFISETFLFLYVGMDALDIEKWKIVSETYSPMKSIGLSSIIVALVLVARAAFVFPLSYLSNLTKTTPGEKISIRQQVIIWWAGLMRGAVSIALAYNKFAKSGHTQLPSNAIMITSTIIIVLFSTIVFGLLTKPLIRLLIPARHLTREVSALSEPSSPKSFLEQLPGNGPETDLENAVSIRRPTSLRMLLASPTRSVHHYWRKFDNAFMRPVFGGRGFVPFVPGSPTESSVPLLAHGSEN

SEQ ID NO: 13378 - protein, 138 aa, Helianthus tuberosus
ISHYTWHNVTEKSRVTTKHAFATFSFIAELFIFLYVGMDALDIEKWSFVKDSPGTSAEVSAILLGLVLVGRAAFVFPLSFLSNLTKKAQHEKINFRQQVLIWWAGLMRGAVSMALAYNQFTKEGHTTMPGNAIMITST

SEQ ID NO: 13379 - protein, 161 aa, Schizosaccharomyces pombe
MNDGFADDELSLPKATVQKMVSDILPVDLTFTKEARDLLIECCVEFIHLVSSEANEICEKEAKKTIAAEHIIKALENLEFKEYIAEALEVAAEHKEQQKNREKKSSKFEQSGVSRDELLRQQEELLSRARERFKNQNIAHDNHTTTAIPVPTASETETKEN

SEQ ID NO: 13380 - protein, 225 aa, Triticum aestivum; identical to SEQ ID NO: 772

SEQ ID NO: 13381 - protein, 143 aa, Helianthus tuberosus
ACRSTISHYTWHNVTEKSRVTTKHAFATFSFIAELFIFLYVGMDALDIEKWSFVKDSPGTSAEVSAILLGLVLVGRAAFVFPLSFLSNLTKKAQHEKIDFRQQVLIWWAGLMRGAVSMALAYNQFTKEGHTTMPGNAIMITST

SEQ ID NO: 13382 - protein, 517 aa, Mycobacterium leprae TN
MIDLTVARVTEIVGGALVDISPEEAAERRVTGSVEFDSRAVGPGGLFLALPGARSDGHDHAASAIAAGAVAVLAARPVGVPAIVVAPDPRTGDGGLTGVLEHDADGSGAAVLAALAKLAKAVAAELVAGGLTIIGITGSSGKTSTKDLVAVVLELLGEVVAPPESFNNELGHPWTVLRATRSTDYLILEMSARRPGNIAALAAIAPPKIGVVLNVGTAHLGEFGSREAIARTKTELPQAIMQSGVVILNVDDPAVAAMADATVARVIRVSRGSYSHPGSPNSPDVWTGPVSLDELARPRFTLHTRDPRAGATEIQLGVYGDHQVANALCAAAVGLECGASVEEVAVALAATGPVSRHRMQVTTRADGVTVIDDTYNANPDSMRAGLQALAWIAHGGTHDKNQPGSCARRSWAVLGEMAELGEDSITEHDRIGRLAVRLDVSRLVVVGGGRSINAMHRGAVMEGSWGLETVNVADPAAALTLLRAEVRPGDVVLIKASHSVGLGALADVLVGDGAIRP

SEQ ID NO: 13383 - protein, 544 aa, Oryza sativa Japonica Group; identical to SEQ ID NO: 13003

SEQ ID NO: 13384 - protein, 313 aa, Synechococcus sp. WH 8103
WNTGRLEEGGNLAYKIQLKEGYFPVAPNDTAQDIRSEMLLLMGQLGIPTEKHHHEVAGAGQHELGMKFAELIQAADNVMTYKYVVRNVAKKYGKTATFMPKPVFNDNGSGMHVHQSLWKGGQPLFFGEGTYANLSQTARWYIGGILKHAPAFLAFTNPTTNSYKRLVPGFEAPVNLVYSEGNRSAAVRIPLTGPSPKAKRLKFRSGDALANPYLAFSAMVMAGLDGIKNQIDPGDGENRDLFELPAEKLAKIATVPPSLNGALEALNADRGFLTAGGVFSDDFIDNWIDFKYEEVQQLRQRPHPHKFAMYYDA

SEQ ID NO: 13385 - protein, 367 aa, Mycoplasma hyopneumoniae 232
MKVVHFGAGNIGRGLIAKLYHQNQFEIIFVDVNQNLVNDLNKNGFYYVINFENGEKYKITNFQAIHLNNKENLLKKLSSADIISTSIGAKNLVFLKSIFAKLAKIEEKHKQIICFENGYRVSSYFKTILEKCQFWNFVDTTIDQIAPSSNDLNVYTETFSEIILEEKQQKIKLKTVEYLENLDFFILRKLFFVNALHSGIAYFAYNLKFNFINEALNSVIIQNYIEKMKEVLQQTVLIINPLIEQKIMNEYFETTIKRFKNPVLQDLVVRVARNPITKISKNERFDLLLKYAKKSKISSEKLSIIYETFAYILNFDWENDNQALEMQKKLAESPEFFLKNQTNLDINEIKLVLNFYKNQKKRLKKWI

SEQ ID NO: 13386 - protein, 457 aa, Oryza sativa Japonica Group
MATRIPGTVAASGVYYNDQYRMPCKLKGIHCMALNCIPQKAKVRKCMNGYQSTFRFCVNEKNGQTTGQSNGSLIQQGQNFRCHSYGSHNSSETKECSLEDGTDSYRDFEEHSRGASQFSDNQVAAKKKSVKSSQGLAEACKFVYNDAKFVNERAQNDILLLSRGITRLNKRACQDVAVLGSGFLKLDARARKDTKKIDHSVKERAARLTHFARILKEQAQSDLKKAADQHWSDGALEADLRRADSVVRRRAMEDAFMALKFVRDIHDMMANRLQEQFAKDGSSSPANSRSFITLEKNGNTFELFPHEVSTDQITAIEQAYWSMASALSEADGIDYTDPEELELLVATLIDLDAMDGKKSVSLLAECSSSPDVNTRKALANALAAAPSMWILGNAGMGALQRLAQDSNYAVARAATRAINELTKQWELEEGDSLRFVLNQNMVSKETADDSAAADDTR

SEQ ID NO: 13387 - protein, 243 aa, Glycine max
MKPKTCELCHQLASLYCPSDSAFLCFHCDAAVHAANFLVARHLRRLLCSKCNRFAAIHISGAISRHLSSTCTSCSLEIPSADSDSLPSSSTCVSSSESCSTNQIKAEKKRRRRRRSFSSSSVTDDASPAAKKRRRNGGSVAEVFEKWSREIGLGLGVNGNRVASNALSVCLGKWRSLPFRVAAATSFWLGLRFCGDRGLATCQNLARLEAISGVPAKLILGAHANLARVFTHRRELQEGWGES

SEQ ID NO: 13388 - protein, 286 aa, Selenomonas ruminantium
MEIWFSQMDTENVKTSVRVDRQLFSRQSEYQRINVFESREFGRMIVLDGEIIFSEADEFIYNEMVVHVPMAVHPCVKNVLIIGGGDGGVAKVLTQYPEIEAIDVVEPDEMFIEVSREFFPETARGFDDDRVKITNMDGLRFLRRCRDKYDLIINDSTDPFGHTEGLFTREFYGNCYRALHDDGIMVYQHGSPFYDEDEAAFRAMHRKAYQSFPVSRVYQASIPTCPAGIWMFGFASKKYHPLKDFDAQRWNERQLETWYYTTHLHKGAFMLPKYVEDILSEEEMKK

SEQ ID NO: 13389 - protein, 822 aa, Roseovarius nubinhibens ISM
MIGAAEPLAARLRLPYSVILAVLGVLIGVGATFFLHTELTDALNPVAEAILDLPIRSNVFLYVFLPTLLFQATLGMNLRRMIDDWVPILMLAVVAVVVATVSVGYALAWVSALPLAACLLIGAIVSTTDPSAVVSIFRSISSPRRLARIIEGESLLNDAAAIALFGLFMGFVMLGTPDPELGDALLRFPLLIAGGAITGWLCARVAVWIMALFGRHELAQISVSVALPYLAYIGAEQIVGASGVIAVVAAGLTLNLVAPGRLPPQSWTNLRELWGVLAHWAGALIFILAALLIPRLLEEVRIGDILLVAVVIVAAVVARMVILFGLLPLLARLRLSPPVDRPYRVAILWGGLRGAVTLALALAVTESFRVPDDIQRVVGILATGFTLFTLIVQGTTLRWVIGRLGLDRLSPIDEALSRQVVAVALQTVREDLASTTENYDLSRDIVRSEAKRFGERLDEAVKTAEDSADILDRDRIALGLIVLAGHERDTIIDRVRERTISARMAEKVMSDAERLIEGARSQGRSGYQRAARRSVAYGKGFRAAVWLNRRLGISAPLAQMTTDRFELMLSQRLILRDLGGFIDGRIRRIHGRRVAELLHELLSRRIEAVETALEGLRLQYPGYAEELERRFIRRTALRLEEREYMMMREDGLIGAEVYMSLMADLGARRAAAETRPKLDIALQRTALVRQFPLFAEFSDRALRQLARGLETRYANVGEAIIRKDSAAKRVFFIASGAVELESAGQTWRLGRGEMFGQMAILMQKSVRAEAKAIAPTTLLVLDEDRFRRLLGRSKALRKAVRESAEKRGIEPSALLPPAKDAS

SEQ ID NO: 13390 - protein, 652 aa, Achlya klebsiana
MSGVQGASVGIDLGTTYSCVGVWQNDRVEIIANDQGNRTTPSYVAFTDSERLIGDAAKNQVAMNPANTVFDAKRLIGRKFNDPATQADIKHWPFKVTPGAGDKPQITVEFKGETKTFQPEEISSMVLIKMKEVAEAFIGTAVNNAVITVPAYFNDSQRQATKDAGAIAGLNVLRIINEPTRAAIAYGLDKKGGERNVLIFDLGGGTFDVSLLTIEEGIFEVKATAGDTHLGGEDFDNRLVDHFTAEFKRKHRKDMTQNQRALRRLRTACERAKRTLSSSAQAYIEIDSLFDGIDFNSTITRARFEDMCGDYFRKTMEPVEKVLRDSKLSKSQVHEVVLVGGSTRIPKVQQLLSDFFNGKEPCKSINPDEAVAFGATVQAAILSGNDSSEKLQDLLLLDVTPLSLGLETAGGVMTTLIQRNTTVPTKKSQTFSTYADNQPGVLIQVFEGERSMTRDNNLLGKFSLDGIPPMPRGVPQIDVTFDIDANGILNVSAVEKSTGKENKITITNDKGRLTKDDIERMVQEAEKYKSEDEANNVRIEAKNGLENYAYNLRNTLNDEKLQGKIDESDKKVIDDKVTDIINWLDHNQSAEKEEFEAKQKELEGIANPIMQKMYAAAGGAPGGMPGGMPDMGGAGAPPPASHAQGPKIEEVD

SEQ ID NO: 13391 - protein, 304 aa, Dictyoglomus thermophilum H-6-12
MDAYWIIEKNHPSEIHWHGVSRFYYTGVSPFQKIEVIESSFYGKCLVLDGRIQSSEKDEFIYHEALVHPALLLNNSNRKKVLIMGGGEGATLREVLRHKDVEEAIMVDIDGEVVEVSKEYLPEWHQGAFEDPRTKLYITDAREFVERAEEKYDVIISDLSEPMEGSPAVKLFTYEFYNIIKEHLKEDGVFVMQAGTTHHLKIFFHAAMSSTLRRVFKIVRSYQAYVPAYDFIWSFIWASDKIDPKNFSEEDINNLIKAKGLENLRFYDGEAHKMMFSLPKHIRELIEREEKVAYDSAPLYAVED

SEQ ID NO: 13392 - protein, 123 aa, Arabidopsis thaliana
SFVTGEASDKCQKEKRKTINGDDLLWAMTTLGFEDYVEPLKVYLQRFREIEGERTGLGRPQTGGEVGEHQRDAVGDGGGFYGGGGGMQYHQHHQFLHQQNHMYGATGGGSDSGGGAASGRTRT

SEQ ID NO: 13393 - protein, 679 aa, Oryza sativa
  misc_feature (650)..(650): Xaa can be any naturally occurring amino acid
MAASSAQLIFLLLLAVLAAASSRNDEEARALMALKESLDPAGRVLGSWARSGEPCGGSFVGVTCDSGGRVTAISLQGRGLSGTLPPAIAGLRRLTGLYLHYNGIKGAIPREIGSLSELTDLYLDVNHLTGPLPVEIAAMENLQVLQLGYNQLTGSIPPQLGKLNKLAVLALQSNQLTGAIPATLGDLTQLARLDLSFNSLFGSIPSKIAEVPLLEVFDVRNNSLSGSVPAGLRRLNGGFQYVNNKGLCGVGFSLLDLCLSSEDGLKPSKPEPFGPDGTVKTRQVPQSANTDNHCEGSGCSKSSNASVGVLVVGVVAVVIGAAFCGIFAFSYYRRQKQKIGSSLEVSDSRLSTDHYQQKEVCRRSASPLISVEYSNGWDPLSGGGVGSSGEVGDSFRFNLEEVECATQYFSEVNLLGKSGFAATYKGILRDGSVVAVKSLNKTSCKQEESDFLRGLKMLTVLRHENLVGLRGFCCSRGRGECFLVYDYMVNGCLSQYLDVKEGSGANILDWPTRVSIIRGIAKGVEYMHCKKTNKPSVVHQNISAEKILLDHHLTPRLSVPGLHKLLADDVVFSTLKASAAMGYLAPEYATTGRFTEKSDVFAFGIVVLQVITGRRAVSQLKVSTVANDLDSLIDENLNGVFSRTEAAKLXAAIAALCTSETASQRPTMEAVVQQLSNCH

SEQ ID NO: 13394 - protein, 560 aa, Clostridium perfringens ATCC 13124
MVGRVSDLKLKDLRVLEGRNIKGEENLIFIDIEESERKRLYWLISDYEFICRKMNIEGTLKEAIYNEFGGCAWLTYSNKELALFIIESLIEGVSADKLLNEAVAKKQRIWEYNLLEECSKKKIDFFKEDDEIIVGYGVNSKRISKEDYENKNYNLDLINNGVIPIVSITGTNGKTSTSRLIYKGFENLGYFSGLAMTGGIIINNEFVKKGDTTGFYSAKKVLTNPQVEVGVLETARGGILRKGLGFKNSKVAIITSLAEDHIGVDGIKDINDLLDIKLITTREVLPEGKVIIKAEPKLYEVLQTKENLVLFNSKKNEYIEKHMKNGKEAWFVEDENVIFFDGKDKNIISNIKDFKFTHNGNSKTNINNILVSIAAIYEVHKNLREVVDSLKNIECDVYNNIGRQNIIELENFKIILDYGHNPEAFEELFYLANNIKRNKIISIVSSPGDRLDEYIKELGKIAGKNSDTIIIKETFDRRGREELEITNLIKSGINEVENKSVEVLSIIDEEEAIKKAISMAKEGDIIVDFTQHLDVVIPVINKYLSHHGKEIIEVDLEDFH

SEQ ID NO: 13395 - protein, 312 aa, Triticum aestivum
MDPMDIVGKSKEDVSLPKSTMTKIIKEMLPPDVRVARDTQDLLVECCVEFINLLSSESNDVCSRDDKKTIAPEHVIRALQDLGFKEYVEEVYAAYEQHKLETLDSPKATKFTGIEMTEEEAVAEQQRMFAEARARMNNGAAKPKEPALEPQNQPQQPPQPHLQLHPQAQQPPQPQPQLHYPQSQQPLQPFTQAPPQQPLHPQLQQYTQAPPQQPLQPPLQLYPQAQPEQPLQPQSSGSTTGTCVISAAAPSATGTLLLQPPPQQSPQSQLQLHQQPQPTLVPPPQPQPQPLELQQPQPLTQLQAEHGLDWDS

SEQ ID NO: 13396 - protein, 1199 aa, Chlamydia trachomatis D/UW-3/CX
MILNSLSMFRHQATRFLQDNRDSIAVSFSKNTYKITIPDEDSPDGEWISTLSFNDEERLSFAACSCPDGDCCEHLLTATLAAYDPTEGALLHVKFKSSFWWGLFYQLFLSKAPLHAPGDKVYTIQSQQLSVSLQCLSAEALTYWLPIVHASPEPQTISKETFSQSALYRIARELFMFSQKGASLVIQENPQGFPSLFSLQWEGIALSIEVLDVDTLKALFPLLEFSQTSLYSGEPYLLHNVHVVPEQARIYFTKEYPPLPKSIKEYQETVLGPIKYFAEAKKCTSIPKTLSLPIHIIPALDRSFREHLLSQLCYETEERPIHYAIHFLRDASLSFSAYLETPGDLSEGHIIYPGFCYIPNKGLLAVSGLLSPESSFTIRSDHIENFLDEYGPFIKEPGFETFSNQSPVGSLSYNVTEQGVLLFHYDTGNAADIELRFGKWTYYSRQGFFLNSRLDLALQDGLTIEAPQVADFILTHEVALKSIPNFFAAQPPLKSIRFEVHKEKKGSGIYLQPIFEGLEHESCRLFGQFLYRENVGFSLLPAALQMLCQIPTEIPADQVAEFLLQFSKDDRMVFSDPQLALPERVELNILAIHRPHPSSPLHLKIEIKTNIGSIPLGTVLQALKGKKDFLFSKAGFLNLDNCLFVFLKQFLSSQRYDIQENTLITMVTDIFKLDALAPMITDPNIQASEEDLAYFSQLKSACLPPIPVNLFSTDHKLRPYQNSGLLWLWFLYNHRLSGLLCDEMGLGKTHQATALLDIVAQTAKNPKFLVVCPTSVLPHWEHVLASHLPQASLFSFHGPHKPKTLPDCDILITSYGTLRQNYALFYKVSFTVAVFDEIHTAKNKSSQIHKILCRLDAQMKLGLTGTPVENNLIEFKGLLDIILPNYLPSDALFKRLFTHKNASETDEDIISSKDLLLKLTRPFILRRTKKLVLPELPEKVESLIPCRLSPEQSQLYSSTLKKEKCQIQQLEKEEDPASVNYLHVFALLNQLKQICDHPAVYFKDPESYKNHSSGKWAAFVKLLNDSLASGYKVVVFSQYIQMIRIIALYLEEHAIEYALVQGKSQNRKEEIDRFSNDPNCRVFIGSLLAAGTGINLTAGNVVIMYDRWWNPAKENQALDRVHRIGQKNTVFIYKLVTEDTLEEHIHYLIEKKMRLLNQVTTTQDSNILHVLNREDLITILSYKDEHMLSEEVQEDSGDS

SEQ ID NO: 13397 - protein, 102 aa, Salmonella enterica
AAATFMPKPMFGDNGSGMHCHMSLAKNGTNLFSGDKYAGLSEQALYYIGGVIKHAKAINALANPTTNSYKRLVPGYEAPVMLAYSARNRSASIRIPVVASPK

SEQ ID NO: 13398 - protein, 141 aa, Glycine max
MMKNFAYYFSQKQQHQRFCRFFPHSLGFLVRFLAFHVHPFFIQLCYFVILSLLGYLGLKASKPRTPLRPNDLDLFYTSVSASTVSSMVAVEMEVVSNSQLILLTLLMFVGGEVFTSMLDLVFARYKFTRSVQNKVTPIILT

SEQ ID NO: 13399 - protein, 631 aa, Mannheimia haemolytica
MGKIIGIDLGTTNSCVAVMDGDKPRVIENAEGARTTPSIIAYTDKETLVGQPAKRQAITNPKNTLFAIKRLIGRRFTDAEVQRDIEIMPFEISKADNGDAWVTVKGDKLAPPQISAEILKKMKKTAEDFLGEPVTEAVITVPAYFNDAQRQATKDAGRIAGLDVKRIINEPTAAALAYGLDSKKENQTIAVYDLGGGTFDISIIEIDNFDGEQTFEVRATNGDTHLGGEDFDNRVINYLVEEFKKQGVDLRNDPMAMQRVKEAAEKAKIELSSAQETEVNLPYITADATGPKHLNIKVTRAKLESLVEDLVNRSLEPLKTALADAGLSVGDINDVILVGGQTRMPLVQKKVADFFGKTRKDVNPDEAVMAIGAAVQGGVLSGSVTDVLLLDVTPLSLGIETMGGVMTTLIEKNTTIPTKKSQVFSTAEDNQSAVTIHVLQGERKRAADNKSLGQFNLEGINPAPRGMPQIEVTFDIDANGIINVSAKDKNTGKEQQIKIQASSGLSDAEVEQMVRDAEANAEADKKFEELVQVCNQADGIAHATRKQITEAGDALNADDKAKIEAAISELETAAKGEDKAEIEAKIEALIKASEPLMLAAQAKAQGGEQPQQSQKDDGVVDAEFEEVKDNK

SEQ ID NO: 13400 - protein, 187 aa, Bacillus sp. SG-1
MSIYNYSATAMNGQEKSLEEYKGKIVLIVNTAGRCGFTYQYEDLQKLYDRYKDKDFVILGFPCNQFDNQEPDTNDQIQNSCLLNYGVNFPLFQKIDVRDKNMHPLFDYLTHQKSFEGFNKFHPVAKILIPLLNTKHPEYLTDDYSIKWNFTKFLIDGNGEVVKRFECTTDPIDMELDIENLLAAAAV

SEQ ID NO: 13401 - protein, 134 aa, Salmonella enterica
GSGMHCHMSLAKNGTNLFSGDKYAGLSEQALYYIGGVIKHAKAINALANPTTNSYKRLVPGYEAPVMLAYSARNRSASIRIPVVASPKARRIEVRFPDPAANPYLCFAALLMAGLDGIKNKIHPGEAMDKNLYD

SEQ ID NO: 13402 - protein, 417 aa, Arabidopsis thaliana
MALNVSKVVPNSPILVKSVNASRSRRVLLAYVHHPLAANKGSSIEELKQGLCCTKTVTFVSSRRCSTLCFVGKSQDTETNSQVVQKEGEKQVMPRRKSSNSSQLLVEYVSNDAKFVNERARNDFVLLSRGIMRLDARARQDVAILGSGFLKLDARAREDTEKIDRDVKRKAERLHHIATIFKNIAESKLKNAADKHWSDGALEADLRRADFRAKQRAMEDALMALEFIKNIHDMMVNKMVDSLVTSETGTTDRISLEKNGIALGFFPGEVSSDRISAIEEAYKSMASALSEADGIDYTDPEELELLVTTLIDLDAMDGKSSASLLAECSSSPDVNTRKALANALAAAPSMWTLGNAGMGALQRLAEDSNPAIAAAASRAINALKKQWEVEEGDSLRFMMNFERPNDDDDVDSDLDEI

SEQ ID NO: 13403 - protein, 1123 aa, Physcomitrella patens subsp. patens; identical to SEQ ID NO: 10058

SEQ ID NO: 13404 - protein, 613 aa, Kluyveromyces marxianus
MAEGVFPGAIGIDLGTTYSCVATYENSVEIIANEQGNRVTPSFVAFTPEERLIGDAAKNQAALNPKNTVFDAKRLIGRRFDEESVQSDMKTWPFKVIDSNGAPLIEVEYLGETKTFSPQEISSMVLTKMKEIAEAKIGKKVEKAVVTVPAYFNDAQRQATKDAGAIAGLNVLRIINEPTAAAIAYGVGAGNSEKERHVLIFDLGGGTFDVSLLHIAGGVYTVKSTSGNTHLGGQDFDTNLLEHFKTEFKKKTGADISGDARALRRLRTAAERAKRTLSSVAQTTVEVDSLFDGEDFEATITRARFEDINAALFKSTLEPVEQVLKDAKISKSQIDEVVLVGGSTRIPKVQKLLSDFFDGKQLEKSINPDEAVAYGAAVQGAILTGQSTSDETKDLLLLDVAPLSLGVGMAGDVFGVVVPRNTTVPTIKRRTFTTVADHQTTVTFPVYQGERVNCKENTLLGEFDLKGVPPMPAGEPVLEAIFEVDANGILKVTAVEKSTGKSANITISNAIGRLSSEEIEQMVNQAEEFKAADEAFAKKHEARQRLESYISSVQQTVTDPVLSAKIKRNAKAKVEAALADAFSTLQIEDASADDLRKAEVGLKRAVTKAMSTR

SEQ ID NO: 13405 - protein, 156 aa, Glycine max
MEPMDIVGKAKEDASLPKATMTKIIKEMLPPDVRVARDAQDLLIECCVEFINLVSSESNEVCNKEERRTIAPEHVLKALGVLGFGEYIEEVYAAYEQHKLETMQDSLKGAKWSNRAEMTEEEALAEQQRMFAEARARMNGGAIQSKEPEADQSLES

SEQ ID NO: 13406 - protein, 636 aa, Neorickettsia sennetsu
MAGEIAIGIDLGTTNSCVAIKDKVIENAEGARTTPSVVAFTSDGQTLVGAPAQRQAVTNAKNTIVASKRLIGRRFKDNVIKGIQKDYPYKIVEAKNGDAWIEAGGKSYSPSQVGANVLIKLKEAAETYTGKKVTKAVITVPAYFDDAQRTATKDAGRIAGLEVLRIINEPTAAALAYGLDKTATTKNIAVFDLGGGTFDVSILELGDGVFEVKATNGDTHLGGEDFDRMILNFLVEEFKKENGMDLKNDPLALQRLKEAAEKAKKELSSTQETDINLPYITADAAGPKHLNVKFTRAKLESLVSDLIDRTIEPCKKALKDSGLKREEINEVVLVGGMTRMPAVVKKVTEFFGKEPHKGVNPDEVVAIGAAIQANILAGGSDAQDIVLLDVTPLSLGIETLGGVFTKLIDRNTTIPTKRSQTFSTAEDNQSAVTIRVFQGERQMASDNKLLGQFSLGGIPPAPRGMPQIEVTFDIDANGIVHVSAKDKGTGKEQTVKIQASGGLTEEEIKKMVDEAASKADEDKKRRELVEAKNSAESLIHSTEKSLSEYGSKISSSDKQSIDDAISDLKSVLAKDDASLIKEKTDALSKVSMKLGEAMYKESQSASNDSSPKNDSTEEGERVVDPEYEEVKDEDSK

SEQ ID NO: 13407 - protein, 148 aa, Salmonella enterica
TFMPKPMFGDNGSGMHCHMSLAKNGTNLFSGDKYAGLSEQALYYIGGVIKHAKAINALANPTTNSYKRLVPGYEAPVMLAYSARNRSASIRIPVVASPKARRIEVRFPDPAANPYLCFAALLMAGLDGIKNKIHPGEAMDKNLYDLPP

SEQ ID NO: 13408 - protein, 640 aa, Vibrio harveyi
MGKIIGIDLGTTNSCVAVLDGDKPRVIENAEGERTTASVIAYTDGETLVGQPGGNVNAVTNPTRYTLFAIKRLIGRRFEDEEVQRDIEIMPYKIVKADNGDAWVEAKGQKMAAPQVSAEVLKKMKKTAEDFLGEEVTGAVITVPAYFNDAQAQATKDAGRIAGLEVKRIINEPTAAALAYGLDKSGGDRTIAVYDLGGGTFDISIIEIDEVEGEKTFEVLATNGDTHLGGEDFDNRLINYLVDEFNKEQGINLKNDPLAMQRVKEAAEKAKIELSSTSQTDVNLPYVTADATGPKHMNIKVTRAKLESLVEDLVQRSLEPLKVALADADLSVNDITDVILVGGQTRMPMVQAKVAEFFGKEARRDVNPDEAVAMGAAVQGGVLAGEVKDVLLLDVTPLSLGIETMGAVMTKLVEKNTTIPTKANQVFSTAEDNQSAVTIHVLQGERKQASFNKSLGQFNLEGIQAAPRGMPQIEVTFDLDADGILHVSAKDKQTGKEQKITIQASGGLSDDDIEKMVQEAEANKEADKKFEELATARNQADQMIHGTRKQVEEAGEALPAEEKEKIEAAISELETARKGDDKEAIDAKVQALMTAAQKLMEIAQQQAQAQQAQGGYAGAQQSQEDDVVDAEFEEVKDDKK

SEQ ID NO: 13409 - protein, 124 aa, Salmonella enterica
LAKNGTNLFSGDKYAGLSEQALYYIGGVIKHAKAINALANPTTNSYKRLVPGYEAPVMLAYSARNRSASIRIPVVASPKARRIEVRFPDPAANPYLCFAALLMAGLDGINNKIHPGEAMDKNLY

SEQ ID NO: 13410 - protein, 613 aa, Lactobacillus sakei
MSKVIGIDLGTTNSAVAVLEGGQPKIITNPEGARTTPSVVSFKNGEIQVGEVAKRQAITNPDTIASIKRHIGEAGYKVTVGDKSYTPQEVSAMILQYIKKFAEDYLGEEVTEAVITVPAYFNDSQRQATKDAGKIAGLDVKRIINEPTASALAYGLDKTETDEKVLVYDLGGGTFDVSVLELGDGVFQVLSTNGDTRLGGDDFDEAIMNWLVENFKSDNGIDLSKDKMAMQRLKDAAEKAKKDLSGVSSTQISLPFISAGENGPLHLEMTLSRTEFDRLTSDLVDRTKAPVMNALKDAGLDANEIDKVILNGGSTRIPAVQEAVKNWTGKEPDHSINPDEAVALGAAVQGGVISGDVKDVVLLDVTPLSLGIETMGGVFTKLIDRNTTIPTSKAQTFSTAADNQPAVDIHVLQGERPMAADNKTLGRFQLTDIPAAPRGVPQIEVKFDIDKNGIVNVSAKDLGTNKEQKITIKSNSGLSDEEIDRMMKEAQENEEADTKRKEEVDLKNDVDQLIFQTDKTLKELEGKVSDEELQKAKDAKEELVKAQQENNLEDMKTKRDALSEIVQELTVKLYQQAQEAQQAAGGAEGNATDAKTDDGTVDGDFEEVKDDKE

SEQ ID NO: 13411 - protein, 129 aa, Salmonella enterica
CHMSLAKNGTNLFSGDKYAGLSEQALYYIGGVIKHAKAINALANPTTNSYKRLVPGYEAPVMLAYSARNRSASIRIPVVASPKARRIEVRFPDPAANPYLCFAALLMAGLDGIKNKIHPGEAMDKNLYD

SEQ ID NO: 13412 - protein, 384 aa, Enterococcus faecalis V583
MNAVHFGAGNIGRGFIGEILAKNGFHITFVDVNETIIQALKERKSYTIELADASHQQINVENVTGLNNMTEPEKVVEAIAEADLVTTAIGPNILPRIAELIAQGIDARAEANCQKPLDIIACENMIGGSTFLAEEVAKYLKNPAYAEQWIGFPDAAVDRIVPLQKHEDPLFVQVEPFCEWVIDDTNRKAKEIQLEGVHYVADLEPYIERKLFSVNTGHATVAYTGALLGYQTIDEAMQDALVVAQLKSVLQETGKLLVAKWNFDEQEHAAYIEKIIQRFQNKYISDAITRVARTPIRKLGAQERFIRPIRELQERNLVSPHLLAMIGIVFNYHDPEDEQSRQLQEMLDQESVDTVIAEVTGIEDPETVKNIKQNVERYARPQVA

SEQ ID NO: 13413 - protein, 213 aa, Zea mays
ASVQVAFGGAQSRAGDVARGARFPAASRSARRRPPSQRHAPPASVAHYRTSHTPGGGRPSSEPRSGPGKRRGRGPRIPAATLQKQKTALANVDQITGAKIPKSFVFSRGKLPSTLRHLQQDLRKVMLPYTALNLKEKKRNNLKDFVNVAGPMGVTHFLILSNPQSLPHLRFAKSPQGPTFTFQIEEYSLAADIANSQKRPRCPPGIFQNSPLV

SEQ ID NO: 13414 - protein, 481 aa, Helicobacter pylori 26695
MIVRTQNSESKIKEFFEFCKENEVEFVDFRFSDIKGTWNHIAYSFGALTHGMLKEGIPFDASCFKGWQGIEHSDMILTPDLVRYFIDPFSADVSVVVFCDVYDVYKNQPYEKCPRSIAKKALQHLKDSGLGDVAYFGAENEFFIFDSIKIKDASNSQYYEVDSEEGEWNRDRSFENGVNFGHRPGKQGGYMPVPPTDTMMDIRTEIVKVLNQVGLETFVVHHEVAQAQGEVGVKFGDLVEAADNVQKLKYVVKMVAHLNGKTATFMPKPLYGDNGSGMHTHVSVWKNNENLFSGETYKGLSEFALHFLGGVLRHARGLAAFTNASTNSYKRLIPGYEAPSILTYSANNRSASVRIPYGISKNSARFEFRFPDSSSNPYLAFAAILMAGMDGVKNKIDPGEAMDINLFKLTLDEIREKGIKQMPHTLRRSLEEMLADKQYLKESQVFSEEFIQAYQSLKFNAEVFPWESKPHPFEFITTYSC

SEQ ID NO: 13415 - protein, 515 aa, Burkholderia sp. 383
MRMKLKNIGLIAAGLATGVFATLQVSASAEQTATAPLPLDQLRLFAEVFGQIKREYVEPVDDKKLLTAAIKGMVSSLDPHSSFLDKTDYDELQEQTKGRFAGLGIEISQEDGLVKVISPIEDTPAFRAGIRPGDLITRINDKPVRGMTLDKAVKQMRGEPGTKVTLTIFRKSDDRTFPVTVTRAIIKVQSVKMKILDPGYAYVRITSFQERTTPDLAQKLQDIARQQPNLKGLVLDLRNNGGGLLQSAVGVAGAFLPPDSVVVSTNGQIADSKQVYRDTYDNYRLPSFDGDPLKNLPPVFKTVPMIVLTNAYSASASEIVAGALQDSKRAQIMGKTTFGKGSVQTVRPMTADTALRLTTAYYYTPSGRSIQNKGITPDVPVDQYADGDPDDVLVTREVDYSNHLANTQDPNEKKEQEDREQRRMDQLRILEEQNDKKTPEQRQKDRDRKPIEFGSADDFMMQQALNKLEGKPVQESKSLLAESTTKSPAGKATASKASGASAKPAAAPKPASAPQ

SEQ ID NO: 13416 - protein, 286 aa, Prochlorococcus marinus str. MIT 9303
MDSPSTTASGWIDEHHQGVRYGLQGRVLVDEKSPYQRITVIDSSRYGKGLLLDGCWMTAEHQERHYHESLVHPALCSAAQLERVLVIGGGDGGTARECLRYQDVKHLDMVEIDGRVVELSQKHLPSIGGHAWSDARLQLNLEDGIAWTANATDSSYDVILVDGSDPTGPAEGLFNEAFFKQCRRILRPGGVFATQSESPEAFRQIHIDTVRLIRQVFGYADPLYGWVPMYPSGWWSWTFAAVDGPRYRNPLPARAAAISSGCEIWSPRWQQGAFEAIPAFIERELT

SEQ ID NO: 13417 - protein, 682 aa, Salmonella enterica subsp. enterica serovar Paratyphi A str.
MNTFFRLTALAGLLALAGQSFAVEDITRADQIPVLKEETQHATVSERVTSRFTRSHYRQFDLDEAFSAKIFDRYLNLLDYSHNVLLASDVEQFAKKKTVLGDELRTGKLDVFYDLYNLAQKRRFERYQYALKVLERPMDFTGNDTFNLDRSKAPWPKDEAELNALWDGKVKFDELSLKLIGKSDKEIRETLTRRYKFAIRRLAQTNSEDVFSLAMTAFAREIDPHTNYLSPRNTEQFNTEMSLSLEGIGAVLQMDDDYTVINSLVAGGPAAKSKSISVGDRIVGVGQAGKPMVDVIGWRLDDVVALIKGPKGSKVRLEILPAGKGTKTRIITLTRERIRLEDRAVKMSVKTVGKEKVGVLDIPGFYVGLTDDVKVQLQKLEKQNVNSIVIDLRSNGGGALTEAVSLSGLFIPSGPIVQVRDNNGKVREDSDTDGVVYYKGPLVVLVDRFSASASEIFAAAMQDYGRALIVGEPTFGKGTVQQYRSLNRIYDQMLRPEWPALGSVQYTIQKFYRVNGGSTQRKGVTPDIIMPTGNEETETGEKFEDNALPWDSIDAAKYVKSDDLAPFGPELLKEHNARIAKDPEFQYIMKDIARFNAMKDKRNIVSLNYAQREKENNEEDALRLARINDRFKREGKPLLKKLDDLPKDYQEPDPYLDETVKIALDLAHLEKEKPAEQAAADK

SEQ ID NO: 13418 - protein, 3574 aa, Arabidopsis thaliana
MTSSSHNIELEAAKFLHKLIQDSKDEPAKLATKLYVILQHMKTSGKENTMPYQVISRAMDTVVNQHGLDIEALKSSCLPHPGGTQTEDSGSAHLAGSSQAVGVSNEGKATLVENEMTKYDAFTSGRQLGGSNSASQTFYQGSGTQSNRSFDRESPSNLDSTSGISQPHNRSETMNQRDVKSSGKRKRGESSLSWDQNMDNSQIFDSHKIDDQTGEVSKIEMPGNSGDIRNLHVGLSSDAFTTPQCGWQSSEATAIRPAIHKEPGNNVAGEGFLPSGSPFREQQLKQLRAQCLVFLALRNGLVPKKLHVEIALRNTFREEDGFRGELFDPKGRTHTSSDLGGIPDVSALLSRTDNPTGRLDEMDFSSKETERSRLGEKSFANTVFSDGQKLLASRIPSSQAQTQVAVSHSQLTFSPGLTKNTPSEMVGWTGVIKTNDLSTSAVQLDEFHSSDEEEGNLQPSPKYTMSQKWIMGRQNKRLLVDRSWSLKQQKADQAIGSRFNELKESVSLSDDISAKTKSVIELKKLQLLNLQRRLRSEFVYNFFKPIATDVEHLKSYKKHKHGRRIKQLEKYEQKMKEERQRRIRERQKEFFGGLEVHKEKLEDLFKVRRERLKGFNRYAKEFHKRKERLHREKIDKIQREKINLLKINDVEGYLRMVQDAKSDRVKQLLKETEKYLQKLGSKLKEAKLLTSRFENEADETRTSNATDDETLIENEDESDQAKHYLESNEKYYLMAHSIKENINEQPSSLVGGKLREYQMNGLRWLVSLYNNHLNGILADEMGLGKTVQVISLICYLMETKNDRGPFLVVVPSSVLPGWQSEINFWAPSIHKIVYCGTPDERRKLFKEQIVHQKFNVLLTTYEYLMNKHDRPKLSKIHWHYIIIDEGHRIKNASCKLNADLKHYVSSHRLLLTGTPLQNNLEELWALLNFLLPNIFNSSEDFSQWFNKPFQSNGESSAEEALLSEEENLLIINRLHQVLRPFVLRRLKHKVENELPEKIERLIRCEASAYQKLLMKRVEDNLGSIGNAKSRAVHNSVMELRNICNHPYLSQLHSEEVNNIIPKHFLPPIVRLCGKLEMLDRMLPKLKATDHRVLFFSTMTRLLDVMEDYLTLKGYKYLRLDGQTSGGDRGALIDGFNKSGSPFFIFLLSIRAGGVGVNLQAADTVILFDTDWNPQVDLQAQARAHRIGQKKDVLVLRFETVNSVEEQVRASAEHKLGVANQSITAGFFDNNTSAEDRKEYLESLLRESKKEEDAPVLDDDALNDLIARRESEIDIFESIDKQRKENEMETWNTLVHGPGSDSFAHIPSIPSRLVTEDDLKLLYETMKLNDVPMVAKESTVGMKRKDGSMGGLDTHQYGRGKRAREVRSYEEKLTEEEFEKLCQTESPDSPQGKGEGSERSLANDTSNIPVENSSDTLLPTSPTQAITVQPMEPVRPQSHTLKEETQPIKRGRGRPKRTDKALTPVSLSAVSRTQATGNAISSAATGLDFVSSDKRLEAASHPTSSLALTSPDLSGPPGFQSLPASPAPTPIRGRGRGRSRGRGAGRGRRVEGVLHGSNSSITQRTETATSLASDAEATKFALPRSASEIVSRVPKANEGSTSNPDQVSPVHSATTALRSDKAADKDLDAPPGFDSGSHVQTLNVLENSSERKAFAVKKRPLIQGVSSQHPGPNKQPLDLPVSTSSTLLGGGPVQNQNAVSSVCDGSKSPSEGRTYTALQGVTTAPSDATLPMSSQPSDATLPMSSQPVGSTVEAQEANVPSLPAALPAKRRVRNLPSRGETPKRQGKRRGQPLPATDASSARSTGLTPQIEVKVGNLSGTKAKFDAVAKEQPHFSQSVAPDIHSSGSLSQEIRRDTSGTGGSARKQTADVTDVARVMKEIFSETSLLKHKVGEPSATTRTNVPDAQSPGEMNLHTVETHKAEDSSGLKNQEALYNLSKADKLVSDIPHPVPGDLTTSGSVANKDVDIGSSKVAAENELVKIPGGDVDSSVIQLSLGNTLTAKSSLEKCTADQLLGEKLSQEGETTPASDGETCHLAEETASSLSYVRSEPTASASTTAEPLPTDKLEKNISFQDEVKTLNGDKREAILLSSEEQTNVNSKIETNSEELQASRTDEVPHVDGKSVDVANQTVKEDEAKHSVEIQSSMLEPDELPNAGQKGHSSIDLQPLVLVTSNENAMSLDDKDYDPISKSADIEQDPEESVFVQGVGRPKVGTADTQMEDTNDAKLLVGCSVESEEKEKTLQSLIPGDDADTEQDPEESVSDQRPKVGSAYTQMEDTDEAKLLMGCSVESEEKEKTLQSHIPGDDADTEKNPEESVSVQGVDRPKVGTTDTQMEDTNDAKLLVGCSVASEEKEKTLQSHIPGDDADTEQNPEESVSVQGVNRPKVGNANTQMEDTDEAKVLVGCSVESEEKEKTLQSHIPGDDADTEQNPEESVSNFDRPKDGTADTHMEDIDDAKLLVGCSVESEEKEKSLQSHMPSDDAVLHAPFENTKDSKGDDLHGESLVSCPTMEVMEQKGFESETHARTDSGGIDRGNEVSENMSDGVKMNISSVQVPDASHDLNVSQDQTDIPLVGGIDPEHVQENVDVPASPHGAAPNIVIFQSEGHLSPSILPDDVAGQLESMSNDEKTNISSEQVPDVSHDLKVSQDQTDIPPVGGIVPENLQEIVDVPASPHGVVPDVVVSQSEEIQSPSILPDDVPGQPDDGNCEKMDTMQNNTSIDIGITSGKTCQPSSSTQPEDENRNSLSHCEPSEVVEQRDSRDQVCIGSVESQVEISSAILENRSADIQPPQSILVDQKDIEESKEPGIESADVSLHQLADIQAEPSNLVDQMDIEESKEPGTESADVSLHQLADIQPGPSILVDQMDTEKSKEPGTESADVSLHQLADIQPGPSILVDQMDTEKSKEPGTESADVSLHQLADIQPGPSILVDQMDTEEFKNPDVSLHQLADIEPSLSISAVQKNIEDKDQSHVETAGSELVDVSAECSTEPQVQLPPSSEPVGDMHVHLGASKSEIVAEGTDFSSSLPKTEEENAKSQLADTEPSSSLTAVQKNIEDQVETAGCEFVVVSTGCSTEPQVQLPPSAEPVVAEGTEFPSSLLMTGVDNSSHLMTGVDNAKTHLADVVPSSSPTTMEKNIEAQDQDQVTTGGCGLVDVLTECSSEPQLQLPPSAEPVISEGTELATLPLTEEENADSQLANIEPSSSPSVVEKNIEAQDQDQVKTAGCELVSTGCSSEPQVHLPPSAEPDGDIHVHLKETEKSESMVVVGEGTAFPSSLPVTEEGNAESQLADTEPFTSPTVVEKNIKDQEQVETTGCGLVDDSTGCSSEPQVQLPPSAEPMEGTHMHLEETKKSETVVTEIQLADIDPSFSLIVVQTNIEDQDQIETGGCDLINVPSGCSTEPQIQLSSSAEPEEGMHIHLEAAMNSETVVTEGSELPSSLPMTEDENADGQLAEVEPSVSLTVEQTNIEEKDHIETAECELVDVSPGCSSQPEVKFPPSPDAVGGMDVHLETVVTEDTDSNSSLPKTEEKDAENPSDRLDGESDGTTVATVEGTCVESNSLVAEESNIEVPKDNEDV

SEQ ID NO: 13419 - protein, 1887 aa, Magnaporthe grisea 70-15
MASRILETGSTRLIRDTAVNQLADWQKQHPDELYNLLSRVVPYLHHKDWETRSTAAKALGKILENAQAYDPNEDEEPLPGKKEDGPNEAHVVKKEEQGDETPKSHSLRLKNLPVDDIIRFGRELLRGGAVDYALAALEPQARLAHQKKTLHGRLGLTGQRVTDEELSVPVDSIVSPMTPMDTPANGCGKPDSNGFTGGGPSAEASGLSSRQLNVLKRKRKREAQKAAQGKGGFGDLSLRRSATGGSEGFANDETPAEDTKKNGKMNDYFSLDRPEDVDEDTKVISEFKGPVIPIKTEIESSETVEGAEWPFERLCDFLKIDLFDPSWETRHGAAMGLREIIRTHGRGAGRMSGKSRQENDELNREWLDDAACRLCCVLMLDRFTDYSSDTSVAPIRETVGQTLGSVLFHFPPESVYDIYKILYRMVMQEDLQLERNVWAICHGGMVGLRYVVAVRKDLLLKDGDMIDGVARAVMKGLGDQDDDVRAVSAATLIPMAKEFVSMRPGSLDRLIYILWESLSSLGDDLSASTGKIMDLLAILCSFPEVLSTMKASALQDEERSFTLLVPRLYPFLRHTITSVRLAVLKALMTFANLGGETSQGWLNGRILRLVFQNILVEKDVDTLNKSIELWEALVRCLAAKDPRTLSMEFAAHLEDLMQLTLHPIGVSRNPIPMNATLFLKPSGGTYTISGMPTPAPRRPSPPESGERSAKRRRKSTKVDEPPVSTNTHDVDGAMMQGDVDLVGVEVLVRSRISAAKAMGLIMALVPQSEVAVFDALLQNGFTSPYSTTQLTTCMVIDEYAKNCENPSQAMRFDPSLTQIILSERPAQYRDLVSYIARVRSQCQQLINLFRDHGKVASNKLPILAVVVQGEAEAGPGAFSISNAEKVVGEDFDKLKKAMGPGQRLIALPQLTEARELALKAIQDVKVAKDLRDIRIKAAAGCALVALRALPKKPSPLIKSIMDSLKTEENQELQSRSSNTIARLIQFFTDSGRRGPADKVVSNLVKFSCVEVAETPEFSNHATKTNVVLSMQKEEDRVDHADAVKFAREAKAARITRRGAKEALEILAKTFGANLLEAVPSLRTFMEDSLVRAFSGELPAEAKDPEQTFGQEIVDAMSVIRTMCPTMDVALRPFVMQTVPLVIKALHSELSVFRYMAAKCMATICSVVTVEGMTALVEKVLPSISNPVDLHFRQGAIEVIYHLIAVMGDAILPYVIFLIVPVLGRMSDSDNDIRLIATTSFATLVKLVPLEAGIPDPPGLSEELLKGRDRERTFIAQLLDPKKVEPFNIPVAIKAELRSYQQEGVNWLHFLNKYHLHGILCDDMGLGKTLQTICIVASDHHQRAEEFAKTGAPDVRKLPSLIVCPPTLSGHWQQEIKTYAPFLSVTAYVGPPTERKVHRDSLDKADIVITSYDVCRNDIDVIDKYNWNYVVLDEGHLIKNPKAKTSIAVKRLMSNHRLILTGTPIQNNVLELWSLFDFLMPGFLGAEKVFLDRFAKPIAASRFSKASSKEQEAGALAIEALHKQVLPFLLRRLKEEVLNDLPPKILQNYYCDLSDLQKKLFEDFTKKESKKITEQAGREDKEAKQHIFQALQYMRKLCNSPALVMKPGHKLYDDTQRILAKQGTSLEDPVHAPKLTALRDLLVDCGIGVEGTDSNDPLYQPIKPHRALIFCQMKEMLDMVQNTVLKKLLPSVSFLRLDGGVEANKRQDIVNKFNSDPSFDVLLLTTSVGGLGLNLTGADTVIFVEHDWNPQRDLQAMDRAHRIGQKKVVNVYRLITRATLEEKILSLQRFKIDVASTVVNQQNAGLATMDTDQILDLFSLGDTGPGMITDKPEGGGLDGREEDMVDVETGDVRQPGKKAPWLEDLGELWDNRQYEESFDLDGFLKTMQ

SEQ ID NO: 13420 - protein, 346 aa, Candidatus Pelagibacter ubique HTCC1002
MTKVGEHITLDIIGTNREYDPSVYENVIRKIAKAAEVTILEISKYKFEPQGFTILALLAESHISFHTFPEKGIISFDFFTCGKVSPSIALDIVKKEFKHKRIVTKAFDRDTKSLYHDIYSSPGLQKSYVVNEVLEDFKSKVGQHIEILDLEQFGKSLFIDNEIQVATNDEVLYSSTFVNAALKLNKDMGTAAIIGGGDGGVARECMSKGFDFIDWYELDPEVVEVCNKHLGSIGNKSTEKNSVKCIWGDAFESIKSVEDDKYDKIFVDLNDDQFCIDLAAKNMDSLIRILKPNGVITAQVGSQDKKPEQVEKWLDVFNKNFGNTTLDRVYIPSFDCSWNFSSSINH

SEQ ID NO: 13421 - protein, 3529 aa, Arabidopsis thaliana
MTSSSHNIELEAAKFLHKLIQDSKDEPAKLATKLYVILQHMKTSGKENTMPYQVISRAMDTVVNQHGLDIEALKSSCLPHPGGTQTEDSGSAHLAGSSQAVGVSNEGKATLVENEMTKYDAFTSGRQLGGSNSASQTFYQGSGTQSNRSFDRESPSNLDSTSGISQPHNRSETMNQRDVKSSGKRKRGESSLSWDQNMDNSQIFDSHKIDDQTGEVSKIEMPGNSGDIRNLHVGLSSDAFTTPQCGWQSSEATAIRPAIHKEPGNNVAGEGFLPSGSPFREQQLKQLRAQCLVFLALRNGLVPKKLHVEIALRNTFREEDGFRGELFDPKGRTHTSSDLGGIPDVSALLSRTDNPTGRLDEMDFSSKETERSRLGEKSFANTVFSDGQKLLASRIPSSQAQTQVAVSHSQLTFSPGLTKNTPSEMVGWTGVIKTNDLSTSAVQLDEFHSSDEEEGNLQPSPKYTMSQKWIMGRQNKRLLVDRSWSLKQQKADQAIGSRFNELKESVSLSDDISAKTKSVIELKKLQLLNLQRRLRSEFVYNFFKPIATDVEHLKSYKKHKHGRRIKQLEKYEQKMKEERQRRIRERQKEFFGGLEVHKEKLEDLFKVRRERLKGFNRYAKEFHKRKERLHREKIDKIQREKINLLKINDVEGYLRMVQDAKSDRVKQLLKETEKYLQKLGSKLKEAKLLTSRFENEADETRTSNATDDETLIENEDESDQAKHYLESNEKYYLMAHSIKENINEQPSSLVGGKLREYQMNGLRWLVSLYNNHLNGILADEMGLGKTVQVISLICYLMETKNDRGPFLVVVPSSVLPGWQSEINFWAPSIHKIVYCGTPDERRKLFKEQIVHQKFNVLLTTYEYLMNKHDRPKLSKIHWHYIIIDEGHRIKNASCKLNADLKHYVSSHRLLLTGTPLQNNLEELWALLNFLLPNIFNSSEDFSQWFNKPFQSNGESSAEEALLSEEENLLIINRLHQVLRPFVLRRLKHKVENELPEKIERLIRCEASAYQKLLMKRVEDNLGSIGNAKSRAVHNSVMELRNICNHPYLSQLHSEEVNNIIPKHFLPPIVRLCGKLEMLDRMLPKLKATDHRVLFFSTMTRLLDVMEDYLTLKGYKYLRLDGQTSGGDRGALIDGFNKSGSPFFIFLLSIRAGGVGVNLQAADTVILFDTDWNPQVDLQAQARAHRIGQKKDVLVLRFETVNSVEEQVRASAEHKLGVANQSITAGFFDNNTSAEDRKEYLESLLRESKKEEDAPVLDDDALNDLIARRESEIDIFESIDKQRKENEMETWNTLVHGPGSDSFAHIPSIPSRLVTEDDLKLLYETMKLNDVPMVAKESTVGMKRKDGSMGGLDTHQYGRGKRAREVRSYEEKLTEEEFEKLCQTESPDSPQGKGEGSERSLANDTSNIPVENSSDTLLPTSPTQAITVQPMEPVRPQSHTLKEETQPIKRGRGRPKRTDKALTPVSLSAVSRTQATGNAISSAATGLDFVSSDKRLEAASHPTSSLALTSPDLSGPPGFQSLPASPAPTPIRGRGRGRSRGRGAGRGRRVEGVLHGSNSSITQRTETATSLASDAEATKFALPRSASEIVSRVPKANEGSTSNPDQVSPVHSATTALRSDKAADKDLDAPPGFDSGSHVQTLNVLENSSERKAFAVKKRPLIQGVSSQHPGPNKQPLDLPVSTSSTLLGGGPVQNQNAVSSVCDGSKSPSEGRTYTALQGVTTAPSDATLPMSSQPSDATLPMSSQPVGSTVEAQEANVPSLPAALPAKRRVRNLPSRGETPKRQGKRRGQPLPATDASSARSTGLTPQIEVKVGNLSGTKAKFDAVAKEQPHFSQSVAPDIHSSGSLSQEIRRDTSGTGGSARKQTADVTDVARVMKEIFSETSLLKHKVGEPSATTRTNVPDAQSPGEMNLHTVETHKAEDSSGLKNQEALYNLSKADKLVSDIPHPVPGDLTTSGSVANKDVDIGSSKVAAENELVKIPGGDVDSSVIQLSLGNTLTAKSSLEKCTADQLLGEKLSQEGETTPASDGETCHLAEETASSLSYVRSEPTASASTTAEPLPTDKLEKNISFQDEVKTLNGDKREAILLSSEEQTNVNSKIETNSEELQASRTDEVPHVDGKSVDVANQTVKEDEAKHSVEIQSSMLEPDELPNAGQKGHSSIDLQPLVLVTSNENAMSLDDKDYDPISKSADIEQDPEESVFVQGVGRPKVGTADTQMEDTNDAKLLVGCSVESEEKEKTLQSLIPGDDADTEQDPEESVSDQRPKVGSAYTQMEDTDEAKLLMGCSVESEEKEKTLQSHIPGDDADTEKNPEESVSVQGVDRPKVGTTDTQMEDTNDAKLLVGCSVASEEKEKTLQSHIPGDDADTEQNPEESVSVQGVNRPKVGNANTQMEDTDEAKVLVGCSVESEEKEKTLQSHIPGDDADTEQNPEESVSNFDRPKDGTADTHMEDIDDAKLLVGCSVESEEKEKSLQSHMPSDDAVLHAPFENTKDSKGDDLHGESLVSCPTMEVMEQKGFESETHARTDSGGIDRGNEVSENMSDGVKMNISSVQVPDASHDLNVSQDQTDIPLVGGIDPEHVQENVDVPASPHGAAPNIVIFQSEGHLSPSILPDDVAGQLESMSNDEKTNISSEQVPDVSHDLKVSQDQTDIPPVGGIVPENLQEIVDVPASPHGVVPDVVVSQSEEIQSPSILPDDVPGQPDDGNCEKMDTMQNNTSIDIGITSGKTCQPSSSTQPEDENRNSLSHCEPSEVVEQRDSRDQVCIGSVESQVEISSAILENRSADIQPPQSILVDQKDIEESKEPGIESADVSLHQLADIQAEPSNLVDQMDIEESKEPGTESADVSLHQLADIQPGPSILVDQMDTEKSKEPGTESADVSLHQLADIQPGPSILVDQMDTEKSKEPGTESADVSLHQLADIQPGPSILVDQMDTEEFKNPDVSLHQLADIEPSLSISAVQKNIEDKDQSHVETAGSELVDVSAECSTEPQVQLPPSSEPVGDMHVHLGASKSEIVAEGTDFSSSLPKTEEENAKSQLADTEPSSSLTAVQKNIEDQVETAGCEFVVVSTGCSTEPQVQLPPSAEPVVAEGTEFPSSLLMTGVDNSSHLMTGVDNAKTHLADVVPSSSPTTMEKNIEAQDQDQVTTGGCGLVDVLTECSSEPQLQLPPSAEPVISEGTELATLPLTEEENADSQLANIEPSSSPSVVEKNIEAQDQDQVKTAGCELVSTGCSSEPQVHLPPSAEPDGDIHVHLKETEKSESMVVVGEGTAFPSSLPVTEEGNAESQLADTEPFTSPTVVEKNIKDQEQVETTGCGLVDDSTGCSSEPQVQLPPSAEPMEGGCDLINVPSGCSTEPQIQLSSSAEPEEGMHIHLEAAMNSETVVTEGSELPSSLPMTEDENADGQLAEVEPSVSLTVEQTNIEEKDHIETAECELVDVSPGCSSQPEVKFPPSPDAVGGMDVHLETVVTEDTDSNSSLPKTEEKDAENPSDRLDGESDGTTVATVEGTCVESNSLVAEESNIEVPKDNEDV

SEQ ID NO: 13422 - protein, 476 aa, Campylobacter coli RM2228
MGKFVNNVNEFFDFCKQNEVLFVDFRFTDMIGTWHHITYNLHAISEETFEAGIPFDGSSIHGWQPIEKSDMILKPDAQSAFLDPFTADPTIIVFCDVYDIYKGQMYEKCPRSIAKKAMEHLKNSGIADTAYFGPENEFFVFDSVKIVDTTHCSKYEVDTEEGEWNDDKDFADSYNTGHRPRNKGGYFPVQPIDSLVDIRSEMVQTLEKVGLKTFVHHHEVAQGQAEIGVNFGTLVEAADNVQIYKYIVKMVAHLNGKTATFMPKPLYGDNGNGMHVHMSLWKDGVNLFYDKEGYGGLSQTAINYIGGVLKNARSVAAFTNPSSNSYKRIVPGFEAPCILTYSCQNRSASCRVPYGIGKNSARVEIRFPDSTANPYLAFVSLLMAGLDGIKNKTIPVGPMDENLFDLTLDEIREKGIEQLPHTLRGSLEALIRYNAFLKPVMSDIFIDDYQHLKFETQVWPVEARPTAYEFKTCYSC

SEQ ID NO: 13423 - protein, 107 aa, Arabidopsis thaliana
  misc_feature (76)..(76): Xaa can be any naturally occurring amino acid
  misc_feature (95)..(95): Xaa can be any naturally occurring amino acid
KSNINMQAGIWGPGLMRGAESKAIANNKLTRAGHTDVGGSAKKSRTTTAARIYSTEGIGKQTKPLISDLLPNQNAXTTSMASDDNTPKPRQNPLXDKDACREPKGNP

SEQ ID NO: 13424 - protein, 493 aa, Lactobacillus plantarum
MQASQLINSLKFKQVQPALTTDFDVTMLTQDTREVQPGAMFIAVVGYHVDGHDLVDQAIEKGAKIIVASKPLDVNVPVIYVENTERAMAILADVFYGAPSQKMRMIGVTGTNGKTTVTHLIEQIYRDQQQATGLIGTMYRKIKDEKLPTANTTPDAITTQRTLAAMRDAGVETVAMEVSSIALVLGRVWGIDYDIAVFTNLTQDHLDFHKTMAKYTEAKAMLFAQLGNKYSADGTNKVAVLNTDDPVGREFEQYTAAHVLTFGLKPDAMINAQNVEIKSHGTEFDLSVFGHVTHVTMQLIGQFNVYNMLAAFAAAYASGIPEDQIIKSLEKVTGVKGRFQSVPSHTGVSVIVDYSHTPDGLLNALETIQDFATKDIYCVVGCGGDRDKTKRPKMAKIAVEHSTKPIFTSDNPRTEDPTMILNDMVAGVPNADVPVYEDRHVAIAKAIEAAQPGDVVLIAGKGHEDYQIIGRTKHHFDDSEEAAKALALKPTID

SEQ ID NO: 13425 - protein, 608 aa, Phelipanche ramosa; identical to SEQ ID NO: 10074

SEQ ID NO: 13426 - protein, 478 aa, Mycobacterium leprae TN
MTEKTSDDVLKLAKDENIEFVDVQFCDLPGIMQHFTIPASAFDKSVFEDGLAFDGSSIRGFQSIHESDMLLFPDPDTARIDPFRAAKTLNVNFFVHDPFTLEPYSRDPRNIARKAENYLISTGIADTVYFGAEAEFYIFDSVSFDSRSNGSFYQVDAISGWWNTGAATESDGSPNRGYKVRHKGGYFPVAPNDQYVDLRDKMLTNLTNAGFVLEKGHHEVGTGGQGEINYQFNTLLHAADDMQLYKYIVKNTAWQNGKTVTFMPKPLFGDNGSGMHTHQSLWKGGTPLMYDEIGYAGLSDTARHYIGGLLHHAPSLLAFTNPTVNSYKRLVPGYEAPIKLVYSQRNRSACVRIPITGKNPKAKRLEFRCPDASGNPYLAFSAMLMAGLDGIKNKIEPQAPVDKDLYELPPEEAADIPQAPTQLAAVIDRLEEDHDYLTEGSVFTPDLIETWINFKRENEIEPVNIRPHPYEFALYYDV

SEQ ID NO: 13427 - protein, 377 aa, Dehalococcoides sp. CBDB1
MTFRIKVLLGTILSMVGLLGSFALGYFSGGVSALNSDENLSSIVTAWQIITTEYVEPDIIDQAALAEAAIKGMMDELNDPHSVYLNAEDYQASLEYDDGQYVGIGATVQIEDGVITLIPYEGSPAALAGIQAGDILLEVDGQSVDGFSLADLSPLVRGEKGTLITLKVERSTSAQPLLFNVTRNEILIPSVSSEMMGDIAYIRLSRFSERTDAELEQVLKNLGDAKGIVLDLRGNPGGLVSSVINVTSRFVSSGVVLTTVDNAGNSEEYKIVPKAVTTSLPMVVLVDQYSASGSEALSGALQDYGRATIVGKTTYGKGSVNRTFDVTGNTGIYLTIGRWYTPNGRMIEGQGITPDIELELAGDEAVNWALNFMHGEA

SEQ ID NO: 13428 - protein, 159 aa, Streptococcus pyogenes MGAS315
MPNLYDFTVKAQDGSDISLVNYKEKVVLVVNTATKCGLTPQYQALQALYDTYHDKGFEVLDFPCNQFLNQTPGEAEEINRFCSLTYHTTFPRFAKIKVNGKDADPLFTWLKEEKSGPLGKRIEWNFTKFLIDQNGQVIKRYSSKTDPKLIEEDLKALLG

SEQ ID NO: 13429 - protein, 128 aa, Salmonella enterica
CHMSLAKNGTNLFSGDKYAGLSEQALYYIGGVIKHAKAINALANPTTNSYKRLVPGYEAPVMLAYSARNRSASIRIPVVASPKARRIEVRFPDPAANPYLCFAALLMAGLDGIKNKIHPGEAMDKNLY

SEQ ID NO: 13430 - protein, 141 aa, Oryza sativa
MAMKKPDQPALDLPSSLSTVSYCCGACGYDLKLSSSARDTAGMVVAGGGGGYRRRRGVVRFGAIDDARFGHVDEFRCVDVRARRLFTRRTRLLCRKCGAHVGFAYDDRAARSPPSSSPPPPRYDIKIRALHPIEAPQPSDL

SEQ ID NO: 13431 - protein, 127 aa, Salmonella enterica
FMPKPMFGDNGSGMHCHMSLAKNGTNLFSGDKYAGLSEQALYYIGGVIKHAKAINALANPTTNSYKRLVPGYEAPVMLAYSARNRSASIRIPVVASPKARRIEVRFPDPAANPYLCFAALLMAGLDG

SEQ ID NO: 13432 - protein, 155 aa, Treponema denticola ATCC 35405
  misc_feature (35)..(35): Xaa can be any naturally occurring amino acid
MGIYNYTVKDSLGNDFSFNDYKDYVILIVNTACEXGLTPHFQGLEALYKEYRDKKFLVAAFPCNQFGGQDPGTNEEIRNFAQSKYGVSFPIMAKIEVNGENTEPIFSFLKKASNGEDIKWNFAKFLVDKTGERVTAYAPTVAPEDLKKDIEKLLN

SEQ ID NO: 13433 - protein, 444 aa, Bradyrhizobium sp. ORS278
MRKNWLFLAGTMTGVCLTLMVSGPEGAHLIARAKAAAGMGDTYSQLNLFGAVFERVRADYVEKPSDPALIEGAINGMVSSLDPHSRYMNDKSWRDMQETTSGEFGGLGIEVTMEDGLVKVVAPIDDTPASKAGILSGDFIAKIDGDSVQGLTLEQAVAKMKGGVNTKTKLTIMRKGKDAPMDITLTREIIRVRPVRYHTEGGDIGYIRITSFNEQTTETLRKAISSISRDIPQEKLAGYVIDLRNNPGGLLDQAVSVSSTFLPRGEVVSTRGRNPEETQRFTARGGDLTKGKPIVVLINGGSASASEIVAGALHDHKRATLVGTRSFGKGSVQTIIPLGAGNGALALTTARYYTPSGRSIQAQGIAPDIEVKQDVPDDLKDRTELKGEAGMRGHLSAADGTEQTGSQSYVPPDEKDDKALHAAFNVLRGVTVNADVRAKAAVPN

SEQ ID NO: 13434 - protein, 147 aa, Salmonella enterica
ATFMPKPMFGDNGSGMHCHMSLAKNGTNLFSGDKYAGLSEQALYYIGGVIKHAKAINALANPTTNSYKRLVPGYEAPVMLAYSARNRSASIRIPVVASPKARRIEVRFPDPAANPYLCFAALLMAGLDGIKNKIHPGEAMDKNLYDL

SEQ ID NO: 13435 - protein, 483 aa, Methylobacillus flagellatus KT
MLSTQAVFTWLVFFAAIFAIAGIAYSRRFRGNLEEYIVARNSQGTLASIMTLLASSLGAWILFSPAQAATWGGLTAVIGYAIGAMSPRLAMIPLGKRMRELMPSGHSLTEFLIARYGKPMYLLALTIMLFYLFIAMSAEITAIAKMVTLLAPVPLWATAAIVLGFTLLYTTYGGLRASIFTDKVQIVIIIPLLAALVFIGWQATGGIAPIAEKLQHTAPQLIDLEDIGGIKAGLTFFVAILLTGIFHQGNWQRIYSAKDIPTMRNGFLLGGILVVPFIFIMGLFGLAFMAMTPDGDSSVALFSVIMPNIPLWLAVALIPLGISLVMCSVDTAISAISSIVAVDIGRVMPRSSAASLMRLSRWLVLLVAIPVLVVAAQGYSVLYLFLLADLLCAAAAFPVFFGLFSRSHTGREAVTGTVAGLAAGLFMFPMPYQPVTHLLESFLLAALAPVVVITLMRLLKRRKQHFDLTTLNGSVRKLDGGQL

SEQ ID NO: 13436 - protein, 125 aa, Salmonella enterica
LAKNGTNLFSGDKYAGLSEQALYYIGGVIKHAKAINALANPTTNSYKRLVPGYEAPVMLAYSARNRSASIRIPVVASPKARRIEVRFPDPAANPYLCFAALLMAGLDGIKNKIHPGEAMDKNLYD

SEQ ID NO: 13437 - protein, 123 aa, Salmonella enterica
LAKNGTNLFSGDKYAGLSEQALYYIGGVIKHAKAINALANPTTNSYKRLVPGYEAPVMLAYSARNRSASIRIPVVASPKARRIEVRFPDPAANPYLCFAALLMAGLDGIKNKIHPGEAMDKNL

SEQ ID NO: 13438 - protein, 1776 aa, Aspergillus nidulans FGSC A4
MTNSSGQPRRSSHTSHKRTSALKSSQLSRSRSRKSCLSYKCLIVEASRVSASSNSIDRLSKPFKCPGSATPTRASDKPARKRRKVNYAGADGSIDDNSVKPYTNEERLALATRDVNRFPVFKAKDKDVAFKQKFKVPLINKSTGTYDSSRPAPTLGMRQGASFVVKPLHDPSGEFAIVLYDPTVDDIDEVKPEKQDNDASDKIQKLDEPIVHKSLADILGLKKKVENRPKVPVVIDPRLAKVLRPHQVQFLYRCTTGMIDRNAHGCIMADGMGLGKTLQCISLMWTLLKQSPEAGKTTIQKCIIACPSSLVGNWANELGKWLGKDTITPFAVDGKASKTELTSQLKQWAISSGRSIVRPVLIVSYETLRMYVDTLKDSPIGLLLCDEGHRLKNKESLTWTALNSLNVQRRVILSGTPIQNDLSEYFALLNFANPDLLGSQNEFRKRFEIPILKGRDAAGTEEDRKKGDERLAELSSIVNKFIIRRTNDILSKYLPVKYEHVVFCNLSQFQLDLYKHFIDSPEIKSLLRGKGSQPLKAIGILKKLCNHPDLLNLSTDLPGCEHAFPDDYVPVEARGRDRDVRPWYSGKMMVLDRMLARIRQDTNDKIVLISNYTQTLDLFEKLCRSRAYGCLRLDGTMNVKKRQKLVDKFNDPDGEEFVFLLSSKAGGCGLNLIGANRLVLFDPDWNPAADQQALARVWRDGQKKDCFVYRFIATGSIEEKIFQRQSHKQSLSSCVVDSAEDVERHFSLDSLRELFQFKPGTTSDTHDTFKCKRCRADGTQYIKAPAMLYGDTSSWNHFVNTGEKGPLNQIQDLLIRQETQERDVSAVFQYIIGAYLQDSQSSYIVCVLAPTRHVRRVRMVEPPYVTPLLAPCQRIFTDSSPHDFVTTRQLEKVVRDAAFRGDHEVIQKIVDQLCHDYAYAIIDSETGELQEGVAPYLKEIVPPVLACFSDQDARVRYYACESMYNIAKVAKGEILLFFNEIFDALSKLASDSELSVKNGAELLDRLVKDIVSESAAHHVSVLQLSEKQSSDPDDLGDDLPTAFSLPKFIPLLKERIHVLSAFTRTFLVSWLTLLDTIPDLELVSYLPEFLAGLIKFLGDPNRDVNVATQGLLDRFLAEIKRIARLKKGLAESRKGQGSDNRRSMTSDNISLATDPTTALDAESNENAVEDSEADFAVEDEEGLHTDGDWIPGQDVQIDYPKILDILVGFVDTSYGPDEEMQLTALRWIDSFFEISPEDILPFVPRLLDQVLPALSSSSTAVKETAGRVNASLLEYIFSLTLSEDTSDDSRQTSASKLPSAITKELAERRSSTPTSKADISGVESKKASPRNSVSSAVPSPPPELDYGAAVTSLTLQFLSEYETTRIAALSWLIMLHRKAPKKVAAFNDGIFPALLKTLSDPSETVVTKDLQLLSQISRNSEDSYFKLFMVNLLQLFSTDRNLLEIRGNLIIRQLCLNLSPERIYRTLADCLEKEDDIEFASIMVQNLNNNLITAPELSELRKRLRNLDSREGQTFFVALFRSWCHNAVSTFSLCLLAQAYEQAYNLLQVFAELEMTVNMLIQIDKLVQLLESPVFTYLRLQLLEPERYPYLYKCLYGVLMLLPQSSAFAALKNRLNSVSNIGLLHTGPRLSTMASTSTSGASTYDRTSGRLKQRDENSIRWVDLLDKFKSVQEKTRSSQRSQRPFDANDARTHQTTTLSAAISNADQIRRDKTLPDTPRAAFGGAGGRASPADGGNAGSVVAGGAAGKGGILGPQRQKSGLPNLGRLRIGGGKNKR

SEQ ID NO: 13439 - protein, 577 aa, Cryptococcus neoformans var. neoformans JEC21
MTPRPDQIYVSHIPSPQLPRSSVFEFLFPKSKQYNYFPAPAPNPSGAKKAFIDGLTGNTVTREQVEEQALALAGGLKKLGVKTGEVACLFGMNSLEWINALFGCQALGVVTSPANYAYTPLELLHQVKDSTSQTIFVQPNLFPVLKEALKLDPSCNIPESKIFLLCPKDKKPADLKHLKCTEDLWDMGKGIDGRAQWEENVENKTAYLCYSSGTTGKAKGVETSHHNMTSQIQAVRCSFEPMTEKDVVLGILPCSHIYGLTMNLHHALSTNGTVVILPKFEEKTVLEVIQRYKVTFSLIVPPMMIALLHSSLVSSYDISCLRGFQSGAAPLSADLIKAFESRFPHIQVTQGYGLTETTPVSHVMTLDESRHHPGAIGRVIPTYQARLVDAENGKDVEIGERGELWLKGPSVMKGYWRNEEATRNVFEDGWFKTGDIAIVDDRKYFTIVDRVKELIKYKGFQVPPAELEALLLGHPNVADVGVIGIYDKSQATELPRAYIVPKGGLASLSWSDREKLSKEIHDWAAKKVANHKKLRGGVILIEAIPKSPSGKILRKDLRLLAIKEQEEGVKATRGSKL

SEQ ID NO: 13440 - protein, 1199 aa, Schizosaccharomyces pombe
MRAEKQYTRNEVEETIVRWKKLKESGATEHDNTEYAQLCDVLRSAQSEIEARRDLKGHIKRCFSSVDKNTEKLILKQQVLAYKKLSQNLPAPDDCILSVLLRLSKDEQLLQSIVKQPLQNSKVDGKVRRDFGSCQITPSAKQQRKYLQYQISEDDAIKNRMFRRMSDLESYPAVMRDVAELKDDNERLNLDTIKRNALVELKKLRLIKQQESLRHQVMHCQPHLRTIVNAVERMSCRRPKLVPQATRLTEVLERQQRSDRERRLKQKQCDYLQTVCAHGREINVRTKNAQARAQKANRAVLAYHSHIEKEEQRRAERNAKQRLQALKENDEEAYLKLIDQAKDTRITHLLRQTDHYLDSLAAAVKVQQSQFGESAYDEDMDRRMNPEDDRKIDYYNVAHNIREVVTEQPSILVGGKLKEYQLRGLQWMISLYNNHLNGILADEMGLGKTIQTISLITHLIEKKRQNGPFLVIVPLSTLTNWTMEFERWAPSIVKIVYKGPPQVRKALHPQVRHSNFQVLLTTYEYIIKDRPLLSRIKWIYMIIDEGHRMKNTQSKLTNTLTTYYSSRYRLILTGTPLQNNLPELWALLNFVLPRIFNSIKSFDEWFNTPFANTGGQDKMELTEEESLLVIRRLHKVLRPFLLRRLKKDVEAELPDKVEKVIRCQMSGLQQKLYYQMKKHGMLYVEDAKRGKTGIKGLQNTVMQLKKICNHPFVFEDVERSIDPTGFNYDMLWRVSGKFELLDRILPKLFRSGHRILMFFQMTQIMNIMEDYLHYRQWRYLRLDGSTKADDRSKLLGVFNDPTAEVNLFLLSTRAGGLGLNLQTADTVIIFDSDWNPHQDLQAQDRAHRIGQTKEVRIYRLITEKSVEENILARAQYKLDIDGKVIQAGKFDNKSTPEEREAFLRSLLENENGEEENDEKGELDDDELNEILARGDDELRLFKQMTEDLERESPYGKNKEKERLIQVSELPEFYQREEPEKTTDLLQEEPLGRGARRRTPVVYDEAVRDAQWMAEMDMESEARPTRGRPKRNIASVDETPALTLNGKPKKKRGPAPDTLTSEHRSLLRRVCLEIYKAVNELEDDNGRPLNKLFLELPSKKLYPDYYMIIKSPIALDAIRKHINGTFYKTLEAMKSDLMTMFNNARTYNEEGSFVYEDANKMQTAMETKIEELEEDGTLATLRGMEAEATSQLEDRIENEA

SEQ ID NO: 13441 - protein, 642 aa, Xanthomonas campestris pv. campestris
MGKIIGIDLGTTNSCVAIMDGGKARVIENSEGDRTTPSIVAYTKDGEVLVGASAKRQAVTNPKNTFYAVKRLIGRKFTDGEVQKDISHVPYGILAHDNGDAWVQTSDSKRMAPQEISARVLEKMKKTAEDFLGEKVTEAVITVPAYFNDSQRQATKDAGRIAGLDVKRIINEPTAAALAYGLDKNGGDRKIAVYDLGGGTFDVSIIEIAEVDGEKQFEVLATNGDTFLGGEDFDNRVIEYLVDEFNKDQGIDLRKDPLALQRLKDAAERAKIELSTSQQTEVNLPYVTADASGPKHLNIKLTRAKLEALVEDLVKKSIEPCRTALNDAGLRASDINEVILVGGQTRMPKVQQAVADFFGKEPRKDVNPDEAVAVGAAIQGGVLAGDVKDVLLLDVTALSLGIETMGGVFTKIIEKNTTIPTKASQTFSTAEDNQSAVTVHVLQGEREQARFNKSLAKFDLSGIEPAPRGMPQVEVSFDIDANGILHVSAKDKKTNKEQKVEIKAGSGLSDEEIQRMVADAEANREEDKKFQELVQTRNQADGLIHATRTAITEHGSKVGGDVIGKVEAALADLETAMKGDDKAQIEARSKTLEEAGQSLYAAAAAAEQGGNADAASGNAQASKAADDVVDAEFTEVKDDKKA

SEQ ID NO: 13442 - protein, 286 aa, Pseudomonas aeruginosa UCBPP-PA14
MSDYQETLYQGYGQRFSIDNMLHEVRTEHQHLVIFENARMGRVMALDGVIQTTEADEFIYHEMLTHVPILAHGAARRVLIIGGGDGGMLREVAKHKSVERITMVEIDGTVVDMCKEFLPNHSQGAFDDPRLNLVIDDGMRFVATTEERFDVIISDSTDPIGPGEVLFSENFYQACRRCLNEGGILVTQNGTPFMQLEEVRTTAARTDGLFADWHFYQAAVPTYIGGAMTFAWGSTREGLRRLPLETLRQRFRDSGIATRYYNADIHLGAFALPQYVLQAIGKQDND

SEQ ID NO: 13443 - protein, 626 aa, Rhodococcus sp. RHA1
MATAVGIDLGTTNSVIASWQGGEPVVISNVEGARTTPSVVAFTESGERLVGQLARRQAILNPKGTIYSAKRFIGRHYDEISEEAKAVSFDVVPGDNGEARFDVRGKKYAPEEISALVLRKLVDDASKFLGEKVKEAVITVPAYFNDAQRNATKDAGRIAGLEVLRIINEPTAAALAYGMDKQTHETVLVFDLGGGTFDVSLLDVGEGVVEVRSTAGDSHLGGDDFDRRLVDYLADEFQRAENIDLRKDAQALQRLFEAAEKAKVELSSVTQAQVNLPFVTADANGPKHLTTTIMRSKFEDLTADLVERCLDPVKQAMSDAKVTANDIDEVILVGGSTRIPAVQALVRRLTGGKDPHMGVNPDEVVALGAAVQAGVLKGEVSDVLLLDVTPLSLGVETQGGVMTKIIERNTTIPARRSEVFSTAEDNQSAVDVVVLQGERERAADNRVLGRFRLEDIRPAPRGEAQVEVTFDIDANGILNVTARDKDTGKEQSITISEQGNLDTSEVERMLAEAERNRGEDEELRKAVDARNALDSVAYQVERRLAELGDSAPPHDKARAEMLIADARKAVKDGASPAEVEPLTSELQQLLYGLTPVQDGGDGHQAGGAEAASSDDDDVIDAEFDRS

SEQ ID NO: 13444 - protein, 523 aa, Mycobacterium avium 104
MSTVEVSAPEAAPPSPGRWRALLLAAVAACAACGIIYELALLTLSASLDGGGIVATSLIVAGYIAALGVGALLAKPLLAHAALGFIAVEALLGVVGGLSAAALYVVFAFLDGSVGSTWVLAVSTALIGGLVGAEVPLLMTLLQRGRTAGPADAGRTLANLNAADYLGALLGGLVWPFLLLPQLGMIRGAAATGMINLAAAAVVAIFLLRQVVSARQLALALCALAAALALLATLLLRSADVETTSRQRLYADPIIAYRHTPYQEIVVTRRGDDTRLYLDGGLQFSTRDEYRYTESLVYPALGNGARSVLVLGGGDGLAARELLRQPGISRIVQVELDPAVIEIARTTLRAANGGSLDNPRVRVLTGDAMAWLRGPNPDRFDAVIVDLPDPDTPVLGRLYSTEFYTLAARALAPGGLLVVQAGSPFSTPTAYWRTVSTIRAAGYAVTPYHVHVPTFGDWGFVLAQRGDTPPAPKVPPDAPPLRFLDQRVLQAAVVFSGDVGPRPLEPSTLDNPRIVGDMRHGYD

SEQ ID NO: 13445 - protein, 158 aa, Synechococcus sp. PCC 7002
MTQTATDVLRLIQEENIQIIDLKFVDLPGIWQHCSFYQDQLDEASFVDGVPFDGSSIRGWKAINESDMAMVPDPTTAWIDPFCKEKTLSLICSIKEPRTGEWYSRDPRSIAQKAVDYLAASGIGDTAYFGPEAEFFVFDDVRFDQTENKGFYYVDSVE

SEQ ID NO: 13446 - protein, 346 aa, Triticum aestivum
MLGVGEMNHRLEANGHGKPVAMAKQEQLQQRGDHEETLWYEEEIHDDLKICYALNSVLHRGKSKYQEIALVDTKCFGKALIIDGKMQSADADEFIYHESLIHPPLLFHPNPETVFIMGGGEGSAAREALKQKTVQRVVMCDIDEEVVHFCRTHLSVNWDAFASDKLCLVINDARAELEKMREEKFDVIVGDLADPMEGGPCYQLYTRSFYEQVLKPRLHDGGIFVTQAGPAGVLTHKEVFSSIYNTLRHVFKHVKAYTAHVPSLADTWGWVMASDHPFTLTAQQINERITDRIDGELSYLDGETLISSTTLNKTVFHSLLNERHVYTEDDARFVHGHGTGRAAMLN

SEQ ID NO: 13447 - protein, 541 aa, Vitis vinifera
MGFLDAIPNKHSLQDSSSFLNTTTVIALCLFFALLCACIVIGHLLEEHRWANESITALLLGLCAGVVVLLVSKGRSSKILAFNEDLFFLYLLPPIIFNAGFQVKKKQFFKNFSIILMFGVFGTIISFCLISAGAFLLFKKIGITTLNIEDYLAVGAILSATDSVCTLQVLNQEETPFLYSVVFGEGVVNDATSIVIYNAVQSLDLSNIDALTALKLLGTFLYLFFTSTILGVVAGLLSAYIIKTLYFGRHSTDREVALMMIMAYLSYMLAELLSLSGILTVFFCGIVMSHYTWHNVTESSRITTKHAFATISFIAETFIFLYVGMDALDIDKWRSSKASAGTSVSVSSAFLALVLIGRAAFVFSLSNILNFFKSAESTKVEFRQQFIIWWAGLMRGAVTIALSYSEFSDSETTSTQDSALMITSTIIVVLFSTVVFGSITKPLIGAVLLRHAKPTVSDATDIASLEDLRLLFLENGDPSDGGNNQPSPKASNLRLLMRYPTSTAHYFWRKFDDKYMRPMFGGRGFVPYVPGSPTGAQDETS

SEQ ID NO: 13448 - protein, 284 aa, Azoarcus sp. BH72
MVLRRAVLLDKGRSSHQSYEVWDTPDFGRVYLLDGRLMAAEAVANYGHEALIHPVALAHPEPRTALVLGGGDGGSARELIRHPCIEAITVVELDDAVVALARRYLPAIHDGAFQNGRVRLTIGDAHAHVLANAESVAGVRYDLIVFDLTDPDGTAAALHEASFFAACKACLRPGGAIVVQLGSPHYHRSQVVALVARLAQSFACVRPYLADVPVYGGAWAFASASDALDPSGLDPVEIERRVRARGLAVRHYNGNLHRAQFALPTDLQTALRAALSNPQFDGPT

SEQ ID NO: 13449 - protein, 287 aa, Alteromonadales bacterium TW-7
MANLDQSKWFTEISDRDGSAFSLRINKKLDEKQSPFQKVEMFETTDFGNLMIIDGCTMVSTRENFFYHEMISHPALLAHPNPKNVVIIGGGDCGTLREVLKHPGVESVTQIDIDEVVTQMSLKYFPELCESNNDARATVMFDDGIKYMREAAGESIDVVIVDGTDPVGPGEGLFNHAFYTSCLNALRPGGILVQQSESPLMHMPLLVEMREAMLSVGFNDLQTLPFPQPIYPSGLWSVTLARKSETFNGFREDGAAQIAEQSEYYNSGIHHGALATPNFMKRAFDKK

SEQ ID NO: 13450 - protein, 116 aa, Brassica napus
  misc_feature (21)..(21): Xaa can be any naturally occurring amino acid
  misc_feature (78)..(78): Xaa can be any naturally occurring amino acid
  misc_feature (81)..(81): Xaa can be any naturally occurring amino acid
  misc_feature (108)..(108): Xaa can be any naturally occurring amino acid
  misc_feature (115)..(115): Xaa can be any naturally occurring amino acid
MASSMLSSAAVVTSPAQATMXAPFTGLKSSAAFPVTRKANNDITSIASNGGRVSCMKVWPPVGKKKFETLSYLPDLTXVEXGVKEVDYLLRNKWNFLCVEFELEHGFXVYREHGXH

SEQ ID NO: 13451 - protein, 790 aa, Mycobacterium sp. JLS
MAERTHNRVAATSGADSLGSNGQLRESVSAVTCSPNRASSGGVGVGSCGSGLGRGDIDAGIALGGRYLLAAQRAGGDFLYEVDWVSGAESPDDSAVRQAGATWGMALLYRETGDLAYRAALDRSLARWLAEARVGEGRQWLGQGGARSGRLGSVALVGLALLECLSGPTGSADPTVAREALGALCAFVEDARLPGGGFRGAFDPESGVHSGSADPYSSGEALLLLARTGLELGVPDRVTRVLGWAEEDYDMFVAKPLAAEPDPALTKGYFQWSAMSWFALADAGFAPEVWGRRLVEQALWMVDVHRTLTRTRNTGYAYEGIVPAWEWARRTGDDDTARRLACVIHQGLRKLCSWQLGHPLAPATLRAAPERFHGAVQNHRSEPALRIDVTQHQLHALILARRYGIDTAEHSCTTDETVVARKLDAHDEPNVYSESGVTSSPLVAHLRFGLRLIYGRLADEFTALGFGVEVIGHMLLVTRGSKRCFFYEGDSSFTSLMAMKVLKDKELSRIMFQRAGLSIAEGFAFTRNEKLSALEKVRQLSPVVVKPVAGHKGQGASVNVTPESFEAAWSAASDAVAEAGVSTVSDYEILVEKFFPDGDEARYLVVGGTCVAVLLRLPPKVYGDGRSTVRQLIEHENRTRRLNPSLRAVSGMIRLDEQRHSIIRSQGYSLDSVPALGACVIIDWKGGLSTGANSRDITSDAHRSMKRVAEKVAAAVPGLDIVGVDILARDHTAEATPDNYIIVEANTRPNISGHLYPVFGEPVNVARIIAENCAQNMGFDVDTLRRTRRE

SEQ ID NO: 13452 - protein, 234 aa, Aristolochia arborea; identical to SEQ ID NO: 10104

SEQ ID NO: 13453 - protein, 1521 aa, Arabidopsis thaliana
MLMDSSFFLTIVAAAFAIGFFIFLRKLRIHQENEDVGSSSTSPPSSLASSTSPPSTLSSSTSHPSSSTSPPSSLSCTGTHHVFPSFRGDDVRRNFLSHIQKEFRRKGITPFIDNEIRRGESIGPELIKAIRESKIAIVLLSRNYASSKWCLEELVEIMKCKKEFGLTVFAIFYEVDPSHVKKLTGEFGAVFQKTCKGRTKENIMRWRQAFEEVATIAGYDSRNWENEAAMIEEIAIEISKRLINSSPFSGFEGLIGMKAHIEKMKQLLCLDSTDERRTVGISGPSGIGKSTIARVLHNQISDGFQMSVFMKFKPSYTRPICSDDHDVKLQLEQQFLAQLINQEDIKIHQLGTAQNFVMGKKVLIVLDGVDQLVQLLAMPKAVCLGPGSRIIITTQDQQLLKAFQIKHIYNVDFPPDHEALQIFCIHAFGHDSPDDGFEKLATKVTRLAGNLPLGLRVMGSHFRGMSKEDWKGELPRLRIRLDGEIGSILKFSYDVLDDEDKDLFLHIACFFNDEGIDHTFEDTLRHKFSNVQRGLQVLVQRSLISEDLTQPMHNLLVQLGREIVRNQSVYEPGKRQFLVDGKEICEVLTSHTGSESVIGINFEVYWSMDELNISDRVFEGMSNLQFFRFDENSYGRLHLPQGLNYLPPKLRILHWDYYPMTSLPSKFNLKFLVKIILKHSELEKLWEGIQPLVNLKVMDLRYSSHLKELPNLSTAINLLEMELYLSECSSLVELPSSIGNLINLKKLDLSGCSSLVELPLSIGNLINLKTLNLSECSSLELYLSECSSLVELPSSIGNLINLKKLDLSGCSSLVELPLSIGNLINLKTLNLSGCSSLKLDLNKCTKLVSLPQLPDSLSVLVAESCESLETLACSFPNPQVWLKFIDCWKLNEKGRDIIVQTSTSNYTMLPGREVPAFFTYRATTGGSLAVKLNERHCRTSCRFKACILLVRKGDKIDCEEWGSVYLTVLEKQSGRKYSLESPTLYPLLTEHLYTFEIEAKGVKSVELVIKFQFGRKKWEIGECGIRPLLEEDTHVESLGSRLLWKNKKRKKKKKVLRLDLAEKQSGRKYSLKSPTLYPLLTEPLYTFEVEARGVESIELLFEFEFNLNDDWEIGEYGIRPLLEEDAHVEAQMSGPIKKESGMGRVKLKIKKLQNMNGRQCTYTKRRHGIMKKAKELSILCDIDVVLLMFSPMGKASICIGKHSIGEVIAKFAQLSPQERAKRKLENLEALRKTFMKANHDIDISKFLDRISTPTVEVCTTTMMLINDSEVSSNSFRDTGIFRCLAKKSDSYWTDVDNIDSVDVLQQLEHSLRQSLAQIYGRKASMPQRQQQQLMSSQCKNQLQTEIDIDFGMEMEQQLENFSWVRTDENMNVPIEEEDPNLQLHHMYKDITCSASSALGNYSGLFSKSSDILQKLETGSIPGTSADPNQQFSNLSFLNDQKLKQLAEWNLLGSPADYYVSQILEASYKPQIGGKNNGASSETLPYVAVFDDPLYFWVNNGLFIIHLFSKLCYYWSCFADCF

SEQ ID NO: 13454 - protein, 159 aa, Clostridium acetobutylicum ATCC 824
MSVYDFKAKDISGEEISLSKYEGKVLLIVNTASKCGFTPQYKELEDIYKKLGNEKFEILGFPCNQFANQEPGGSGDIKNFCEINYGVTFPLFEKIDVKGENAHPLFKYLASQAGGILGKEIKWNFTKFLIDKKGDVVDRFAPVTKPSKIKDKIVKLMEE

SEQ ID NO: 13455 - protein, 233 aa, Aristolochia arborea; identical to SEQ ID NO: 10106

SEQ ID NO: 13456 - protein, 128 aa, Salmonella enterica
GSGMHCHMSLAKNGTNLFSGDKYAGLSEQALYYIGGVIKHAKAINALANPTTNSYKRLVPGYEAPVMLAYSARNRSASIRIPVVASPKARRIEVRFPDPAANPYLCFAALLMAGLDGIKNKIHPGEAM

SEQ ID NO: 13457 - protein, 181 aa, Clostridium acetobutylicum ATCC 824
MSIYDFKVKDINGEDISMEEYRGKALLIVNTASKCGFTPQYEDLEALYKKFKGENFEVLGFPCNQFENQEPGTNNDIKKFCQINYGVTFKIFDKVDVNGENEAPLYRYLKEQAPFKELDESTPTAKIIAAFLREKLPETLIGDSIKWNFTKFLIDKNGRVVNRFESGVEPMEIESYIKALI

SEQ ID NO: 13458 - protein, 234 aa, Aristolochia burelae; identical to SEQ ID NO: 10108

SEQ ID NO: 13459 - protein, 1086 aa, Chlamydomonas reinhardtii
MSLLDDPNFVGQDEDDDVANQLAEEDTQDQAEDDDDDESVKTEDVDYEPELGDDAVVSPAKLAVAKAETERLKHQAKQKKEMLERMREQQNQLATMGDAERARHRINFLLKQAEIFQHFASDSAVKEAKKAKTKGRGQRKEEDEDAELLQDEDDGGTHAGHRLQVQPSIITGGTLREYQMQGLNWMIHLYDNGINGILADEMGLGKTLQTISLVAYLYEYRGITGPHIVITPKSTLGNWVNEFKRFAPIIRVTKFHGNADERMIQKETTCAPGRFDVVVTSYEMVIKEKNHFKRFHWRYIIIDEAHRIKNENSRLSLVVRQLKTNYRLLITGTPLQNNLHELWALLNFLLPEIFSSAEKFEEWFSLGDGSKEKEAEVVQQLHKVLRPFLLRRVKSDVERGLPPKKETILKIGMSEMQKKWYAALLQKDVDALNGGADRAKLLNVVMQLRKCCNHPYLFQGAEPGPPFITGEHLVENSGKLVLLDKLLPRLKERESRVLIFSQMTRMIDILEDYCLYRGYGYCRIDGNTDGEARDNMIDEFNRPNSSKFIFLLSTRAGGLGINLATADIVVLYDSDWNPQMDLQAMDRAHRIGQKKEVQVFRFCIENSIEEKVIEKAYKKLRLDALVIQQGRLTENSATKVNKDDLINMVRYGAELVFSSDSSNITDADIDAIIKKGERDTADLNQKMQQFTDNAMKFTMDGGMVYDFKDADDERADIGDLKAIMGSNWIDPPKRERKRHQLNYNDADYYKNALKTGAKDPRAQRLPKMPQLQDFQFFNVPRIQELYEKEHNHEEHKRALTNREAALRNQGASDEAVAEALADKEDDPQPLTEEELEEREKLLEEGFKEWTKRDFNAFVRACEKYGRENIPQIAAEVDGKTEDEVREYAKVFWQRYRELADYEKVIKNIERGEQKIQRQQDIMNAIAAKLERYKNPWQELKIQYGANKGKAYTEEEDRFILCMVHKLGYGNWDDLKAEIRKSWRFRFDWFFKSRTPQELGRRCETLIRLIEKENEDNADAPPRTGGGRGGGRGGRGGGRGGGDGPGRKRKGQVATPAAGTPAVGGTPQPGSEEGSPQPPDRKKGRMA

SEQ ID NO: 13460 - protein, 442 aa, Triticum aestivum
  misc_feature (19)..(19): Xaa can be any naturally occurring amino acid
PDRIPGSTHASGDREHFRXIYDEPLKHGQRLSAPERFVQVADKRKKHLVSVLKKFLLRRTKEETIGHLMLGKEDNIVFCRMSDVQKRVYRRMLQQPDIQILVNKDLPCSCGSPLTQVECCKKIEPRGIIWSYLHRENLDGCPLCPFCLVLPCLVKLQQISNHLELIKPNPRDEIEKQKKDAELAAAVFDTDIELVGGSAKSENFMGLSDSEHCGKMRALERLLSLWTLQGDKILLFSYSVRMLDILEKFLIREGYCFSRLDGSTPMNARQSLVDEFNKSPSKQVFLISTRAGNLGVNLVSANRVVIFDPSWNPAQDLQAQDRSFRFGQKRHVTVFRLLGAGSLEELIYSRQIYKQQLSNIAVSGKIEKRYFDGVQDDKKFQGELFGICNLFRDLSDKLFTSEIIEMHGEDEKAKTSEETGIREIVDTDLFGTQGQMKSSTAA

SEQ ID NO: 13461 - protein, 98 aa, Salmonella enterica
IKHAKAINALANPTTNSYKRLVPGYEAPGMLAYSARNRSASIRIPVVASPKARRIEVRFPDPAANPYLCFAALLMGGLDGIKNKIHPGEAMDKNLYDL

SEQ ID NO: 13462 - protein, 1235 aa, Saccharomyces cerevisiae YJM789
MHFRRTMSRVPTLASLEIRYKKSFGHKFRDFIALCGHYFAPVKKYIFPSFIAVHYFYTISLTLITSILLYPIKNTRYIDTLFLAAGAVTQGGLNTVDINNLSLYQQIVLYIVCCISTPIAVHSCLAFVRLYWFERYFDGIRDSSRRNFKMRRTKTILGRELTARTMTKNRTGTQRTSYPRKQAKTDDFQEKLFSGEMVNRDEQDSVHSDQNSHDVSRDSSNNNTNHNGSSGSLDDFVKEDETDDNGEYQENNSYSTVGSSSNTVADESLNQKPKPSSLRFDEPHSKQRPARVPSEKFAKRRGSRDISPADMYRSIMMLQGKHEATAEDEGPPLVIGSPADGTRYKSNVNKLKKATGINGSKIKIRDKGNESNTDQNSVSSEANSTASVSDESSLHTNFGNKVPSLRTNTHRSNSGPIAITDNAETDKKHGPSIQFDITKPPRKISKRVSTFDDLNPKSSVLYRKKASKKYLMKHFPKARRIRQQIKRRLSTGSIEKNSSNNVSDRKPITDMDDDDDDDDNDGDNNEEYFADNESGDEDERVQQSEPHSDSELKSHQQQQEKHQLQQNLHRMYKTKSFDDNRSRAVPMERSRTIDMAEAKDLNELARTPDFQKMVYQNWKAHHRKKPNFRKRGWNNKIFEHGPYASDSDRNYPDNSNTGNSILHYAESILHHDGSHKNGSEEASSDSNENIYSTNGGSDHNGLNNYPTYNDDEEGYYGLHFDTDYDLDPRHDLSKGSGKTYLSWQPTIGRNSNFLGLTRAQKDELGGVEYRAIKLLCTILVVYYVGWHIVAFVMLVPWIILKKHYSEVVRDDGVSPTWWGFWTAMSAFNDLGLTLTPNSMMSFNKAVYPLIVMIWFIIIGNTGFPILLRCIIWIMFKISPDLSQMRESLGFLLDHPRRCFTLLFPKAATWWLLLTLAGLNITDWILFIILDFGSTVVKSLSKGYRVLVGLFQSVSTRTAGFSVVDLSQLHPSIQVSYMLMMYVSVLPLAISIRRTNVYEEQSLGLYGDMGGEPEDTDTEDDGNDEDDDEENESHEGQSSQRSSSNNNNNNNRKKKKKKKTENPNEISTKSFIGAHLRKQLSFDLWFLFLGLFIICICEGDKIKDVQEPNFNIFAILFEIVSAYGTVGLSLGYPDTNQSFSRQFTTLSKLVIIAMLIRGKNRGLPYSLDRAIILPSDRLEHIDHLEGMKLKRQARTNTEDPMTEHFKRSFTDVKHRWGALKRKTTHSRNPKRSSTTL

SEQ ID NO: 13463 - protein, 228 aa, Synechococcus sp. WH 8008
HEVAGAGQHELGMKFAELIQAADNTMTYKYVVRNVAKKYGKTATFMPKPVFNDNGSGMHVHQSLWKGGQPLFFGEGTEANLSQTARWYIGGILKHAPSFLAFTNPTTNSYKRLVPGFEAPVNLVYSEGNRSAAVRIPLTGPNPKAKRLEFRSGDALANPYLAFAAMMMAGIDGIKNQIDPGAPTNVDLFELSAERLSEIDTVPASLNGALEALNADHHYLMEGGVFTK

SEQ ID NO: 13464 - protein, 125 aa, Salmonella enterica
MPKPMFGDNGSGMHCHMSLSKNGTNLFSGDKYAGLSEQALHYIGGVIKHAKAINALANPTTNSYKRLVPGYEAPVMLAYSARNRSASIRIPVVASPKARRIEVRFPDPAANPYLCFAALLMAGLD

SEQ ID NO: 13465 - protein, 228 aa, Synechococcus sp. WH 8104
HEVAGAGQHELGMKFAELIQAADNVMTYKYVVRNVAKKYGKTATFMPKPVFNDNGSGMHVHQSLWKGGQPLFFGEGTYANLSQTARWYIGGILKHAPAFLAFTNPTTNSYKRLVPGFEAPVNLVYSEGNRSAAVRIPLTGPSPKAKRLEFRSGDALANPYLAFSAMLMAGLDGIKNQIDPGDGEDRDLFELAAEELSKIATVPASLNGALEALNADRGFLTAGGVFSD

SEQ ID NO: 13466 - protein, 286 aa, Buchnera aphidicola str. Sg (Schizaphis graminum)
MINEKIWHEKLHRHVGQYFSIDKILYQKKNKYHDIIIFQNSIMGRIMAIDGVVQTTEKDEFIYHEMLTHVPIFYHGLIKNVLIVGGGDGGILREICRHKSIENITMVEIDLNIIDLCKQFFPKHNNNAYKDPRLKIVIDNGLNFVQKTKEKFDLIISDSTDPIGCGKDLFLSDFYFHCKNCLVKNGIFVGQNGVFFLQKNDINQSYKNLKKNFHDVSFYQATIPSYYGGTMMFSWGTDNIDFRQINIKNLEKRIKDKKLTFNYYNSNIHISSFYLPQYIINTLDKS

SEQ ID NO: 13467 - protein, 227 aa, Symploca atlantica PCC 8002
HEVATGGQNELGFRFGRLIEAADWLMTYKYVIKNVAKKYGKTVTFMPKPVFNDNGSGMHCHQSIWKDGQPLFWGDGYANLSKMALNYIGGILRHAPALLALTNPTTNSYKRLVPGFEAPVNLAYSQGNRSASIRIPLSGTNPKAKRLEFRCPDATCNPYLAFAAMLCAGIDGIKNEIEPGESLDVDIYDLSPAELSKIPSTPGSLEAALESLEKDHSFLTDSGVFTE

SEQ ID NO: 13468 - protein, 510 aa, Ralstonia solanacearum GMI1000
MNRGNALLVLAVFVVASCGLAYELIAGALASYLLGDSILQFSSIIGAYLFAMGIGSWVSRYVADDALLARFVDLELLVGLFGGVSAAALFLLFALESAPFRLVLYALVTVIGVLVGMEIPLVMRMLHRRQAKFSDLVSRVLTFDYLGALAVSLLFPLVLAPRLGLVRTGFLFGLCNTAIAVWTLWHFRAELGLSARLRGAMAWRAGMVGAALLAGFAASDRLTHWSERALFGDEIIHAISSPYQRLVVTRWKDDLRLYINGNLQFSSRDEYRYHEALVLPALESVRGARRVLVLGGGDGLALRQILKYPQVEHVTLVDLDPRMTSLFSHAEALVALNQHAFSDPRVTVVNADAGQWLQTAADMFDVAIVDFPDPSNFSIGKLYSVPFYRLLSRHVADTGLVVIQATSPYFAPRSYWCVDATLKEAGYRTWPYHALVPSFGEWGFILAAPGRADFRPPTTYRVPTRFLDADTTHQMFSFAPDMPRPQVEPNRLNNQSLVRYFEEDWHGVLR

SEQ ID NO: 13469 - protein, 407 aa, Synechococcus elongatus PCC 7942
MIQPFLKRSLLWLTLLFWFATATPALALTEEQKLFNEAWRIVNQSYVDPSFNHSNWFQLREKILKKPLDNRDQTYTAIEGLLAKLDDPFTRLLRPDQYRNLQVSTAGELSGVGLQIGFEAESGDVVVIAPIEGSPAALAGLLSGDRILTVDGVAISGRDLDEAAARMRGPRGTTVALQVLRDQQTLDFELVRDRISLNPVRSQLDRDGDHPPIGYIRLSQFNANASVEVAHAIAQLDQQGAEAFVLDLRNNSGGLLTAGIEIAREWLNEGAIVYTVNRQGVLDSFAANGQALTDKPLALLVNRGTASASEILAGALQDNERAILVGDRTFGKGLIQSLFELSDGAGLAVTVAKYETPNHNDINKQGIQPDLAVEQSEPLFAEAIASAADRQYQAAVTALTEQVRHRA

SEQ ID NO: 13470 - protein, 454 aa, Zea mays
MASNMYGTTVACRMCYRDQYRPPPRDFTCEARKSEARRWGNGYHHIPRLCQWKPRGSKSDGSLLGDGHGGRDARCHSCGSHNSCECETRDCDAMEDAAASSYRDFKQHSRGNPQFSDNQVSLKNKSAYASQGLAEACKFVYNDAKFVNERAQNDILLLSRGITRLNKRACQDAAVLGLGFLKLDARARKDTQKIDHTVKERAALLNHFARAFKERAQSDLKKAADKHWSDGALEADLRRADLVVKRRAMEDAFMALKFVQDIHDMMVNRLYEQLPKDGSSSRTNSTGFITLEKNGKALELFPGEVSADQIYAIEEAYQSMASAFSEADGIDYTDPEELELLVATLIDLDAMDGKRSVSLIAECSSSPDVNTRKALANALATAPSMWTLGNAGMGALQRLAQDPNYAVARAASRAIDELKKQWELEEGDSLRFVMNQNLASRDTEDDNSPADDAA

SEQ ID NO: 13471 - protein, 554 aa, Suaeda japonica
MWSQLSSFFASKMDMVSTSDHASVVSMNLFVALLCGCIVIGHLLEENRWMNESITALLIGLSTGIIILLISGGKSSHLLVFSEDLFFIYLLPPIIFNAGFQVKKKQFFRNFITIILFGAVGTLVSFIIISLGSIAIFQKMDIGSLELGDLLAIGAIFAATDSVCTLQVLNQDETPLLYSLVFGEGVVNDATSVVLFNAIQNFDLTHIDHRIAFQFGGNFLYLFFASTLLGAVTGLLSAYVIKKLYFGRHSTDREVALMMLMAYLSYMLAELFYLSGILTVFFCGIVMSHYTWHNVTESSRVTTKHAFATLSFVAEIFIFLYVGMDALDIEKWRFVSDSPGTSVAVSSILIGLLMVGRAAFVFPLSFLMNLSKKSNSEKVTFNQQIVIWWAGLMRGAVSVALAYNQFSRSGHTQLRGNAIMITSTITVVLFSTMVFGLLTKPLILFMLPQPKHFTSASTVSDLGSPKSFSLPLLEDRQDSEADLGNDDEEAYPRGTIARPTSLRMLLNAPTHTVHHYWRRFDDYFMRPVFGGRGFVPFVPGSPTEQSTTNLSQRT

SEQ ID NO: 13472 - protein, 551 aa, Pinus taeda
MSYVKMLNSRAQPISTGLSIPSLSVGHTDVNGIQISFSQYPMDSEKMPQMQQQTNNVDFMDLDYKPPLCNVSQADGVMALTERGSSNNFQGPTGLMRYHSAPSSFFSSLGEEENNNIISEYFSGNSSNPLQSNTKPLQQNQPSILSFHLRENEPAKHLGERNEISEKEMHASSLPSKEVQGNVSREDLGKHHPLDAILENVPDVSQDSFGTSQMSLMSQVQVSEPSGQHIDSSYQMNSVCCDTLDQSGGRMGNAYSSTSKNTLIRHSSSPAGLLSELVAEGRGTFESGFMEGTVRNSIGVGNSCGDIIIPNRVQRQMNRLQQNSSPGLLSQLSVDMSVPEMVDRLNMAMVGSSAENQAGSSSDDSSLGSGNAGQGYISNFSVKSWDDEAMTPGNFAGMQNGANFTARKRAKELDMKLMQGLNNSDHQKVEGGIRGASALTNHPYNLPRSTSSELAMEEFLQDAVPCKVRAKRGCATHPRSIAERVRRTRISERMRKLQELVPNSDKQTVNIADMLDEAVEYVKSLQKQVQELAENRAKCTCTHNPDCAYKT

SEQ ID NO: 13473 - protein, 340 aa, Ammopiptanthus mongolicus
MAAENDVVSSDLHVKRQRDEEENGVSVSTVSMDMEGCKDSVHNGISSVIPGWFSEISPMWPGEAHSLKVEKILFQGKSEYQNVLVFQSSTYGKVLVLDGVIQLTERDECAYQEMITHLPLCSIPNPKKVLVIGGGDGGVLREVSRHSSVEKIDICEIDKMVVDVSKQFFPHVAVGFEDPRVNLHIGDGVAFLKAAPEGTYDAVIVDSSDPIGPAQELFEKPFFESVARALRPGGVVCTQAESIWLHMDIIEDIVANCRQIFKGSVNYAWTTVPTYPSGMIGFMLCSTEGPPVDFKHSVNPIDENECQKSVRPLKFYNSEIHTAAFCLPSFAKRKIGFINN

SEQ ID NO: 13474 - protein, 158 aa, Triticum aestivum
MAFSEAQEELVLRSWKAMKPDSESIALKFFLRIFEIAPAAKPMFPFLRDAGEDAPLESHPKLKAHAVTVFVMACESATQLRKTGDVKVREATLRRLGATHVRAGVADAHFEVVKTALLDTIEGAVPGMWTLEMNAAWEEAYDQLAAAIKEEMKLAAAA

SEQ ID NO: 13475 - protein, 200 aa, Streptomyces sp.
AWNTGAVENNRGYKVRYKGGYFPAPPVDHFADLRAEISLELDKNGLQVERQHHEVGTAGQAEINYKFNTLLAAADDLMLFKYIVKNVAWRNGKTATFMPKPIFGDNGSGMHVHQSLWSGGEPLFYDEQGYAGLSDTARYYIGGILKHAPSLLAFTNPTVNSYHRLVPGFEAPVNLVYSQRNRSAAMRIPITGSNPKAKRV

SEQ ID NO: 13476 - protein, 373 aa, Halobacterium salinarum
MKALHFGAGNTGRGFIGKLLADAGIQLTFADVNQVVLDALNARHSYQVHVVGETEQVDTVSGVDAVSSIGDDVVDLIAQVDLVTTAVGPVVLERIAPVIAKGLVKRKEQGNESPLNIIACENMVRGTTQLKGHVMNALPEDAKAWVEEHVGFVDSAVDRIVPPSASATNDPLEVTVETFSEWIVDKTQFKGTLPNIPCMELTDNLMAFVERKLFTLNTGHAITAYLGKLAGHQTIRDAILDEKILAVVKGAMEESGAVLIKRYFDADKHAAYIQKILGRFENPYLKDDVERVGRQPLRKLSAGDRLIKPLLGTLEYGLPHKNLIRRIAAAMHFRSEDDPQAQELAALIADKGPQAALAQISGLDANSDLVSER

SEQ ID NO: 13477 - protein, 409 aa, Oceanobacter sp. RED65
MRFLVLIISLFSLQACASEASSNGKLVIAGGAIRSDNQALYEALINAMPKQDGKVVIIPVASGKPLKSANAFSKDLVRYGLDEKQISIFPLAVTDDSTTDFDERKWKDNAFDEEKVAQIKDASAIWFTGGDQMRIIDSIRPSKDEPSPLLKELKLLLKHGAVIGGTSAGAAMMSETMIAAGDSFSAITQPQSDQYYGMETQEQGQLYLHHGLGFFEYGIVDQHFDRKARLGRLVKTLADQETKMGYAVDEDTAMVVDLEKQTISAVGAGNITIVDATSAQVNYEPFDAQNIYVSLLSSGDEYDIRKQALLNVKNLTIGSEYFSEAAKQGAGMAVANHRLAHLLGYELLDNKANSEIRRYSFNESGKGILYRFSQSKQSEGYWRTNGTQDQYSIINVRMDIEPVSISINQ

SEQ ID NO: 13478 - protein, 1367 aa, Schizosaccharomyces pombe
MEPEHSNYDLKNHPTSVQESTLNGSAVTDPQFGNTTNSLPSMNGLLNHENSFASQQSLSSSAFDDSEMVTSTANSTVVSSALSTPKIDDAQNSDDVRVDGTRRSSRAKRPVYRDFSYTEIDEHEIPIPKKRKRKPAPKQKKSVASDDEDAYDKRHRFSINSASGTEIRTSLRSSKGKSVNYNEQEFYDDFEDEEEEVEEQVEEEYEPIIDFVLNHRKRADAQDDGPKSSYQYLIKWQEVSHLHNTWEDYSTLSSVRGYKKVDNYIKQNIIYDREIREDPTTTFEDIEALDIERERKNMLFEEYKIVERIVASETNEEGKTEYFVKWRQLPYDNCTWEDSDVIYSMAPNEVYQFLQRENSPYLPYKGVFYNTRPPYRKLEKQPSYMKGGEIRDFQLTGINWMAYLWHRNENGILADEMGLGKTVQTVCFLSYLVHSLKQHGPFLIVVPLSTVPAWQETLANWTPDLNSICYTGNTESRAILESMNSRKLKFNILLTTYEYILKDKQELNNIRWQYLAIDEAHRLKNSESSLYETLSQFRTANRLLITGTPLQNNLKELASLVNFLMPGKFYIRDELNFDQPNAEQERDIRDLQERLQPFILRRLKKDVEKSLPSKSERILRVELSDMQTEWYKNILTKNYRALTGHTDGRGQLSLLNIVVELKKVSNHPYLFPGAAEKWMMGRKMTREDTLRGIIMNSGKMVLLDKLLQRLKHDGHRVLIFSQMVRMLNILGEYMSLRGYNYQRLDGTIPASVRRVSIDHFNAPDSPDFVFLLSTRAGGLGINLNTADTVIIFDSDWNPQADLQAMARAHRIGQKNHVNVYRFLSKDTVEEDILERARRKMILEYAIISLGVTEKSKNSKNDKYDAQELSAILKFGASNMFKATENQKKLENMNLDDILSHAEDRDSSNDVGGASMGGEEFLKQFEVTDYKAEDLNWDDIIPEEEMERIEEEERMLAAQRAKEEERERREEEERENDEDHPSRTYKRTTKSITKRQQRREEMVREKEIRLLYRAMIKFGLVDERFDTIVKEAELQATDPKRIYSLSADMVKACDEAVERLGADDTKNKQPRKAILIEFKGVKNINAETVTLRVKDLTHLHRAYKGLDPLKQIIGYPIRSVHSWNCSWGIKEDSMLLAGINKHGFGCWQAIKNDPDLGLHDKIFLDEAKNDKESRYVPSAVHLVRRGEYLLSVVREHPDLFVVKTDQPTKRKYNRKAPTKSSTRQTTLDGSISNTKKSSRTKKKKEEETNRGDETSPEGTVGEDEVEEEPRQAEPPKRALRSNSGKAASNKRTTRNSMKTHSAMDTLTAVAALDAELDNMSNEKAKEEVDHVKSENGESVNEPNTEDLSLETEENTTVSDISPLVKNEA

SEQ ID NO: 13479 - protein, 523 aa, Chlamydomonas reinhardtii
MATAAMKPPGGSIFNYYSKQKQQSQQSQQQQCSESTSSLQMSLRHMNLGDISRPPAANPPDGPVLSQEPRPHMRALRPRVLDLSSQPSQEQYTPDHLTPQEQLFRMEYEPSTMQVDDDVSRSPAPSPRAMKRPRPLKVLPGNMDDEVSSQSQSQSRSVGEPSTCSKALSGRPPIPKLREVQPPMPRNPYLVRADDDNHVFQASQSCLNRGNYSRFLWDYHQEAELGHGNFSKVYKAVHRLTGIAYAVKTNKVPITTLQARNMWLNEMQALAAVQPHPNIVGLYDTWFEPGGDAEQAYIKQELCGESLRDMFKRRVQFKEVEVLEILRQMASALKRIHDLGMVHLDIKPDNIYLAAPSPADLALRAASGANASSSAGSSSGGSSAAPVYKLGDFGLAMLPGGQRAGTSEGDVKYLAPEALKSRDFLTSGLADRLDVFALGASVYELLRGTELPKNGQSYHDIRQGKLFLPSASTRIINLLKKMMSPDPAQRPTADGILRSTLLQAGTSSSQLAATTSTPLPMSQ

SEQ ID NO: 13480 - protein, 342 aa, Pisum sativum
MAAESTVELESSMKEHRDDDEKSNGFSVSAVSMDVEGGDKDPSGNGVSSVIPGWFSEISPMWPGEAHSLKIEKILFQGKSEYQKVMVFQSSTYGKVLVLDGVIQLTERDECAYQEMITHLPLCSIPNPKKVLVIGGGDGGVLREVARHSSIEKIDICEIDNMVVEVSKQFFPEVAVGFNDPRVTLRIGDGVAFLKAAPEGTYDAVIVDSSDPIGPAQELFEKPFFQSVARALRPGGVMCTQAESIWLHMDIIEDIVSNCRHIFKGSVNYAWTTVPTYPSGMIGFMLCSTEGPLVDFKHPVNPIDQKDCQKSVRPLKFYNSEIHTAAFCLPSFAKRKIGSKET

SEQ ID NO: 13481 - protein, 235 aa, Aristolochia clematitis; identical to SEQ ID NO: 10126

SEQ ID NO: 13482 - protein, 663 aa, Pseudomonas aeruginosa PAO1
MFELPGDNAWLHFMQDDLPRLRQQGWFIDIRADFAYDLTPIDAWYAEVEEADDRQWFELELGIQVAGQRVSLLPALTELIRRSPALLDPRALARHADEEQLVLRLELNPPLRVALPFGRLKPVLAALSDFYLGDPEPQRKLRLGAPDAARLADLDELPLAWEGGDNLRDFARRLRSFQARPATPPQGLRAELRPYQLEGLSWMQTLRELDSGGVLADDMGLGKTLQSLAHVLLEKQAGRLDTPALVVMPTSLIPNWLDEAERFAPDLRVLALHGAGRRRDFARIDEHDLVLTTYALLPRDAAELGKRRFHLLILDEAQNIKNATTKAAVAARELAARHRLCLTGTPLENHLGELWSLFHFLMPGWLGDARQFAQDYRTPIEKHGDEARLSHLAARLRPFLLRRTKEQVASELPPKSEFTQFVELSEAQRELYETVRLALDRKVREEIARRGLARSRIVILEALLKLRQVCCDTRLLQRQEDGARSGRALSSGKLAYLLDMLDELIAEGRRVLLFSQFTSMLALIEDALRQRGVDYVLLTGETRDRRAPVQRFQSGKVPVFLISLKAGGVGLNLTAADTVIHYDPWWNPAVENQASDRAYRIGQDKPVFVYRLIARGTVEEKIQHLQQEKAALADGLFSEGNGDGWKLDEADIDALFAPLPKAL

SEQ ID NO: 13483 - protein, 334 aa, Pisum sativum
MAAPENTLHSTDSPLKRQREDEVNGVSDTLSKEPQPNGLSSVIPGWFSEISPMWPGEAHSLKVEKILFQGKSDYQDVMVFQSATYGKVLILDGVIQLTERDECAYQEMITHLPLCSIPNPKKVLVIGGGDGGVLREVARHSSVEKIDICEIDKMVVDVSKEYFPDIAVGFADPRVTLNIGDGVAFLKAAPEGTYDAVIVDSSDPIGPAQELFEKPFFESVARALRPGGVVCTQAESIWLHMHIIEDIVVNCRQVFKGSVNYAWTTVPTYPSGMIGFMLCSTEGPSVDFKHPVNPIDENDSQQAARPLKFYNREIHSAAFCLPSFAKRAIASKEN

SEQ ID NO: 13484 - protein, 181 aa, Arabidopsis thaliana
MASSMLSSAAVVTSPAQATMVAPFTGLKSSAAFPVTRKTNKDITSIASNGGRVSCMKVWPPIGKKKFETLSYLPDLSDVELAKEVDYLLRNKWIPCVEFELEHGFVYREHGNTPGYYDGRYWTMWKLPLFGCTDSAQVLKEVEECKKEYPGAFIRIIGFDNTRQVQCISFIAYKPPSFTEA

SEQ ID NO: 13485 - protein, 510 aa, Saccharophagus degradans 2-40
MKTPLTDINAKQAGVLLFSILIVALCGIVYELIIGTVSSYLLGNSVHQFSLTIGFFMFAMGVGSMISKYFDDQFVRNFIFVEIAIALVGGICSILLFIAFPMARALYELVMYSLILIIGALVGMEIPILTSLLAQKRSLKESIANVMSLDYVGALIGSVSFPLLLLPSLGLVQSSFAIGLINILVATINVIVFRHYLRHYHAMLLSCIGILVLLTGCIFYGTVLTRFAEKHLYFDQVIYSTQTPYQKLVVTRSTTTREQRLYIDGHIQFSSRDEYRYHEYLVHPVMSIPGPRKNVLILGGGDGLAAREVLKYDDVETIHLVDIDPEMLRIANELPMLRRLNKGSLDAEKLTAFSQDAFSFINEPGIDYDRVIIDMPDPHNEAINKLYSREFYTMIKRRMTPEGILVSQSSSPFFTRHVFWCIEQTLDHVFDNTLSYHTALPSFGIWGFNMARNNVAFPADIEFNIETRALTQASMQAARNFDKDIAKVETTVNSIMEPKLYHLYIEDLRR

SEQ ID NO: 13486 - protein, 565 aa, Xylella fastidiosa 9a5c
MAAAMRGMAVTFFSQFMVSCMHSIQIVLAMLLVVAASGYLVRIIPFSMPLPLLQIALGAVISGVFDGGYELQPEVFFLLFLPPLLFLDGWRIPKQGLFRDKNVILELALGLVVFTVLGIGFLIHWMIPTMPLALAFALAAILSPTDPVALSSITSRVRIPKRMMHILEGESLLNDATGLVCFQFAIAAVLTGHFSLATASLTFVWVLVVGLSLGMTTTYVLSRVQRWVWRHFGGEPAAAILVNLLTPFAAYLLAESMQASGILAAVAAGITMSYVELSGNAPATIRVQRWAVWETVQFTFNGIIFVLLGEQLPGILDDLVHSAQQAGHMNVGWLLVDVAVISAGLMLLRFLWVWLSLQWNLFKAVCCGKQRISPPWQIVVAMSLSGVRGAVTLAGVLTLPLLMPDGTPLPARQLVIFLAASVILVSLLLASVALPYLLRGLELPEKSSYDKEEDFARRVSAQAALEAVERLRQRLVEDSANAERYNEAAHQVSQLYQRKLGAVDLANVDPQETKVFEQVVRRFRQVGLAAERDELFRLAREHNISDELLQRMVRNLDLIEARRRS

SEQ ID NO: 13487 - protein, 513 aa, Burkholderia vietnamiensis G4
MRMKLKNIGLIAAGLATGVFATLQISASAEQTATAPLPLDQLRLFAEVFGQIKREYVEPVDDKKLLTAAIKGMVSSLDPHSSFLDKTDYDELQEQTKGRFAGLGIEISQEDGLVKVISPIEDTPAFRAGIRPGDLITRINDKPVRGMTLDKAVKQMRGEPGTKVTLTIFRKSDDRTFPVTVTRAIIKVQSVKMKMLDPGYAYIRITSFQERTTPDLAAKLQDIARQQPNLKGLILDLRNNGGGLLQSAVGVAGAFLPPDSVVVSTNGQIPDSKQVYRDTYDNYRLPSFDGDPLKNLPPIFKTVPMVVLTNAYSASASEIVAGALQDSKRAQIMGKTTFGKGSVQTVRPMTADTALRLTTAYYYTPSGRSIQNKGITPDVPVDQYADGDPDDVLVTREVDYTNHLANTQDPNEKKEQEEREQRRMDQLRLLEEQNDKKTPEQRQKDRDRKPIEFGSADDFMMQQALNKLEGKPVQESKSLLAESTTKSPAGKAASAAKASGAKAAAPKPASAPQ

SEQ ID NO: 13488 - protein, 233 aa, Aristolochia eriantha; identical to SEQ ID NO: 10130

SEQ ID NO: 13489 - protein, 124 aa, Salmonella enterica
GSGMHCHMSLAKNGTNLFSGDKYAGLSEQALYYIGGVIKHAKAINALANPTTNSYKRLVPGYEAPVMLAYSARNRSASIRIPVVASPKARRIEVRFPDPAANPYLCFAALLMAGLDGIKNKIHP

SEQ ID NO: 13490 - protein, 227 aa, Tolypothrix sp. PCC 7101
HEVATGGQCELGFRFGKLIEAADWLMTYKYVIKNVAKKYGRTVTFMPKPIFGDNGSGMHCHQSIWKDGKPLFGGDKYAGLSDMALYYIGGILKHAPALLGITNPTTNSYKRLVPGYEAPVNLAYSQGNRSASVRIPLSGSNPKAKRLEFRCPDATSNPYLAFAAMLCVGIDGIKNKIHPGEPLDRNIYELSPEELAKVPSTPGSLELALEALENDHAFLTESGVFTE

SEQ ID NO: 13491 - protein, 612 aa, Rhinanthus minor; identical to SEQ ID NO: 10133

SEQ ID NO: 13492 - protein, 607 aa, Geobacillus thermoglucosidasius
MSKIIGIDLGTTNSCVAVLEGGEPKVIPNPEGSRTTPSVVAFKNGERLVAKRQAITNPNTIISIKRHMGTDYKVEIEGKKYTPQEISAIILQYLKSYAEDYLGEPVTRAVITVPAYFNDAQRQATKDAGRIAGLQVERIINEPTAAALAYGLDKEEDQTILVYDLGGGTFDVSILELGDGVFEVKATAGDNHLGGDDFDQVIIDYLVEQFKQEHGIDLSKDKMALQRLKDAAEKAKKELSGVTQTQISLPFISANETGPLHIETTLTRAKFEELSAHLVERTMGPVRQALQDAGLTPADIDKVILVGGSTRIPAVQEAIKRELGKEPHKGVNPDEVVAIGAAIQGGVIAGEVKDVVLLDVTPLSLGIETMGGVFTKLIERNTTIPTSKSQIFTTAADNQTTVDIHVLQGERPMAADNKTLGRFQLTDIPPAPRGVPQIEVTFDIDANGIVHVRAKDLGTNKEQSITIKSSSGLSEEEIQRMIKEAEENAEADRKRKEAAELRNEADHLVFTTEKTLKEVEGKVDEAEVKKAREAKDALKAALEKNDIDDIRKKKEALQEIVQQLSVKLYEQAAKQAQAQQQTGAGDAAKKDDNVVDAEFEEVKDDNK

SEQ ID NO: 13493 - protein, 81 aa, Salmonella enterica
EQALYYIGGVIKHAKAINALANPTTNSYKRLVPGYEAPVMLAYSARNRSASIRIPVVASPKARRIEVRFPDPAANPYLCFA

SEQ ID NO: 13494 - protein, 227 aa, Nostoc sp. PCC 7906
HEVATGGQCELGFRFGKLIEAADWLMIYKYVIKNVAKKHGKTVTFMPKPIFGDNGSGMHCHQSIWKDGKPLFAGDQYAGLSQMALYYIGGLLKHAPALLAITNPSTNSYKRLVPGYEAPVNLAYSQGNRSASIRIPLSGTNPKAKRLEFRCPDATSNPYLAFAAMLCAGIDGIKNKIDPGSPLDKNIYELSPEELAKVPSTPGSLELALEALENDHAFLTESGVFTE

SEQ ID NO: 13495 - protein, 505 aa, Arabidopsis thaliana
IPGSTHASALSFSFLLPLSLTKTLVSFTRRRFSRHRNLQIRLSLHYDPCPVTSTPVIPPIRRHLAFASTKPPFHPSDDYHRFNPSSLSNNNDRSFVHGCGVVDREEDAVVVRSPSRKRKATMDMVVAPSNNGFTSSGFTNIPSSPCQTPRKGGRVNIKSKAKGNKSTPQTPISTNAGSPITLTPSGSCRYDSSLGLLTKKFVNLIKQAKDGMLDLNKAAETLEVQKRRIYDITNVLEGIDLIEKPFKNRILWKGVDACPGDEDADVSVLQAEIENLALEEQALDNQIRQTEERLRDLSENEKNQKWLFVTEEDIKSLPGFQNQTLIAVKAPHGTTLEVPDPDEAADHPQRRYRIILRSTMGPIDVYLVSEFEGKFEDTNGSGAAPPACLPIASSSGSTGHHDIEALTVDNPETAIVSHDHPHPQPGDTSDLNYLQEQVGGMLKITPSDVENDESDYWLLSNAEISMTDIWKTDSGIDWDYGIADVSTPPPGMGEIAPTAVDSTPR

SEQ ID NO: 13496 - protein, 641 aa, Xanthomonas oryzae pv. oryzae KACC10331
MGKIIGIDLGTTNSCVSIMDGGKARVIENSEGDRTTPSIVAYTKDGEVLVGASAKRQAVTNPKNTFYAVKRLIGRKFTDAEVQKDISHVPYGILAHDNGDAWVQTSDAKRMAPQEISARVLEKMKKTAEDYLGEKVTEAVITVPAYFNDSQRQATKDAGRIAGLDVKRIINEPTAAALAYGLDKKGGDRKIAVYDLGGGTFDVSIIEIAEVDGEKQFEVLATNGDTFLGGEDFDNRVIEYLVDEFNKDQGIDLRKDPLALQRLKDAAERAKIELSSSQQTEVNLPYVTADASGPKHLNIKLTRAKLEALVEDLVKKSIEPCRTALNDAGLRASDINEVILVGGQTRMPKVQQAVADFFGKEPRKDVNPDEAVAVGAAIQGGVLAGDVKDVLLLDVTPLSLGIETMGGVFTKIIEKNTTIPTKASQTFSTAEDNQSAVTVHVLQGEREQARFNKSLAKFDLSGIEPAPRGMPQVEVSFDIDANGILHVSAKDKKTNKEQKVEIKAGSGLSDEEIQRMVADAEANREEDKKFHELVQARNQADGLIHATRTAITEHGSKVGGDVIGKVEAALSDLETAVKGDDKAQIEARTKTLEEAGQSLYAAAAAAEQGGSADAASGNAQASKAADDVVDAEFTEVKDDKK

SEQ ID NO: 13497 - protein, 227 aa, Lyngbya aestuarii PCC 7419
HEVATGGQNELGFRFGTLIEAADNLMIYKYVIKNVAKKYGKTVTFMPKPLFNDNGSGMHCHQSIWKDGQPLFGGDKYAGFSEMDLHYIGGILRHAPALLALTNPTTNSYKRLVPGFEAPVNLAYSQGNRSASVRIPLSGDNPKAKRLEFRCPDATANPYLAFAAMLCAGIDGIKNKIDPGEPLDVDIYDLSPEELGKIPSTPGSLELALEALENDHAFLTESGVFSE

SEQ ID NO: 13498 - protein, 71 aa, Salmonella enterica
EQALYYIGGVIKHAKAINALANPTTNSYKRLVPGYEAPVMLAYSARNRSASIRIPVVASPKARRIEVRFPD

SEQ ID NO: 13499 - protein, 440 aa, Ashbya gossypii ATCC 10895
MAKRRHKNRTHVKPSEEELKQIPKSMVIRVGQTSLSNHSLNQLVKDFRMIMQPHTAVRLKERKSNKLKDFVVMCGPLGVSHLFIFTQSEKTGNVSLKVARTPQGPTVTFQVLDYSLGKDIKRFLKHPKSLGKDDILNPPLLVLNGFDIKNEDEGRANVEKVVVSMFQNIFPPLNPARTQLSSIRRVFMINKDQETGELSLRHYAIDIRQVDISRNLKRLYRSKNKLNKSVPNLHKKDDIASLILDHDVGAYTSESEVDDDAIVRIIDQRDTRVAAKEPVAANGEEDGDVDMEDAQDDDVEEPALEDDTPQPKKRAIKLTEVGPRLTLKLVKIEEGICSGKVLHHEYVQKTDAEIRALEKRHAQKLKLKEQRRKEQEENIARKKAVKDAKKQRKLERRKLRETAPEGEKPAESSADDSSSEDDYSDVPEDLDSDLFSEVDN

SEQ ID NO: 13500 - protein, 612 aa, Schwalbea americana; identical to SEQ ID NO: 10136

SEQ ID NO: 13501 - protein, 816 aa, Ostreococcus tauri
  misc_feature (815)..(816): Xaa can be any naturally occurring amino acid
MRGGDDADDDALDDALDDAETVVMSQAEVKRANIRAMVEGTLVVSVGAFADGLLVRDPRVVLKRAFKSPRWERRNGGDAKCRHRADETRAKSDDDGDDAPELVRRLAARRVFVPWGSKASDVAAAMPKPTTTLEEHIELPEGIEDLTLWVPGEGERGESGEAVAATTTTHPNAKPIVVDRMLTRWLRPHQREGVQFMFECVMGLRDFDGTGCILADDMGLGKTLQGITLLWTLLKQGFDGAPAVKRALIVCPTSLVSNWDDECNKWLKGRVKTLPICDSTRAEVVSSIKMFLAPRHVAQVMIVSYETFRIHSERFNFDGAVDLIMCDEAHRLKNGETLTNKALCAVPCLRRVMLSGTPMQNHLDEFYAMVSFCNPGLLGTPSEFSKKYERPILAGREPYATEKELERAQMANTDLSELVNKFILRRTNTILSKHLPPKVVEVVCCKLSPLQQALYEHFLTSKAATQALTGKATAVLPAINALKKLVNHPKLIFDMINGAKNTGSAAANGFNTCAEFFEPGMYGGGTSRRGGGRMCPGWEEHSGKFAVLARLLANLRSETKDRIVIISNYTQTLDLIAQMCIERHYPFVRLDGGTTIGKRQKLVKEFNDPTSNSFVFLLSSKAGGCGINLIGGNRLVLFDPDWNPANDKQAAARCWRDGQKKKCYLYRFLAAGTIEEKVFQRQLSKESLQNVVNGSGELEQAVMSTDELRKLFSLDCTTCSDTHDTCGCKRCPKREGNDLMLDEDEEYKFWEEQIDEADEQKLDEWAHHHRIDKVPDDILKKSAGDDVSFVFSLKVEGCAIAEKEQPPTAKPEESXX

SEQ ID NO: 13502 - protein, 314 aa, Aeropyrum pernix K1
MAGGSEKSVFLKWSWFLEWLTPDRATLKHIEDVIFQGRSRFQEIAVVRVSGEGKVLVLDGKTQSSESDEFMYHEALVHPAMILHGSPRKVLILGGGEGATLREVLKHRSVEKAVMVDIDETVVNVAREHLREWHRGAFDDPRAEVVIDDAWNYVASKAETGFDVVIADLVDPLEAGPATRLYSEEYYRMVKDVMNPGGVFVTQAVSISHLTEYHAIIRNTVARVFKHVESYGVYVPSFDSMWGFVVASDDKDPRILGDRGFFETRLSHQLQGAELRFLDYASMLHMLNIPKMYREAIAREKRYATLDNQVFLPA

SEQ ID NO: 13503 - protein, 637 aa, Vibrio proteolyticus
MGKIIGIDLGTTNSCVAVLDGDKPRVIENAEGERTTASVIAYTDGETLVGQPAKRQAVTNPTNTLFAIKRLIGRRFEDEEVQRDIEIMPYKIVKADNGDAWVEAKGQKMAAPQVSAEVLKKMKKTAEDFLGEEVTGAVITVPAYFNDAQRQATKDAGRIAGLEVKRIINEPTAAALAYGLDKKGGDRTIAVYDLGGGTFDISIIEIDEVEGEKTFEVLATNGDTHLGGEDFDNRLINYLVDEFKKEQGIDLKTDPLAMQRVKEAAEKAKIELSFTSQTDVNLPYVTADATAPKHMNVKVTRAKLESLVEDLVQRSLEPLKVALADADLSVNDITDVILVGGQTRMPMVQAKVAEFFGKEARRDVNPDEAVAMGAAVQGGVLAGDVKDVLLLDVTPLSLGIETMGGVMTKLVEKNTTIPTKANQVFSTAEDNQSAVTIHVLQGERKQAMYNKSLGQFNLEGIQPAPRGMPQIEVTFDLDADGILHVSAKDKQTGKEQKITIQASGGLSDDEIEKMVQEAEANKEADKKFEELATARNQADQMIHGTRKQVEEAGDALPAEDKEKIEAAVSELEDARKGDDKEAIDAKVQALMTASQKLMEIAQQQAQAQAAQGGDEAAQSKDDDVVDAEFEEVKDDKK

SEQ ID NO: 13504 - protein, 104 aa, Salmonella enterica
AGLSEQALYYIGGVIKHAKAINALANPTTNSYKRLVPGYEAPVMLAYSARNRSASIRIPVVASPKARRIEVRFPDPAANPYLCFAALLMAGLDGIKNKIHPGEA

SEQ ID NO: 13505 - protein, 227 aa, Anabaena cylindrica PCC 7122
HEVATGGQCELGFKFGKLIQAADWLMTYKYVIKNVAKKYGRTVTFMPKPVFGDNGSGMHCHQSIWKDGQPLFAGDKYAGLSETALHYIGGLLKHAPAVLAITNPTTNSYKRLVPGYEAPVNLAYSQGNRSASIRIPLSGTNPKAKRLEFRCPDATSNPYLAFAAMLCAGLDGIKNKIDPGEPLDKNIYELSPEELAKVPSTPGSLDAALEALEKDHAFLTEGGVFSE

SEQ ID NO: 13506 - protein, 607 aa, Scrophularia arguta; identical to SEQ ID NO: 10138

SEQ ID NO: 13507 - protein, 469 aa, Salmonella typhimurium
MSAEHVLTMLNEHEVKFVDLRFTDTKGKEQHVTIPAHQVNAEFFEEGKMFDGSSIGGWKGINESDMVLMPDASTAVIDPFFADSTLIIRCDILEPGTLQGYDRDPRSIAKRAEDYLRATGIADTVLFGPEPEFFLFDDIRFGASISGSHVAIDDIEGAWNSSTKYEGGNKGHRPGVKGGYFPVPPVDSAQDIRSEMCLVMEQMGLVVEAHHHEVATAGQNEVATRFNTMTKKADEIQIYKYVVHNVAHRFGKTATFMPKPMFGDNGSGMHCHMSLAKNGTNLFSGDKYAGLSEQALYYIGGVIKHAKAINALANPTTNSYKRLVPGYEAPVMLAYSARNRSASIRIPVVASPKARRIEVRFPDPAANPYLCFAALLMAGLDGIKNKIHPGEPMDKNLYDLPPEEAKEIPQVAGSLEEALNALDLDREFLKAGGVFTDEAIDAYIALRREEDDRVRMTPHPVEFELYYSV

SEQ ID NO: 13508 - protein, 637 aa, Oryza sativa Japonica Group
MQFNGNDYKDRPGCSNICLDDDILDPSLLANLAPELSELKNSGSVWSAISDLDPKLLPHQRKALDFLWKNLAGSIQVEGMDNSNVSTGGCVIAHTPGSGKTLLLISFLVSYMKAHPRSRPLVLTPKAAIHTWKREFEKWGISLPLHVFHHANRSGKPLGAMDSKLRSLLNNFHRPTWTNMRLMDSLDKLFKWHAHPSVLLMTYSSFLGMTKQDSKVRNRYREFIAEVLMNNPGLLILDEGHNPRSNKSKLRKLLMKVKTEFRILLSGTAFQNNFEEYFNTLCLARPRFIGDIMSELVPERKRETVGRRAKHQEAVARRAFVEKVGQKIESDNKHIRSDGISLLNKLTRGFIDSFEGAKLINLPGIHVYTVFMKPTDIQEEMLAKVTMPKLGSSRFPLEVELLITIGSIHPWLIKTTKAVSTFFSPAEVKKVERYKRDFAAGCKAKFVIDLLHKSSFRGERVLIFCHNVSPITFLVKLIEMVFGWRLGEEVLVLQGDQELPVRSDVMDKFNGDSAGKRKVLIASTTACAEGISLTGASRLVMLDSEWNHSKTRQAIARAFRRGQERTVYVYLLVASGTWEEEKYNSNRRKAWMSKMVFLGRYVDDSSQNRVTDIDDEVLKELADEDHTGTFHMIVKQD

SEQ ID NO: 13509 - protein, 1677 aa, Physcomitrella patens subsp. patens
MQLRKRKPVNYSDDHALFSKLLSETEDPDSSDTNNFLMGNVAAHGKSKTDIEASSEGDVETALARSWGSFHLRSVLGGRRGQNSNQDGGDTFVKTSKLAGMTTSERVDVLVRGAGLSDVALLSEENSNSMSGFNGFIRMALPSFQEEKRKRKLEELEKVRNWERPSSCLGLKEGHFCDPAHHMRNDNGIRPAAPRSAPTVGQHDVSCNEESRHLPLHEIQLNGKESPTSASLDKFQEELSTVNVANGSYQDEHTAEEMNCRELSEKEKLSLNSGDKVEACLPDLDDPSTSGVEDHATLDVSSSRPKRLRRIRQVSSMKQKLGSGRMAMVDDLAYHQFVECESSVKTARVKIEGIAPSSSYDGEYKLEGSDNFGHNDDLSLELPFNKHENRPYLVRRIGRVEKILSVKSRDAGADAVFRVKETLRSYRETVSVQGSVLQKHCPQLLRSFHKRMDHLGRKSGHTLDDTNSPDFDPVYTKIDRIIASEQRGSKKYYLVKWCGLPYTEATWVREENLSQDVAAICRFHKISLRTSAGVFKDGRRLRDYQEAGVAWLDHNFKNRTNCILADEMGLGKTIQSVAMLENLRTKRKIRGPFLVVAPVSTLGHWRREVESATDMNCVVYTGNQEDRQIIRNYEFYYGDGNSSELKFNILLTSFEILMKDQNKLARETWQYIIVDEAHRLKSRESKTAQALRQLRVRHGGLLLLTGTPVQNNTKELFSLLYLLDRNEFDSEEDFLLKYGDIKAAEQIKDLQDNILRPRLLRRMKEDVEKSIPMKEEVTIVWVELTKEQRAFYRAIYENNISTLLKGSIATNMPSLRNVAMELRKLCNHPFLCDGLEESIVFKHRSLNDGNASNLAETLLSQSSGKMVLVDKLLPKLKEAGRRVLIFSQFTMMLDLLEDYLLSKGYSYERIDGKIRGSDRQAAIDRYSAKDSSIFVFLLSTRAGGLGITLTAADTCIIYDSDWNPQNDLQAMARCHRIGQTKDVKIYRLITRNTYEQRLFECSSRKYGLDEAILGNRMGVDVTQDHNKNIESLLKHGAYDILKDDGEAASEFSSQNIEQILEQRTQQRQIGGRTNNTFSVATFISNPELASEDIPEAECDATASWHELLPEACEKAVLEAMDSKSPILPLSGGLRKRTRSGMNYKDMGVFVENENSDGNDALRKMRKCTRARVGQEPQGLDPSVKQWSDRELKRLEDQLFALGRGRTDQIMGEARLSHRGSEEVEEVSEALIHLCQYMQVCNGFGVFQPDSPTTGEVTGKASDRRYPIIGPSLSAIQEQGITKSKLITKVETRSKRNCGTRVLSNATKLMINGEIQPSRGKSQLDAGGESLEDTHHEPPVVPAVALLAMQSLEFQQRLQKEAQRYLQSLEDSQLLAEALQSQLGAFPPHVAFRSKKLPDWWGKKEDADLLKAAHLYGHKFFKRMKSDTSLSFVSRVNTLVNTKNSNAKSRPKDSIGKKSEDLPSESVLCSRLKKLTEALRDAARKKVPEMVHISESSHRYLVYATILYCRKAGDRQGSDAAPLNENPEKAIGVLSCPPSSNQLCMTKILTASLAMDFEKKGKGEGSHSKGASGTHAGLPDCNMAGSKGRFLRSPYFSGTVRSSKVFRLKKKKSSRSRRTVQFKSPKQEDVIFKVLKDEKRKEIQDSLRRKQQASDKHYETGSSSRKYRNVSCKSRSYH

SEQ ID NO: 13510 - protein, 387 aa, Geobacillus kaustophilus HTA426
MRAVHFGAGNIGRGFIGSLLAASGYDVVFVDVNEQIVRLLKERGEYRVIVAGEQREEQWVRGVSALNSQTEREKVIEVIADADLVTTAVGPPILPAIAPVVAAGLQRRFAIQQKPLHVIACENMIAGTEALKQHVLAHLSEAEQQLASEHVGFLNCAVDRIVPNQTNDDPLAVTVEPFFEWAIEARNVIGTVPPIQGAHFVADLGPYIERKLFTVNTGHALAAYLGYLRNYKTVQEAMNDEGIRLNVEQALSESGAVLVKKHGWSEKEHHAYIDTTIGRFMNPSLSDDILRVARSPIRKLGPNDRLVAPAVQYCALFGKVPHGLAKGIAALLRFDDSRDAEAAALQQTIAQHGIEGALRQYAGLESAHPLVAAVREEYDQMDENKRL

SEQ ID NO: 13511 - protein, 735 aa, Vitis vinifera
  misc_feature (344)..(344): Xaa can be any naturally occurring amino acid
  misc_feature (382)..(382): Xaa can be any naturally occurring amino acid
  misc_feature (523)..(523): Xaa can be any naturally occurring amino acid
MSGPRAPTRSAPPPPSSGQILRPMKRHLPFTSTKPPFVPPDDYHRFSSADAHGVANHEPEGIVVKSPQLKRKSAMDDNEVGSSEWTASPGYADAGNSPFRTPVSGKGGRIYSKSKVSKGNVCGPQTPVSNAGSPSTLTPAGNCRYDSSLGLLTKKFINLIKHAEDGILDLNKAAETLEVQKRRIYDITNVLEGIGLIEKKLKNRIRWKGLDVSRPGEVDDDVTILQAEVENLSLEERRLDDHIRWLFVTEDDIKGLPCFQQNETLIAIKAPHGTTLEVPDPDEAVDYPQRRYRIVLRSTMGPIDVYLVSQFEEKFEEMNGTPPPLSFPLASSSGSNENPSTEVXIADSSGKELEPQDGYQMCSDLTASQEFIGGIMKIVPDXDSDADYWLRSDAEVSITDMWKTDLNMLNSLTPTVAYVEWNGVDMLNAEFGMADVSTPLPQTPPSGLTEGPSTAVNPTHRRKWMKGLGSSTSWALDAERFVLCQQQKASRRRREAKGLKAIRFIGTTARKTSTGYGMIHDGXSGGERVSLNLPTTTTTTISPRLFNIQSTMVDDSASISHPPPSSNLRRRNSIGTAAIPTKLTLPSKAHYSSSFPRPNGVRVSSSTSSSSPQSSFPNVDFELISLKSLAYTSLKDLLPSTSAAQSPTAAGTGSGSCYEISIRNRLVKQAAWAYLQPMSASPGSSGGRLFDRMLLGFSMECLRNRVSTCLGFINRHIFSAIIRAFDRILRMIGVR

SEQ ID NO: 13512 - protein, 193 aa, Xanthomonas campestris
QHITFPASIIEPALFEEGKMFDGSSIAGWKGINESDMVLLPDAGTAYLDPFFADPTIVLTCDILDPATMQSYERDPRGIAKRAEAYLKSSGTADQAFFGPEPEFFIFDSVRFANDMGHTFFQVGSEEAAWNTGAKYDGGNSGYRPGVKGGYFPVPPTDTLHDLRAEMIKTLEQVGIETEVHHHEVATAGQCEI

SEQ ID NO: 13513 - protein, 457 aa, Oryza sativa Japonica Group
MATRIPGTVAASGVYYNDQYRMPCKLKGIHCMALNCIPQKAKVRKCMNGYQSTFRFCVNEKNGQTTGQSNGSLIQQGQNFRCHSYGSHNSSETKECSLEDGTDSYRDFEEHSRGASQFSDNQVAAKKKSVKSSQGLAEACKFVYNDAKFVNERAQNDILLLSRGITRLNKRACQDVAVLGSGFLKLDARARKDTKKIDHSVKERAARLTHFARILKEQAQSDLKKAADQHWSDGALEADLRRADSVVRRRAVEDAFMALKFVRDIHDMMANRLQEQFAKDGSSSPANSRSFITLEKNGNTFELFPHEVSTDQITAIEQAYWSMASALSEADGIDYTDPEELELLVATLIDLDAMDGKKSVSLLAECSSSPDVNTRKALANALAAAPSMWILGNAGMGALQRLAQDSNYAVARAATRAINELTKQWELEEGDSLRFVLNQNMVSKETADDSAAADDTR

SEQ ID NO: 13514 - protein, 1036 aa, Cryptococcus neoformans var. neoformans JEC21
MSSKKPLLSIRADPTSDDDFDIESRALAEEYAEARKKGSNVKTRRRDMVGKHQSEQPGTSYQARGVQNRAGTESIDSSDGDDEVVVKWKRKSLREEMAYEGQIILEFNPLYRLAGLSEPKKGQEDEAPSLKNLISSHKKEALMANASLRASETSTPSVTPQKGKEGSSDIQILSDEEVFGLPAEAVTQNPEPRNASPSPTDEIFDSDEEVFQPVEVKSKISAPSEKIQSSSPVETPISSQSSYVFWNCDNIPSHKPNFPMDDQQFLVKPFVLDQETKDIKIPPSINRFLKEYQRAGAKFLYDAYKQGRGAVLGDDMGLGKTVQVISFLSAIMRKTGTYVDHQRRKRTIRESVVDVSPRHWPTALIICPKSLINNWCRELDTWGYFEYAVWKSDNWRDVQQKFIHGYLDLMIVSYDVARLDIQHIKDLPLSTVIADEAHRLKEPMSQTTLALKSIQCQMCFALTGTLVQNRIDEMWSVLDFVHRGWAGTYRQWKEFAVSPIKKGHQVEGTAAEVVRAIMTIGVMTQRILPHFYLRRDKKLIAHELPEKKDLVVFCPLASRQIVAYRALIESDDVVNIQARNRPCPCGSGKRAILCYGSRANFQIRLHLGRGLLLKKLLVQWRNEPVKNKGVLKSPNCAESELKGFPIVLIFSTSVRLLKIISRFISTSPSLSGFEFDALTGEASGTERQEMIDRFQDLERDHFIMLISTRAGGVGLNLTAANKVVIFDPSWNPADDLQAMDRAFRIGQKRTVEVYRLIGQGTIEELIYERQVQKQQSARQLNNGTLEPRIYQGYDRATNAKDQAELFGVHNLFHFDPSGFAPANLGVHVANDNFLGEPTSLAENEGEVDEVDEDEDIKPEIPAGGSRTSSQSQKHREGRRKDKGKEKKSEQMEETADMVQSLLEDAPTPSQGSKEVDILTELGFDSLLHENVFGDSAEEREIFEKGLKILEKNPMLAKSIKANSLIKTQRRTARKSAMALGPGLEPVTSRRESREVKKEGRRSRLMEEEGHEDERVGVRREKRRKGESSKNLVELSD

SEQ ID NO: 13515 - protein, 540 aa, Aeluropus littoralis
MGPGVVAHLVRLGVLSSTSGHASVVSINLFVALLCACIVLGHLLEENRWVNESITALIIGLCTGVVILLTTKGKSSHILVFSEDLFFIYLLPPIIFNAGFQVKKKRFFRNFMTITLFGAVGTMISFFTISIGAIAIFSRMNIGTLEVGDFLAIGAIFSATDSVCTLQVLNQDETPLLYSLVFGEGVVNDATSVVLFNALQHFDLNKIDVAVVLKFLGNFCYLFLSSTFLGVFAGLLSAYIIKKLYIGRHSTDREVALMMLMAYLSYMLAELSDLSGILTVFFCGIVMSHYTWHNVTESSRVTTKHAFATLSFIAETFLFLYVGMDALDIEKWKFASDSPGKSIGISSILLGLVLVGRAAFVFPLSFLSNLTKKADFEKITWRQQIVIWWAGLMRGAVSIALAYNKFTRSGHTQLHGNAIMITSTITVVLFSTMVFGMMTKPLIQFLLPASSHTVTSEPSSPKSLHSPLLASMQGSDLETASHSHIVRPSSLRMLLSKPTHTVHYYWRKFDDALMRPMFGGRGFVPFSPGSPTEQSIHWGR

SEQ ID NO: 13516 - protein, 313 aa, Triticum aestivum
  misc_feature (256)..(256): Xaa can be any naturally occurring amino acid
MDPMDIVGKSKEDVSLPKSTMTKIIKEMLPPDVRVARDTQDLLVECCVEFINLLSSESNDVCSRDDKKTIAPEHVIRALQDLGFKEYVEEVYAAYEQHKLETLDSPKATKFTGIEMTEEEAVAEQQRMFAEARARMNNGAAKPKEPALEPQNQPQQPPQPHLQLHPQAQQPPQPQPQLHYPQSQQPLQPFTQAPPQQPLHPQLQQYTQAPPQQPPQPPLQLHPQAQPEQPLQPQSSGSTTGTCVISAAAPSATGTXLLLQPPPQQSPQSQLQLHQQPQPTLVPPPQPQPQPPELQQPQPLTQLQAEHGLDWDS

SEQ ID NO: 13517 - protein, 452 aa, Frankia sp. EAN1pec
MDKQQEFVLRTLEERDIRFVRLWFTDVLGVLKSVEIAPAELEGALAEGIGFDGSAIEGFARVHEADMLARPDPSTFQVLPWRGEHPMTARMFCDLVMPDGTPAVADSRWVLRRTLARAADAGFTFYTHPEIEFFLLKHPPTRGGPMPPPVDESGYFDLTPNDISHDFRQQAIGVLERLGISVEFSHHEVAPGQQEIDLRYADALTIADNIMTFRQVVKEVALRQGIYATFMPKPFSDQAGSGMHTHMSLFEGDRNAFHDPTDEYQLSKVAKAFIAGLLVHSAEITAVTNQWVNSYKRLVGDQRAGELMEAPAYVCWGHNNRSALVRVPLYKLNKSNAARVEFRSPDSACNPYLTFALMLAAGLRGVQGGYDLPAPAADDVWTLTDAQRRERGITALPGSLAEAIATMETSSLVRETLGDELFDFFLRNKRSEWIEYRRQVTPFEIDRYLPTL

SEQ ID NO: 13518 - protein, 170 aa, Helicobacter pylori
GSGMHTHVSVWKNNENLFSGETYKGLSELALHFLGGVLHHARGLAAFTNASTNSYKRLIPGYEAPSILTYSANNRSASVRIPYGISKNSARFEFRFPDSSSNPYLAFAAILMAGMDGVKNKIDPGEAMDINLFKLTLDEIREKGIKQMPHTLRRSLEEMLADKQYLKEGQ

SEQ ID NO: 13519 - protein, 233 aa, Aristolochia gigantea; identical to SEQ ID NO: 10155

SEQ ID NO: 13520 - protein, 170 aa, Helicobacter pylori
GSGMHTHVSMWKNNENLFSGEAYKGLSELALHFLGGVLRHARGLAAFTNASTNSYKRLIPGYEAPSILTYSANNRSASVRIPYGISKNSARFEFRFPDSSSNPYLAFGAILMAGIDGIKNKMDPGEAMDINLFKLTLDEIREKGIKQMPHTLRRSLEEMLADKQYLKEGH

SEQ ID NO: 13521 - protein, 238 aa, Aristolochia grandiflora; identical to SEQ ID NO: 10158

SEQ ID NO: 13522 - protein, 474 aa, Frankia sp. EAN1pec
MFTNADDVLRYIRDEGVQFIDVRFCDLPGVMQHFTIPTEVFSESVFSDGLMFDGSSIRGFQAIHESDMLLLPDPRTAFVDPFREHPTLAMTFFIHDPITKEQYSRDPRNIAKKAEAYLRGTGIADTAYFGPEAEFYIFDDVRYDYNPYGSMHAVDSVEAAWNTARKEEGGNLGYKPRFKGGYFPVPPTDHFTDLRSEMTRVLFEVGITVEMQHHEVGTAGQAEIDIRYDTLLKTADNLMLYKYVIRNVARSRGKTVTFMPKPLFEDNGSGMHTHQSLWKDGEPLFYSPNGYGGLSDTARYYIGGLLHHAPALLAFTNPTTNSYRRLVPGYEAPVNLVYSARNRSACCRIPLGGDSPKAKRVEFRVPDPSCNPYLAFAAMLMAGLDGVKNKIDPPDPIDKDLYELPPDELAAVPQVPGSLEKVLDALEADNEFLREGNVFTPDLIETWIDYKRVNEVDAIRLRPHPYEFSLYYDI

SEQ ID NO: 13523 - protein, 431 aa, Daucus carota
MKPPFVPSDDYYRFGESRGVADHEADVIIVKSTPSKRKPGNYNEVESSRLSMSPAYTNTVKSPNQTPVSGKGGRVYGRSNATKSLASVPQTPMSNAGSPSPLTPAGSCRYDSSLGLLTKKFINLIKQAEDGTLDLNNAAETLEVQKRRIYDITNVLEGIGLIEKKLKNRIHWKGIDASRPGEMEDDSNVLQAEVEKLSLEEKRLDDRIREMQEKLRDLSEDEANQKWLFVTEEDIKGLECFMNKTLIAIKAPHGTTLEVPDPDEVVDYPQRRYRIILRSTMGPIDVYLVSQFEEKFDEMNSVQPSMSLPLASSTGSNDNPAAETAIVGHGLENGTMTQDGHGVNSDLYTSEDISGGIMKILPSELDNDADYWLLTDPSISMTDMWKTDAGVEWDGASLLNEEFELPCISPRPQTPPSGVADVSTVANGTQR

SEQ ID NO: 13524 - protein, 232 aa, Aristolochia kaempferi; identical to SEQ ID NO: 10161

SEQ ID NO: 13525 - protein, 480 aa, Dechloromonas aromatica RCB
MGQLEMSKTKTISLTVGAFVAGALISLNFPALADKEAKPGLPIEELRTFAEVYSAIKQGYVEPVEDKKMITNAISGMLSNLDPHSAYLDADAFKDLQVGTQGEFGGLGIEVGMEDGLVKVVSPIEDTPAYRAGVKSGDLIFKLDDTMVKGLTLSEAVKKMRGKPKTPIKLSIIRKGETKPIELTLIREVIKVQSVKSKLIEPGYGWVRITQFQENTIAELAKHVAGLYKDGNKLQGLVLDLRNDPGGLLHGAIGVSAAFLPPDVKVVSTDGRTEDAKQEFRARTQDYQRGTKEDSLKGMPIEAKNVPMVVLVNGGSASASEIVAGALQDHKRAVIVGTQTFGKGSVQSVLPLPGNTAIKLTTARYYTPSGRSIQAKGITPDIVVEESLNGNAAASMRLREADLDRHLSNDRDKEAGKELPKADTKPQAKTSPKSGKDKNGKEDAEDELPQRLEYASKSDYQFQQAINLLKGLQIMQNKAQ

SEQ ID NO: 13526 - protein, 678 aa, Oryza sativa Indica Group
MAASSAQLIFLLLLAVLAAASSRNDEEARALMALKESLDPAGRVLGSWARSGEPCGGSFVGVTCDSGGRVTAISLQGRGLSGTLPPAIAGLRRLTGLYLHYNGIKGAIPREIGSLSELTDLYLDVNHLTGPLPVEIAAMENLQVLQLGYNQLTGSIPPQLGKLNKLAVLALQSNQLTGAIPATLGDLTQLARLDLSFNSLFGSIPSKIAEVPLLEVFDVRNNSLSGSVPAGLRRLNGGFQYVNNKGLCGVGFSLLDLCLSSEDGLKPSKPEPFGPDGTVKTRQVPQSANTDNHCEGSGCSKSSNASVGVLVVGVVAVVIGAAFCGIFAFSYYRRQKQKIGSSLEVSDSRLSTDHYQQKEVCRRSASPLISVEYSNGWDPLSGGGVGSSGEVGDSFRFNLEEVECATQYFSEVNLLGKSGFAATYKGILRDGSVVAVKSLNKTSCKQEESDFLRGLKMLTVLRHENLVGLRGFCCSRGRGECFLVYDYMVNGCLSQYLDVKEGSGANVLDWPTRVSIIRGIAKGVEYMHSKKANKPSVVHQNISAEKILLDHHLTPRLSVPGLHKLLADDVVFSTLKASAAMGYLAPEYATTGRFTEKSDVFAFGIVVLQVITGRRAVSQLKVSTVANDLDSLIDENLNGVFSRTEAAKLAAIAALCTSETASQRPTMEAVVQQLSNCH

SEQ ID NO: 13527 - protein, 704 aa, Rhizobium leguminosarum bv. viciae 3841
MRIAYFFLGAFLAIAQSAYAEVASPPLLAPLKRQAQAAELSAQFLSRYSYRPVPLDDALSARIMDGFIKSLDPDRMLFLQADIDGFMSDRSEIDDAIEERNLKIPFAIFKAYQQRVVDRMNYARSLLKQGFDFSAQENYSVLRDKAPWPQSEAESNELWRKRVKSDWLRLKLGGQNDAAIRETLDKRYENTLERAYKFKSDDVFQSFMDAYATSIDPHTDYFGAAASADFNVSMKLSLFGIGAVLQERDDYTTIRELVPGGPAQLSGKLSVGDRITGVGQGKDGAIKDVVGTRLDEVVQMIRGKKGSVVRLDILPADAGAEGTHRVISLVRDKISLDKQAARKTVLSVKAGDATRKIGIITLPVFYEDFEAKRKGDKDYKSASRDVAKLLGELSEEKVDSVLIDLRNNGGGSLDEAIDLTGLFIGNGPVVQQRGSDGKVEVRSSDLAAPVWTGPVGVLINRGSASASEIFAAAIQDYGRGVIVGEPSFGKGTVQTVVDLDRIVRNSKPELGELKVTIAQFFRVNGGTTQLHGVTPDIGLPGLSDPTSFGETSYDNALPWAQIKPAKYTAADTVTTLLPTLQSRHDARIESDPDFQRLIKDIADLKAQREKGIVSLNETERRKEATAREKRFKDRAKAGDGEDLGDDGLEAGERSLSADIAIENARKNAKDVLLDEAAAILADEADLQQGVLKAATKQSGNTNGK

SEQ ID NO: 13528 - protein, 170 aa, Helicobacter pylori
GSGMHTHVSVWKNNENLFGGETYKGLSELALHFLGGVLRHARGLAAFTNASTNSYKRLIPGYEAPSILTYSANNRSASVRIPYGISKNGARFEFRFPDSSSNPYLAFAAILMAGMDGVKNKIDPGEAMDINLFKLTLDEIREKGIKQMPHTLRRSLEEMLADKQYLKEGQ

SEQ ID NO: 13529 - protein, 546 aa, Zea mays
MGLGAAMALALGDPPADYASIAAVGLFVALMCVCIVVGHLLEENRWMNESITALFIGLGTGAVILFASSGKHSRVLVFSEDLFFIYLLPPIIFNAGFQVKKKQFFRNFITITLFGAVGTLISFTVISLGALGLISRLNIGALELGDYLALGAIFSSTDSVCTLQVLSQDETPFLYSLVFGEGVVNDATSVVLFNAIQNFDPGNISSAKLLNFIGSFLYLFGSSTILGVASGLLSAYTIKKLYFGRHSTDREVSIMMLMAYLSYMLAELLDLSGILTVFFCGIVMSHYTWHNVTESSRVTTKHAFATLSFISETFLFLYVGMDALDIEKWKIVGQTYSPVKSIALSSTILALVLVSRAAFVFPLSFVSNLTKKTPNGKISFRQQVIVWWAGLMRGAVSIALAYNKFTRSGHTQQPSNAIMITSTISVVLFSTIVFGLLTKPLIRLLIPSRHLSREPSALSEPSSPKSFFEQLAANSPGHPDLENGISLRRPASLRFLLVSPARSVHHYWRKFDDSFMRPVFGGRGFVPFVPGSPTESSLPLLPGNEN

SEQ ID NO: 13530 - protein, 512 aa, Xanthomonas oryzae pv. oryzae KACC10331
MSECFMRVAVLSVALSLALFASPGWAQKAGPAAAQATADDPEANEAAVSKVPLDEIRRFVAVYNAVKQAYVDPVEDKKLMHAAVRGLLSDLDPHSTYFDKEDAEAFDEQATGAYDGIGVELLQQQDNTLKVIAPIDDTPAARAGIRAGDVIVAIDGKPIDASKAMEPLRGASGSKVVLTIVRDKTPKPFDVTLQRETIRVASVRSKMLEPGYGYIRISTFQADTGADFQKNLKQLQAGGKLRGLVLDLRSNPGGLLTSAVQVADDLLDKGNIVSTRGRISISDAKFDATPGDLVNGAPVVVLVDAGSASASEVLAGALRDNKRARIIGSRTFGKGSVQTVLPLDNGDSVKLTTARYYTPSGKSIQASGIVPDVMLTPEPQPGDADVPASLTDYNEATLPGHLRGDDEGEEGYSAGDVLPGDGPISEALAELKQPGSAAKAQAARKAKAQAAQKAKAAKTGAEPKPAAARPATTDKPKSAEPAGKAKPATAPTAPTEPAQPTPPADKPAEPVN

SEQ ID NO: 13531 - protein, 2412 aa, Aspergillus nidulans FGSC A4
MMAEPSRPATARFPPSRQVRGTRLNTIIEDARETQYADNRGPSPTDNGPKSPTPRLKLKTTGLSLPLVRQQRKFLSPLSAGSVSSCSDVDWQNQMRTFDELYDATDDESDFSDECMSFTSTRPTSLTTPTTRADSVTSSNSRRRYPALSIPTSSIWPSLNGAPKSSPVPPTPPQRIPVSPAALSLLSRSVPAMHATPSLDGSVSSDQVSNLSTPSTPSLRSLPDTDWNSREIHVLPDLDDSQHPNIANPETEEVPSIEIPIEDADDDWRRFIGEFPQIPGQTTSQAGYVGVEPAREDTPSDPGVALPEGALATLQFIPLEGTPEPWSETSEPNEEMWQVAAPPEPRRLDDETPVSELSEYSFTGLSIPSPGGFFNSLAPRARHTWSLPKLNQPPTSATAERFYNLPFNREEGEIIEQVIDLPERLNDEQLTAIYAPPTAIKIPESPAHPPTEGSISPVSERVHEISRPATAYDPDEQDENYAEELHKKALSSLDRTSVWLAAQASYLAALRETNPVNNLPDEDERPQDVDESPQHVSPALERNASVCFTGMFPEPPSSLPAANASKDSIYWRGFRFLLDQSRSRDTFVHRSTRFDAVQSFRLGLSGLHNKCLLGNYELVLPDRPAYSGPFAKAPRHSVLPGILQQKAEFSMIEKEQLVLSQISQPMWAMEALRYLQGGNLVVSPARKRFSKRATAAAPHKTPKRRQVRVLDLGGHATAEWAWHLAHDYPHVKVYTVYTEHQQVNKAIKGPPNHRHIQVPQLWKLPFPDNKFDVISARSLPAFLKTERPAGDCLDEYDLCLKECRRCLKPGGYLEYLVMDAEIARAGPYASATSIEFSFSLKIRGYDPVPTKQFVGRLRKQGFVGIKRGWMYLPMGTEPPKPQVPRETPDPRVKSLIEDYEAVQGPLGSTADIASITGLLGGWIWEQWLLKLQVEMGRDKSKLLEGIGTIGDISYETMLYDFYFMRASHVNKSVPPRAPPRLKTQSHCQPIFTKNLHNQNALFQTLTNQVVTIELKNDIRIRGTLKSVDQYLNIKLDDIDVLDLDKYPHLSSVKNMFIRGSVVRLHRADGPPKSTTKQARITQFTTQGERPGSRVTAPRPRLLKREGSSNASGGGDEGLFLEDKKSRDARLGQEKNIERERSRSPDIWGSRSGDKENENAGAARSLEEGMEEGIDRYNESENAVKRRKVDLEAPHARSVERLSSKAQKISGPFIDESDSENEGLEAFREYADGEADVAPEKDVKESEAHSDENQTAGKRDLAADISPLVREATSHMQEDEYPDFDDIEAGGVEDEGLDFECEAAVDEETFGFDANDTTADTIHADEKPTCPVCQGSLEGFDEMKVMAHVNDCLDGRPSAISPMQESPKVSTPEQKAVAADRAAIAKPAQRDPAQYQTSRAGTAFSKIMAGNAEDAAWAEAAASDVASRGFSISVDAFRYGAVESCNAYFLSHFHSDHYIGLSKSWRHGPIYCSRATANLVRQQLKVDPKWVVDLDFEKKTEVPGTGGVQVTMIEANHCPGSAIFLFEKAVSSGASTRIQRVLHCGDFRASPQHVQHALLRPDVVDPKTGKRWQQRIDACYLDTTYLSPKYAFPRQSDVINACAELCVRIDQGQYDSLGHMPFQTATPTTKSKNPISKFMSAATAAVKPSTQPEPKGRLLVVIGTYSIGKERICLAIARALKSKIYATPAKQRVCACLEDPELSALLTDDPLQAQVHMQTLFEIRAETLCDYLDSMKPHFTRVIGFRPTGWTYRPPAGRTLENPPVSTVLYSSHWKTPFSVRDLTPQRGSTRESACFGVPYSEHSSFRELTMFCCALRIGRIIPTVNVGSQKSRERMKAWFEKWEAEKRKTHNTKRRIALELRSVGLLSQHNRNSELRNTRPAFIYRQRHPVIMITDFLTPENITPERIALALLGLLAAYYVVPYLQTWRLSDIPAPGLAAWTNFWLLLQTRLGHRFISVDNAHKKYGKLVRIAPRHISIADDAAIQAVYGHGNGFLKSDFYDAFVSIRRGLFNTRDRAEHTRKRKTVSHTFSAKSIGQFEQYIHHNIENLVKQLTRISNLQRNPKNGYATVDALNWFNFVAFDIIGDLAFGAPFGMLDKGQDIAEMRKSPDSPPQYVQAVEVLNRRGEVSATLGCYPALKPFAKYLPDRFFRDGLEAVENLAGIAIACVNERLKPEVMANNTRVDLLARLMEGKDANGNKLGRAELTAEALTQLIAGSDTTSNTSCAILYYCLRTPGVIDKLHKVLDEAIPQDVEVPTHAMVKEIPYLQWVIWETMRIHSTSAMGLPREIPEGNPPVEISGHIFKPGDILSVPTYTIHHSKEIWGADADEFIPERWAPERLTARQKAAFIPFSTGPRACVGRNVAEMELLVICSTVFRMFDWELQQKGPMETREGFLRKPLGLTVGVKRRTIV

SEQ ID NO: 13532 - protein, 496 aa, Staphylococcus aureus subsp. aureus MW2
MDDKQHTSSSDDERAEIATSNQDQETNSSKRVHLKRWQFISILIGTILITAVITVVAYIFINQKISGLNKTDQANLNKIENVYKILNSDYYKKQDSDKLSKAAIDGMVKELKDPYSEYLTKEQTKSFNEGVSGDFVGIGAEMQKKNDQIMVTSPMKGSPAERAGIRPKDVITKVNGKSIKGKALDEVVKDVRGKENTEVTLTVQRGSEEKDVKIKREKIHVKSVEYKKKGKVGVITINKFQNDTSGELKDAVLKAHKDGLKKIVLDLRNNPGGLLDEAVKMANIFIDKGKTVVKLEKGKDTEAIQTSNDALKEAKDMDISILVNEGSASASEVFTGALKDYNKAKVYGSKTFGKGVVQTTREFKDGSLLKYTEMKWLTPDGHYIHGKGIKPDVTIDTPKYQSLNVIPNTKTFKVGDDDKNIKTIKIGLSALGYKVDNETTQFDQALENQVKAFQQANKLEVTGEFNKETNNKFTELLVEKANKHDDVLDKLINILK

SEQ ID NO: 13533 - protein, 123 aa, Salmonella enterica
MPKPMFGDNGSGMHCHMSLAKNGTNLFSGDKYAGLSEQALYYIGGVIKHAKAINALANPTTNSYKRLVPGYEAPVMLAYSARNRSASIRIPVVASPKARRIEVRFPDPAANPYLCFAALLMAG

SEQ ID NO: 13534 - protein, 233 aa, Aristolochia maxima; identical to SEQ ID NO: 10166

SEQ ID NO: 13535 - protein, 441 aa, Thermosynechococcus elongatus BP-1
MLSPFPLPVRGIFLWGDDRIGARCFEWLCRVKHWAILGVGVALLGMPPAVGGTSTLKDAPKALVDEAWQIIYKSYLDRSFNRLDWQAIRRELLSQPYRDREAAYRVIQQTLVRLNDPYTRFLPPHEYRQLLLQTQGQQVDVGLTLVEAGELFRIQAIQPGSVAAKADLKVGDEILAINGRGSDRLTLERATLALRGPAGTKLRLLVRREGKPQPFSVELTRAGEIPRTVNFQILNSPRVGYIRLSGFNSRSQQQMQEAIEILQREKVQGFILDLRHNPGGLLEAGIEISRQWLDSGVIVRIQQNQREETIRARQGALSQLPLVVLVNQASASASEILAAALQDQGRAIVVGTPTFGKVRVQAVHELADGSALVVTVARYLTPKGRDIAAGGISPDVLVTVDASTDLELRLNPNLVARPTDPMVAKALELLSTKISNARHVQ

SEQ ID NO: 13536 - protein, 1071 aa, Candida glabrata CBS 138
MGNEESRINEGLDNLGVNVQSQSSLEKQIENDVQNYTIQQQIEQEEKRLERAKNALNKCLKKKKLLERRLKLTTRISVKAKLREEIAYLEENEEYTLRQDIQDVKQRLKSNLNSLNSDSQKTETDRRPDESEKDYLVRIGKITAFGSSNKFIIDNEDYANDSYPATKIKKEEDLEALAAVQMTENLDDEEHISNSFDNNDNFDDTYVDDDEYVNTDDTSKDDEISVPDTRFAHGQTLDDGDELIYQKRLRKWIKHRSSKRTLDKHEHLPEWQKPHPEIPDAKLNNEFKIPGEIFSLLFNYQKTGVQWLYELFQQRRGGIIGDEMGLGKTIQVTAFLAALHHSNLLSGPVLIVCPATVMKQWCNEIHQWWPPFRAVILHSIGAGMNDKSNLTEDEIENMIIKSELENTDFHDYENASKLKSKVETGMHMQNLISKVVADGHIIITTYVGLRIHSDKLLNVNWSYCVLDEGHKIRNPDSEISLTCKKLKCKNRIILSGTPIQNNLVELWSLFDFIYPGRLGTLPVFQQQFVQPINMGGYANATNTQVQTGYRCAVALRDLISPYLLRRVKADVAKDLPKKKEMVLFCKLTEFQRRKYLEFLSSDELSQIKGGKRHVLYGIDILRKICNHPDLLDRDYIKNTSGYGDPKRSGKMQVVKQLLKLWKSEGHKTLLFTQSRQMLDILEEFIKFKEPELSDIRYLRMDGTTSIQVRQTLVDRFNNESYDVFLLTTRVGGLGVNLTGANRIIIYDPDWNPSTDLQARERAWRIGQKREVSIYRLMISGTIEEKIYHRQIFKQFLMNKVLSDPKQKRFFKTKELQDLFSLGGEQGYSTETLNEEVEKHTKKLKDESTKDSDDLDQVTNLDGVSKLESFYDGKEVSESNKEDDERLMEGLLGEKSLENIATHEQMIKSHSVGSSKIVKREAERIANQALEALRISRKETKKYDIGTPTWTGKFGTAGKVNKPNLKKNIKKGTGSASILSNIRKANTQVKKSPTDSDTTNADTNTNKEKLLSIINFLKKQENFEASSRDILNNLGVHINDEEDLIKTRALLKSIGNFSNNKKVWVLKSEFQP

SEQ ID NO: 13537 - protein, 477 aa, Mycobacterium tuberculosis
TEKTPDDVFKLAKDEKVEYVDVRFCDLPGIMQHFTIPASAFDKSVFDDGLAFDGSSIRGFQSIHESDMLLLPDPETARIDPFRAAKTLNINFFVHDPFTLEPYSRDPRNIARKAENYLISTGIADTAYFGAEAEFYIFDSVSFDSRANGSFYEVDAISGWWNTGAATEADGSPNRGYKVRHKGGYFPVAPNDQYVDLRDKMLTNLINSGFILEKGHHEVGSGGQAEINYQFNSLLHAADDMQLYKYIIKNTAWQNGKTVTFMPKPLFGDNGSGMHCHQSLWKDGAPLMYDETGYAGLSDTARHYIGGLLHHAPSLLAFTNPTVNSYKRLVPGYEAPINLVYSQRNRSACVRIPITGSNPKAKRLEFRSPDSSGNPYLAFSAMLMAGLDGIKNKIEPQAPVDKDLYELPPEEAASIPQTPTQLSDVIDRLEADHEYLTEGGVFTNDLIETWISFKRENEIEPVNIRPHPYEFALYYDV

SEQ ID NO: 13538 - protein, 610 aa, Methanosarcina thermophila
MGKILGIDLGTTNSCMAVMEGGEAVVIPNAEGARTTPSVVGFSKKGEKLVGQVAKRQAISNPENTVYSIKRHMGEPNYKVTLQGKHNTPQEISAMILQKLKADAEAYLGEEIKQAVITVPAYFNDAQRQATKDAGTIAGLEVLRIINEPTAASLAYGLDKGEVEQTILVYDLGGGTFDVSILEIGGGVFEVKATSGDTHLGGDDFDQRIVNYLLAEFKKTEGIDLSKDRAVLQRLTDAAEKAKIELSGVASTNINLPFLTVGPDGEPKHLDIDLTRAQFQKMTEDLLEKTLVSMRQALSDAKLTPNDIDKVILIGGATRMPAVVELVENFTGKKPYKNINPDEAVAIGAAIQAGVLGGEVKDILLLDVTPLTLGIETLGGIATPLIPRNTTIPTRKSQIFSTAADNQPSVEIHVLQGERGIASENKTLGRFTLDGIPPAPRGVPQIEVTFDIDANGILHVSAKDLGTGREQSISIQKPGGLTDAEIERMIKDAELHAEEDRKRKEEVETRNNAETLINAAEKTLKEAGDVATEDQKSKVNAAIDDLKKALEGKDAEEIKAKTEALQEAIYPISTAMYQKAAQQAQQAAGGAAGRTDAKGPEETVVDAIMR

SEQ ID NO: 13539 - protein, 115 aa, Salmonella enterica
GMHCHMSLAKNGTNLFSGDKYAGLSEQALYYIGGVIKHAKAINALANPTTNSYKRLVPGYEAPVMLAYSARNRSASIRIPVVASPKARRIEVRFPDPAANPYLCFAALLMAGLDG

SEQ ID NO: 13540 - protein, 614 aa, Sopubia cana; identical to SEQ ID NO: 10168

SEQ ID NO: 13541 - protein, 120 aa, Salmonella enterica
SGMHCHMSLAKNGTNLFSGDKYAGLSEQALYYIGGVIKHAKAINALANPTTNSYKRLVPGYEAPVMLAYSARNRSASIRIPVVASPKARRIEVRFPDPAANPYLCFAALLMAGLDGIKNK

SEQ ID NO: 13542 - protein, 638 aa, Pseudomonas syringae pv. glycinea
MDRIIGIDLGTTNSCVSILENGNVKVIENAEGTRTTPSIIAYANDGEILVGQSAKRQAVTNPHNTLYAVKRLIGRKFEEDVVQKDIQMVPYKIVKADNGDAWVEVNGQKMAPPQISAEILKKMKKTAEDYLGEAVTEAVITVPAYFNDSQRQATKDAGRIASVDVKRIINEPTAAALAYGMDKAKGDHTVIVYDLGGGTFDVSVIEIAEVDGEHQFEVLATNGDTFLGGEDFDIRLIDYFVHEFKKESGMNLKGDPLAMQRLKEAAEKAKIELSSSTQTEVNLPYITADATGPKHLVVKISRSKLESLVEDLVQRTIAPCEMALKDAGIDRSKINDVILVGGQTRMPLVQKLVTEFFGKEARKDVNPDEAVAMGAAIQGAVLAGDVKDVLLLDVSPLTLGIEAMGGVMTALIKKTPRFLPRNPSVLTADDNQENAVAIHVLQGERKQAGQNKSLGKFDLAEIPPAPRGVPQIEVTFDIDANGILHVGAKDKATGKQQSIVIKANSGLSEEEIQQMVRDAEVNSEEDRKFEELASARNQGDALVHSTRKMIADAGDKVTAEQKTAVEAALVALEAAIKGDDKAAIEAKVEELSKVSAPIAQKMYAEQAENPEAAAKPAEENAKADDVVDAEFEEVKDHK

SEQ ID NO: 13543 - protein, 130 aa, Salmonella enterica
MPKPMFGDNGSGMHCHMSLAKNGTNLFSGDKYAGLSEQALYYIGGVIKHAKAINALANPTTNSYKRLVPGYEAPVMLAYSARNRSASIRIPVVASPKARRIEVRFPDPAANPYLCFAALLMAGLDGIKNK

SEQ ID NO: 13544 - protein, 353 aa, Ostreococcus tauri
  misc_feature (8)..(14): Xaa can be any naturally occurring amino acid
  misc_feature (353)..(353): Xaa can be any naturally occurring amino acid
MRALGGLXXXXXXXFTGIGNAHYSYHNVGSEAQIAVFKSFEAAAFLSETFVFAYLGMQVATFKHLWDFGILLTGIPLALLARAVNIFPLSMLANTMRETPIPPNIQIMHAACGLRGAVAYALAVNMPSTREGDRGSRAIETGTLMICLVTTLVFGSMTLPLMKRLDLHDPNDREGMLSQAMSSTAQDGLGFIIPSPRARAVRARAIAEGHPVWYIALAFRIKARLFEWWEDFETNVMKPTFGGAPSHSTDATWQPVSTGDGARSSGEHTREEFRDVELTPVNEEGKEADTLRPDGPKSDEPGCERLELTAVRDEHFSARLAALRADGFDLLHDIHALDNRAKDAVLAVQPRGX

SEQ ID NO: 13545 - protein, 285 aa, Vitis vinifera
MATDEGNHQMMSTDSGLEDLWQEFDLAVKSSKDIAVDPEEDQKEGGEECEHSFVLKDDIGSVCHICGLVDKSIESIIEYKYPKVKRSKSHIHEHCYTKDGKPTDDHSDGLRFSENDSSVTVIHAHPRHGRQMKPHQVEGFNFLVSNLVADDPGGCILANAPGSGKTFMIISFMQSFLTKHPEVRSLVVLPKSILATWKKEFLTWQVEDIPLYDFYSVKADRPSQQLDVLKQWVVEKSILFLGHTQFTAIVSGDGASEAELTCQEVLLKTRRFLFWMKITLQGPSK

SEQ ID NO: 13546 - protein, 292 aa, Ostreococcus tauri
MAPSGSPAAEAGGAYSALVPTLLIMACVVVSYLIQRYNVRAVQPSGAALIIGVLAGTLARASTERDADVEVFQFSPQAFFYGLLPIIIYSAGLNLKRRDFFADFFTIALFAFVGTVISSFVFGLFTFLFVEIGVISRHHLGSNPLLECLLYGTLISSTDPVATLSIFADVSAPPLLYNLVFGESVLNDAVAVVLFRTLAAHRAVHHGLHRFIAHRHLNRTRHRTIAQNSAPPRCRHRCRHRCRHRCRVTTRHDAPRRRDVVFGGSHSARDDGPRRRTATRRRRRESGRRERR

SEQ ID NO: 13547 - protein, 744 aa, Cryptococcus neoformans var. neoformans JEC21
MKWRVRRVPPMPRWHQAVLAGSNVSGCRGDADGQPAPRQLLSTRIYSLLFLSFFHLCLFLKIFATMAYPSRITRPKRQSGMSSLMSKLTLFAFVLVAVLCFLPVGSQVRAEEKDVDVGTVIGIDLGTTYSCVAIQRGGKVEIIANDQGNRITPSWVAFTEEERLIGDAAKNQASNNPENTVFDAKRLIGRYFDDPDVTRDRKHWPFKIVNKDGKPMIQVNHRGDLRDFTPEEVSAMVLTKMKETAEAYLGHKVTHAVVTVPAYFNDAQRSATKDAGTIAGLTVLRIVNEPTAAAIAYGLDRSGKQESQIIVYDLGGGTFDVSLLSIEDGVFEVLATAGDTHLGGEDFDNRVIDYLVKQYKKKTDIDVSKNNRAMGKLKREVEKAKRTLSSQMSTKIEIEAFEGGNDFSETLTRAKFEELNMDLFRKTMKPVEQVLKDAGVKKDEIDDVVLVGGSTRIPKIQQLLKEYFNGKEPSKGINPDEAVAYGAAVQGGILSGEAGSSDVLLIDVCPLTLGIETTGGVMTKLIPRNSVVPTKKSQIFSTAADNQPTVRIQVYEGERSMTKDNNLLGEFDLNNIPPAPRGVPQIEVTFEIDANGILRVSAVDKGTGKSESITITNDQRRLSPEEIERMVQEAEEFADEDAAVKRKIEAMNNLQNFIFSLKSQIGDAEGLGGKLSEDDKDTILSAIKEKTEWLDEHPQSDAEDYEEQLSELQATVAPITSNLYGGAGGSSYDDEQMPFSHDEL

SEQ ID NO: 13548 - protein, 471 aa, Striga asiatica; identical to SEQ ID NO: 10172

SEQ ID NO: 13549 - protein, 798 aa, Cryptococcus neoformans var. neoformans JEC21
MKWRVRRVPPMPRWHQAVLAGSNVSGCRGDADGQPAPRQLLSTRIYSLLFLSFFHLCLFLKIFATMAYPSRITRPKRQSGMSSLMSKLTLFAFVLVAVLCFLPVGSQVRAEEKDVDVGTVIGIDLGTTYSCVAIQRGGKVEIIANDQGNRITPSWVAFTEEERLIGDAAKNQASNNPENTVFDAKRLIGRYFDDPDVTRDRKHWPFKIVNKDGKPMIQVNHRGDLRDFTPEEVSAMVLTKMKETAEAYLGHKVTHAVVTVPAYFNDAQRSATKDAGTIAGLTVLRIVNEPTAAAIAYGLDRSGKQESQIIVYDLGGGTFDVSLLSIEDGVFEVLATAGDTHLGGEDFDNRVIDYLVKQYKKKTDIDVSKNNRAMGKLKREVEKAKRTLSSQMSTKIEIEAFEGGNDFSETLTRAKFEELNMDLFRKTMKPVEQVLKDAGVKKDEIDDVVLVGGSTRIPKIQQLLKEYFNGKEPSKGINPDEAVAYGAAVQGGILSGEAGSSDVLLIDVCPLTLGIETTGGVMTKLIPRNSVVPTKKSQIFSTAADNQPTVRIQVYEGERSMTKDNNLLGEFDLNNIPPAPRGVPQIEVTFEIDANGILRVSAVDKGTGKSESITITNDQRRLSPEEIERMVQEAEEFADEDAAVKRKIEAMNNLQNFIFSLKSQIGDAEGLGGKLSEDDKDTILSAIKEKTEWLDEHPQSDAEDYEEQLSELQATVAVSLILLLDIFFVADHRFSLSLPICMVVPVVHPTMTSRCLSAMTSFKAGVEINKSKIAWHWRLPVIVDDASSQIQYGIVLTL

SEQ ID NO: 13550 - protein, 173 aa, Zea mays
  misc_feature (62)..(62): Xaa can be any naturally occurring amino acid
  misc_feature (74)..(74): Xaa can be any naturally occurring amino acid
  misc_feature (80)..(81): Xaa can be any naturally occurring amino acid
MAYSMLSSAAVVTSPAQATMVAPFTGLKSSSAFPVTRKANNDITSIVSNGGRVSCMKVWPPXGKRKFETLSYLXPDLTEXXNWVRKVDYLSPATGGFLGGESRVGATGFGYRGSTGKHPPETTKGRYWEKGETFPLGRKGPHLWLKGVKEAPKGEKGEPPNRLSTGILGFQNT

SEQ ID NO: 13551 - protein, 623 aa, Campylobacter coli RM2228
MSKVIGIDLGTTNSCVAVYERGESKVIPNKEGKNTTPSVVAFTDKGEVLVGDSAKRQAVTNPEKTIYSIKRIMGLMINEDAAKEAKNRLPYHITERNGACAIEIAGKIYTPQEISAKVLMKLKEDAEAFLGESVTDAVITVPAYFNDAQRKATKEAGTIAGLNVLRIINEPTSAALAYGLDKKDSEKIVVYDLGGGTFDVTVLETGDNVVEVLATGGNAFLGGDDFDNKLIDFLASEFKDETGIDLKNDVMALQRLKEAAENAKKELSSANETEINLPFITADASGPKHLVKKLTRAKFEGMIDSLVAETITKINEVVKDAGLDKNEIKEIVMVGGSTRVPLVQEEVKKAFGKELNKSVNPDEVVAIGAAIQGAVIKGDVKDVLLLDVTPLSLGIETLGGVMTKIIEKGTTIPTKKEQVFSTAEDNQSAVTINVLQGEREFSRDNKSLGNFNLEGIPPAPRGMPQIEVTFDIDANGILTVSAKDKATGKAQEIKITGSSGLSEEEINNMVKDAELHKEEDKKRKEAVDARNAADSLAHQVEKSLNELGEKVADSDKENIQKALDDLRETLKNQNASKEEIEAKMKALSEVSHKLAENMYKKDEPNAANDKKKKDDDVIDAEVE

SEQ ID NO: 13552 - protein, 520 aa, Xanthomonas axonopodis pv. citri str. 306
MGLATLDIVIVLVYLAGIFVLAQWVSREKAGHSKSAEDYFLASKSLPWWAIGASLIAANISAEQIIGMAGSGYAIGLAIASYEWMAALTLLIVGKFFLPIFLRNGIYTMPQFLEQRYGTWIRTLMAVFWLLLYVFVNLTSILWLGSIAVSQVTGMDQTLALALIGVFALVYQLYGGLKAVALTDIVQVTLLVLGGLLVAGLTLARIGDGAGVLAGFQHLWTAHPDHFHMILTRDNPFYKDLPGLSVLLGGLWVMNISYWGFNQYIIQRALAAKNIGEAQKGMVFAAFLKLLMPLVIVVPGIAAVVLAPDLAKPDQAYPTMMQLLPTGILGLVFAALVAAIVASLASKINSVATIFTLDFYAKFRPQTEQKQLVRVGRLVAAASVLIGILTARPLLGNFDQGFQFIQEFTGFFTPGVVVIFMLGLFWKRANEAGALTAAIGSVVLSFALKFAWPELPFMDRIGVVFVAALVLAVVVSLLTPATQARDLIRTNDVAYGTTLGFKIGAAGVIAILIVLYTVFW

SEQ ID NO: 13553 - protein, 568 aa, Colwellia psychrerythraea 34H
MAQNTLPQKKSHLLDDILLILTMAVLAGCGLIYEYLLSHYAGRVLGVMESTIYTMIGLMIVSMGLGAFAARKVRCAFNGFVWLELIIALLGSSAILIIGGLIAITQIFPQLIADMLSLPPDMKPQGGLFKDLSWLAFNSPYFFGVLLGFFIGMEIPLIARIRESIHQQHLANNLGTIYGADYVGAGIGAAIWVVFLLSLDISKAAALTASLNLIAGAFFILRYWQHLNWRKTFVALHCALALIIVLMFSYGNQWLNQMNSLLYLDKVVHTDKTRYQQLTFTERHMGLEQDNIINFYLNGRLQFSSIDEHIYHDYLVAPVMAGSARHDKILIIGGGDGLALRDVLKYNPKHVTLIDLDSELIDIFKQPKKQVNPRLASQILQLNKNSLQDERVTIYRADAFIAINQLLEDRQTFDAIIVDLPDPSHPDLNKLYSVNFYARLKLLLSGDGLIAIQSTSPYHAKDSFIAIGNTLAAAKFSHVEQYHDNVPSFGEWGWTIASKSGASPLTRLNKLTKLPVAHQWLNLAILKAAFIFPNDFYQNKDNIGINILGSHTIYQLHQSAWQDQQGLN

SEQ ID NO: 13554 - protein, 170 aa, Helicobacter pylori
GSGMHTHVSVWKNKENLFSGETYKGLSGLALHFLGGVLRHARGLAAFTNASTNSYKRLIPGYEAPSILTYSANNRSASVRIPYGISKNSARFEFRFPDSSSNPYLAFAAILMAGMDGVKNKMDPGEAMDINLFKLTLDEIREKGIKQMPHTLRRSLEEMLADKQYLKEGQ

SEQ ID NO: 13555 - protein, 448 aa, Chromobacterium violaceum ATCC 12472
MSEARMPAGRAEWLQHSKVRDVELAFADVHGFPRGKTLPAAAFIQGQPLRIARAVPLQSCVGEFPDYSFYGEHDPDVTLAPDYDTLRPMPWAKTPRAMVICDCVDHDGGLSPLAPRSVLKQVLARYRAHGWAPVVAPELEFYLFAAHGDPAQPFQPPQLASGRREAGFDAFGFSALGELEAFFDELYQACETLEIATDTCVHEMGPSQFEINLKHGDALKLADDTFLFKTALKEIAHRHGLSAVCMAKPLPGQPGSSMHIHQSVVDRQGRNAFSRADGSESPEFFGFIAGLQRFLPELMPMFCPNPNSYRRFVKGMAAPVNLSWGLDNRSVGLRVPVSGPEARRVENRLPGCDANPYLALAASLGAGLAGIEGKLVPDEAVHGNVFKQQAASLPTTLDAACAAMAAGCAEELFGADFSRAYLAVKEVELNDYHRQVTAWERQYLGFLV

SEQ ID NO: 13556 - protein, 549 aa, Helianthus tuberosus
MVFDMGLMFEKMGSSTLATSEYSSVVSMNLFVALLCGCIVLGHLLEENRWMNESITALLIGLCTGVVILLISGGTSSHLLVFSEDLFFIYLLPPIIFNAGFQVKKKQFFRNFMTIVLFGAVGTMISFTIISFAAIKIFKKMNIGELELGDYLAIGAIFSATDSVCTLQVLNQDQTPLLYSLVFGEGVVNDATSVVIFNAVQNFDLSRITTAIAFQLLGNFFYLFITSTLLGAGAGLLSAYIIKKLYFGRHSTDREVAIMILMAYLSYMLAELFSLSGILTVFFCGIVMSHYTWHNVTEKSRVTTKHAFATFSFIAELFIFLYVGMDALDIEKWSFVKDSPGTSAEVSAILLGLVLVGRAAFVFPLSFLSNLTKKAQHEKIDFRQQVLIWWAGLMRGAVSMALAYNQFTKEGHTTMPGNAIMITSTITVVLFSTMVFGLITQPLVRLLLPAPKNLNRMISSEPSSPKSFIVPLLGNGQDSIDNMPRPSSLRMLLATPSHTVHYYWRKFDNAFMRPVFGGRGFVPFIPGSPTEQSLHQSAHHLVDEETTGN

SEQ ID NO: 13557 - protein, 396 aa, Danthonia spicata; identical to SEQ ID NO: 10193
  misc_feature (124)..(124): Xaa can be any naturally occurring amino acid
  misc_feature (181)..(181): Xaa can be any naturally occurring amino acid
  misc_feature (354)..(354): Xaa can be any naturally occurring amino acid

SEQ ID NO: 13558 - protein, 234 aa, Aristolochia micrantha; identical to SEQ ID NO: 10194

SEQ ID NO: 13559 - protein, 170 aa, Helicobacter pylori
GSGMHTHVSVWKNNENLFSGETYKGLSEFALHFLGGVLRHARGLAAFTNASTNSYKRLIPGYEAPSILTYSANNRSASVRIPYGISKNSARFEFRFPDSSSNPYLAFAAILMAGMDGVKNKMDPGEAMDINLFKLTLDEIREKGIKQMPHTLRRSLEEMLADKQYLKESQ

SEQ ID NO: 13560 - protein, 234 aa, Aristolochia tomentosa; identical to SEQ ID NO: 10197

SEQ ID NO: 13561 - protein, 170 aa, Helicobacter pylori
GSGMHTHVSVWKNNENLFSGETYKGLSGLALHFLGGVLHHARGLAAFTNASTNSYKRLIPGYEAPSILTYSANNRSASVRIPYGISKNSARFEFRFPDSSSNPYLAFGAILMAGIDGVKNKIDPGEAMDINLFKLTLDEIREKGIKQMPHTLRRSLEEMLADKQYLKEGQ

SEQ ID NO: 13562 - protein, 448 aa, Streptococcus agalactiae 2603V/R
MTITAEDIRREVKEKNVTFLRLMFTDILGVMKNVEIPATDEQLDKVLSNKAMFDGSSIEGFVRINESDMYLYPDLDTWIVFPWGDENGAVAGLICDIYTAEGEPFAGDPRGNLKRNMKRMQEMGYKSFNLGPEPEFFLFKMDENGNPTLDVNDKGGYFDLAPTDLADNTRREIVNVLTQMGFEVEASHHEVAVGQHEIDFKYDDVLKACDNIQLFKLVVKTIARKHGLYATFMAKPKFGINGSGMHCNMSLFDNEGNNAFFDPEDPRGMQLSEDAYYFLGGLMKHAYNYTAIINPTVNSYKRLVPGYEAPVYVAWAGRNRSPLIRVPASRGMGTRLELRSVDPTANPYLALSVLLGSGLEGIENKIEAPEPIETNIYAMTVEERRQAGIVDLPSTLHNALEALEEDEVVKAALGTHIYTNFLDAKRIEWASYATYVSQWEIDNYLDLY

SEQ ID NO: 13563 - protein, 232 aa, Aristolochia tomentosa; identical to SEQ ID NO: 10199

SEQ ID NO: 13564 - protein, 170 aa, Helicobacter pylori
GSGMHTHVSVWKNNENLFSGETYKGLSEFALHFLGGVLCHARGLAAFTNASTNSYKRLIPGYEAPSILTYSANNRSASVRIPYGISKNSARFEFRFPDSSSNPYLAFAAILMAGMDGVKNKMDPGEAMDINLFKLTLDEIREKGIKQMPHTLRRSLEEMLADKQYLKEGQ

SEQ ID NO: 13565 - protein, 1054 aa, Gloeobacter violaceus PCC 7421
MHILHGTWIPDQSDCYVAPGAFYLWVETPPHKSRTADAANVHPAHLKKQALQQFLINTLGIAPNPQSGIVACYFLLPTADDRPLPSLESARHQQIELPESSALQYWQVDCLRLPLVPQAVGSPGLIRLLHDLHFQLQEQRSEVQFGSDLLFWHHFCQFLKVQIFKDRYIPALRYRELPRGRGKSKTAPDELYPGWELVCEHYAAAVAQYAEGMPTVCASGRADRPQVAACFAKQDLLHHFGENLLHAAVGAIPVTAALGQQIHNSLVQSCLTPRIQPWSAAVPGALEDYRHWRRWRERLSAARVAAPFVLCLQLLEPEEADEDGDEAVLWQLRFAVASRSDPSWRLSLLEYWQAKAEERESWRNHLGEAFERHLLAALGYAARIYPALWEGLHTSHPVGLDLEVEEAFAFLQDAAWVLEEAGFRVLVPAWWTPEGRRRAQVRLRARAGRSATGPDGAGRGHFSLAALVEYSYALAIGAQEVTESEWQALVALKTPLVRFRGQWLVLEAERMEKLLTFWREHRQERPAMPLLEWLKLTASQPDLDIECDAPLQTLLTRLHDPSRLVPLGDPPGLLGTLRPYQRRGVSWLSYLEQVGLNGCLADDMGLGKSLQVIARLLYEREEQAGEGPTLIVAPTSVIGNWRKEIEKFAPGLRVWMHYGTGRHQQADSLCQVCLEHDVVLTSYTLARKDEKLLAAVPWRRLVIDEAQNIKNPKAAQTRALLKIPAACRLALTGTPVENRLLDLWSIFHFLNPGYLGSEAQFRKRFELPIHKEDDRSRTAVLKRLVEPLILRRVKTDPAIIQDLPDKVEQKLFCQLTREQASLYAAVLKEVEAQIEQVEGIARKGLILATLTRLKQICNHPMQFLQDGSAFSPERSHKLCRLDEMAEEVLAEGESLLVFTQFHEIGAALERHFRQVRRWGTYYIHGGVSREKREKLIADFQDPDSEPAVFILSLKAGGVGITLTRANHVFHFDRWWNPAVEDQATDRAFRIGQTKNVFVHKFVALGTLEERIDRMLEEKKRLASAIVGSDEGWLTELDNERFKALIALGESALIE

SEQ ID NO: 13566 - protein, 573 aa, Alteromonadales bacterium TW-7
MSSTTQSPSKSRLLGHDILLITVMAVLAGCGLIYEYLLSHYAGRVLGSVESAIYAMIGTMIVAMGLGAFLARWFKDAFTAFAWLESIIALIGMGCILAIASVIAVSYSLPHLFSSIFNLPPDVVLNGYVFQKLQEWSRFLPYVFGLVLGLFIGMEIPLIARIRQHVYGRFLENNAGTIYGADYIGAGIGAAIWVSIMLAMPIMQAAAWTALFNIIAGLAFLWRYHAHVRFAKALLVCHILLLVLFGFILVLGSSWMNSLSNVLYKDKVIYSQATKYQHVVLTERLSKNQPQPITDLYLNGRLQFSSVDEQIYHSMLVYPAMLASNRHDKVLIIGGGDGLALRDVLKWSVNEVTLIDLDGQLLNLFGHEDDKFTPPKAITQRLINLNNDSMKDPKANIIVGDAFLEVEKLLDQNKQFDTVIIDLPDPNHPDLNKLYSDYFYNHVRQLLAPDGAMAVQSTSPYHAKKAFLSIAKTVKAAGFDYVEQYQQNIPSFGQWGWTIATKMGQPASARISNIGEMPVSSRWISKKYLLASFVFPNQYFEQINDIEVNRLGSGQLYDYYRSAWQIESELYKN

SEQ ID NO: 13567 - protein, 121 aa, Salmonella enterica
KNGTNLFSGDKYAGLSEQALYYIGGVIKHAKAINALANPTTNSYKRLVPGYEAPVMLAYSARNRSASIRIPVVASPKARRIEVRFPDPAANPYLCFAALLMAGLDGIKNKIHPGEAMDKNL

SEQ ID NO: 13568 - protein, 231 aa, Arabidopsis thaliana
MGETATDSEHRMMIGLSDPMKIDPKRDRFPCCIVWTPLPFISWLVPFIGHVGICREDGVILDFAGPNFVCVDNFAFGAVSRYIQINKEMESSRSSSSGMFNGERRYEQEEDSHEKEPTWDDALRKSTQEYQHHSYNILTCNCHSFVANNLNRLSIKSGGWNVVNLATLVLFKGRWVNKTAIVKSLLPPLIVYTIGILLGGWTFIASCSILVVLLTGWFIIGTYCFKKLIQL

SEQ ID NO: 13569 - protein, 495 aa, Rhodopirellula baltica SH 1
MGAIVIPWRRSRSSPQSDSAMLPRNLTLLLSVLVISFACYAIYLRTRSAMMVGEAIEMIDRYYVEPVDRRELLTSAMAGMTSTLDQHSEYIPPVSYQAFQDTIQQEFAGIGIYVDQPVEGEPVRVITPLVGSPALRAGLMPGDAILEVDGEYVGDMDIRSVSERLRGPIATTVQLLVERGEEKLEVKVQRDTIQLESVIGDYRNGGNEWVYRLKQHPDIVYVRMTSFGDKTVSELRSVLSRLMPKPDVSGFVLDLRGNGGGLLTAAVDVCDMFLSSGRIVSTKTRGGVVEDEVSATAGTLVPPDMPVAILIDEHSASASEIVAAALQDHGRATIVGTRSYGKGTVQNILPLEYGRSALRLTVAKYYRPSDQNIHRGVDDTEEDVWGVSPDPGMDVKIAEDDIRQLARFWEEASYPSLKNRDLKDAHLKLADPDEEVDSDAAPDASSNEASNSTEEDAVVTERSPAESAWELDTPLRTAVEAIRSAKSSKQISAAA

SEQ ID NO: 13570 - protein, 491 aa, Striga gesnerioides; identical to SEQ ID NO: 10205

SEQ ID NO: 13571 - protein, 158 aa, Arabidopsis thaliana
MGEIGFTEKQEALVKESWEILKQDIPKYSLHFFSQILEIAPAAKGLFSFLRDSDEVPHNNPKLKAHAVKVFKMTCETAIQLREEGKVVVADTTLQYLGSIHLKSGVIDPHFEVVKEALLRTLKEGLGEKYNEEVEGAWSQAYDHLALAIKTEMKQEES

SEQ ID NO: 13572 - protein, 469 aa, Photobacterium sp. SKA34
MSVENVLALIQENEVKFIDLRFTDTKGKEQHISIPSHQIDADFFEEGKMFDGSSVAGWKGINESDMVMMPDASSAVLDPFTEDATLNIRCDILEPATMQGYDRDPRSIAKRAEEFMRSTGIADTVLIGPEPEFFLFDDVKFNTDMSGSFFKIDDVEAAWNTGSDFEGGNKGHRPGVKGGYFPVAPVDSSQDIRSAMCLIMEEMGLVVEAHHHEVATAGQNEIATRFNTLTTKADEIQIYKYVVHNVAHAFGKTATFMPKPLVGDNGSGMHVHQSLAKDGVNLFSGDKYGGLSEMALYYIGGIIKHARAINAFANPATNSYKRLVPGFEAPVMLAYSARNRSASIRIPVVPSPKARRIEVRFGDPAANPYLAFAAMLMAGLDGIQNKIHPGEAMDKDLYDLPAEEAAEIPTVAESLQGALQALSDDREFLTSGGVFSDDFIDSYIALKSQDVEKVNMTTHPLEFELYYSV

SEQ ID NO: 13573 - protein, 193 aa, Xanthomonas campestris
QHITFPANIIEPALFEEGKMFDGSSIAGWKGINESDMVLLPDAGTAYLDPFFADPTIVLTCDILDPATMQSYERDPRGIAKRAEAYLKSSGTADQAFFGPEPEFFIFDSVRFANDMGHTFFQVGSEEAAWNTGAKYDGGNSGYRPGVKGGYFPVPPTDTLHDLRAEMIKTLEQVGIETEVHHHEVATAGQCEI

SEQ ID NO: 13574 - protein, 421 aa, Acidobacteria bacterium Ellin345
MSGLQRSLCPPKQPMSKITKFVLLSSSLLVVLFVVYGSLGVRADSKNDGAYRQLGVYSEVLSRIRTEYVVDPDMNLVTDGALHGLLESLDANSSYLSPTEYKQYQQRKSEGKAGIGAAISKRYGYAAVVSVIPGGPADKAQVESGDIIEAIEGKTTREMSLAEIDGILAGQPGSVINLSIVRPRKAQPQKTPITREVVTTPPVAEKLMEDSIGYIKVITFTKGRTQQVAEQVKAAQKQGAKKLILDLRNCGAGEEQEGVATANLFLNHGMIAYLQGQKFAKQTFTAEASKAITNLPLVVLVNKGTAGPAEIVAASVLENARGDVLGDKTFGDGAVQQLFPMSDGSALMLSIAKYYSPSGKAIQDTAVTPNILVADNDDYASPDDGDDTTDNANQPETRQKDQTDEQLRRAVEVLKNKDQHS

SEQ ID NO: 13575 - protein, 520 aa, Xanthomonas campestris pv. vesicatoria str. 85-10
MGLATLDIVIVLVYLTGIFVLAQWVSREKAGHSKSAEDYFLASKSLPWWAIGASLIAANISAEQIIGMAGSGYAIGLAIASYEWMAALTLLIVGKFFLPIFLRNGIYTMPQFLEQRYGKWIRTLMAVFWLLLYVFVNLTSILWLGSIAVSQVTGMDQTLALALIGVFALVYQLYGGLKAVALTDIVQVTLLVLGGLLVAGLTLARIGDGAGVLAGFQHLWSAHPEHFHMILTKDNPFYKDLPGLSVLLGGLWVMNISYWGFNQYIIQRALAAKNIGEAQKGMVFAAFLKLLMPLVIVVPGIAAVVLAPDLAKPDQAYPTMMQLLPTGILGLVFAALVAAIVASLASKINSVATIFTLDFYAKFRPQTGQKQLVRVGRIVAALSVLIGILTARPLLGNFDQGFQFIQEFTGFFTPGVVVIFMLGLFWKRANEAGALTAAIGSVVLSFALKFAWPELPFMDRIGVVFVAALVLAVVVSLLTPATQARDLIRTNDVAYGTTPGFKIGAAGVIAILIVLYTVFW

SEQ ID NO: 13576 - protein, 392 aa, Janusia mediterranea; identical to SEQ ID NO: 10216

SEQ ID NO: 13577 - protein, 392 aa, Janusia linearis; identical to SEQ ID NO: 10218

SEQ ID NO: 13578 - protein, 166 aa, Bordetella bronchiseptica RB50
MNTMYDFSAPTITGAERALADFRGQVALVVNVASRCGFTPQYSGLEELYRSYRNEGFVVLGFPCNQFGRQEPDDEAAIAQFCETQYAISFPLFAKIDVNGAHAHPLYRWLKARKPGLLGTRAIKWNFTKFLVGRDGLPLRRYAPAHTPESLRHDIARACAAPGPTP

SEQ ID NO: 13579 - protein, 1123 aa, Physcomitrella patens subsp. patens; identical to SEQ ID NO: 10219

SEQ ID NO: 13580 - protein, 764 aa, Arabidopsis thaliana
MVSLRSRKVIPASEMVSDGKTEKDASGDSPTSVLNEEENCEEKSVTVVEEEILLAKNGDSSLISEAMAQEEEQLLKLREDEEKANNAGSAVAPNLNETQFTKLDELLTQTQLYSEFLLEKMEDITINGIESESQKAEPEKTGRGRKRKAASQYNNTKAKRAVAAMISRSKEDGETINSDLTEEETVIKLQNELCPLLTGGQLKSYQLKGVKWLISLWQNGLNGILADQMGLGKTIQTIGFLSHLKGNGLDGPYLVIAPLSTLSNWFNEIARFTPSINAIIYHGDKNQRDELRRKHMPKTVGPKFPIVITSYEVAMNDAKRILRHYPWKYVVIDEGHRLKNHKCKLLRELKHLKMDNKLLLTGTPLQNNLSELWSLLNFILPDIFTSHDEFESWFDFSEKNKNEATKEEEEKRRAQVVSKLHGILRPFILRRMKCDVELSLPRKKEIIMYATMTDHQKKFQEHLVNNTLEAHLGENAIRGQGWKGKLNNLVIQLRKNCNHPDLLQGQIDGSYLYPPVEEIVGQCGKFRLLERLLVRLFANNHKVLIFSQWTKLLDIMDYYFSEKGFEVCRIDGSVKLDERRRQIKDFSDEKSSCSIFLLSTRAGGLGINLTAADTCILYDSDWNPQMDLQAMDRCHRIGQTKPVHVYRLSTAQSIETRVLKRAYSKLKLEHVVIGQGQFHQERAKSSTPLEEEDILALLKEDETAEDKLIQTDISDADLDRLLDRSDLTITAPGETQAAEAFPVKGPGWEVVLPSSGGMLSSLNS

SEQ ID NO: 13581 - protein, 392 aa, Janusia californica; identical to SEQ ID NO: 10221

SEQ ID NO: 13582 - protein, 175 aa, Brassica napus; identical to SEQ ID NO: 976

SEQ ID NO: 13583 - protein, 392 aa, Gaudichaudia mcvaughii; identical to SEQ ID NO: 10224

SEQ ID NO: 13584 - protein, 170 aa, Helicobacter pylori
GSGMHTHVSVWENNENLFSGETYKGLSELALHFLGGVLRHARGLAAFTNASTNSYKRLIPGYEAPSILTYSANNRSASVRIPYGISKNSARFEFRFPDSSSNPYLAFAAILMAGMDGVKNKMDPGEAMDINLFKLTLDEIREKGIKQMPHTLRRSLEEMLADKQYLKEGQ

SEQ ID NO: 13585 - protein, 238 aa, Oryza sativa
MEESRADGRNPNQLRPFSCTRNPLDRAHGSARWAQGDTIVLAAVYGPKPGTRKGENPEKASIEVVWKPMTGQIGKQEKEYEMTLKRTLQSICLLTVHPNTTTSVILQVVGNDGSLLPCAINACCAALVFAGIPLKHLAVAIGCGVLEDGEVILDTNKAEEQQLKSFAHLVFPNSRKSASSKEPNQKEEDSERGLITSITHGVMSEEDYFSCIERGLAASSRISDFMRTTLQKQAPGDV

SEQ ID NO: 13586 - protein, 392 aa, Aspicarpa hirtella; identical to SEQ ID NO: 10227

SEQ ID NO: 13587 - protein, 574 aa, Chlorobium tepidum TLS
MSWFTTQRHSGLCRDFGRRWRRVATISSAIALICAQPLFAVPAAKPNEDFFSIAKSIELLGDVYKNVAQNYVDPVNVSEFMYSGIDGMLGQLDPYTAFLDEEQSGELDEITSGQYAGIGVTLGIFSGDLFIISVIDGQPAAKAGLKVGDQIIAIDGVKVSKKSIDEVRSTIKGSPGTNIRLSIKRDGQGPLTVISLTRGEVRISSVPFFGLFGSSGYVQMNSFSEHSREELSAAIRKIRQEAAKNRVVLNGIVLDLRGNPGGLLTSAVEVAGLFVEKNSRIVSTRGRAADSEQVYVTKTEPQEPTLPLVVMIDGDSASASEIVSGAIQELDRGVILGENSFGKGLVQSIINLPYDHILKMTTAKYYTPSGRLIQKPIARDESRRKVVLSNGDADSTKVFYTRNRRKVYGGGGIRPDVVAKADSLSEYQHKIENSGLLFRYASRFHRKHPEFRLQQLSSEPLYDDFNRFLEKEHFSFRSGAQKTLDSLKTLVQKEAGADKALAGQLDALDKALAASTRRNISRDSLHITAALQREIMRHYDERAALKRAIEDDPVAAKAFALLGDQKRYRSLLKP

SEQ ID NO: 13588 - protein, 170 aa, Helicobacter pylori
GSGMHTHVSVWKNNENLFSGETYKGLSELALHFLGGVLHHARGLAAFTNASTNSYKRLIPGYEAPSILTYSANNRSASVRIPYGISKNSTRFEFRFPDSSSNPYLAFAAILMAGMDGVKNKIDPGEAMDINLFKLTLDEIREKGIKQMPHTLRRSLEEMLADKQYLKEGQ

SEQ ID NO: 13589 - protein, 453 aa, Oceanicola granulosus HTCC2516
MKKFAMASVAGILGGVIATTQIAGPLLAQESRSASVYEQLDLFGDIFERIRAQYVEEVDEAELIEAAIDGMLTSLDPHSSYLSAEDAADMRVQTRGEFGGLGIEVTQEEGFVKVVSPMDGTPADAAGILAGDFITAVDGESILGLTLDEAVDLMRGPVGSEIIVTVVREDTAEPFDVSIIRDTIRLTAVRARTEGETVVLRVTTFNDQTYPNLTDGLEEQIEAAGGIDNVNGIVLDLRNNPGGLLDQAIRVTDAFLEAGEIVSTRGRDIDGERFNARPGDLASGLPIVVLINGGSASASEIVAGALQDHRRAIVVGTQSFGKGSVQTVMPLRGDAAMRLTTARYYTPSGRSIQALGISPDIIVEQPRPPVATEDEEEDDATPPRFRTEADLRGALSNDSLSDEELEQLESERLRAEAAAALREDDYQLAYAIDILKGLSALGPNAITLGQAAQ

SEQ ID NO: 13590 - protein, 170 aa, Helicobacter pylori
GSGMHTHVSVWKNNENLFSGETYKGLSGLALHFLGGVLRHARGLAAFTNASTNSYKRLIPGYEAPSILTYSANNRSASVRIPYGISKNSARFEFRFPDSSSNPYLAFAAILMAGMDGVKNKMDPGEAMDINLFKLTLDEIREKGIKQMPHTLRRSLEEMLADKQYLKEGH

SEQ ID NO: 13591 - protein, 235 aa, Aristolochia zollingeriana; identical to SEQ ID NO: 10232

SEQ ID NO: 13592 - protein, 170 aa, Helicobacter pylori
GSGMHTHVSIWKNNENLFGGETYKGLSEFALHFLGGVLRHARGLAAFTNASTNSYKRLIPGYEAPSILTYSASNRSASVRIPYGISKNSARFEFRFPDSSSNPYLAFGAILMAGIDGIKNKMDPGEAMDINLFKLTLDEIREKGIKQMPHTLRRSLEEMLADKQYLKEGQ

SEQ ID NO: 13593 - protein, 88 aa, Salmonella enterica
LAKNGTNLFSGDKYAGLSEQALYYIGGVIKHAKAINALANPTTNSYKRLVPGYEAPVMLAYSARNRSASIRIPVVASPKARRIEVRFP

SEQ ID NO: 13594 - protein, 666 aa, Vibrio vulnificus CMCP6
MKCRSKVTLIAASLWLAASAQALEAKLSEKDLPLLAPEVQHETASKRVTSRFTRSHYKHFNFNDDFSRAMFNRYIEMLDYNKNIFTQADIDSFEKWSTELDDQLKEGNNQIAFDVYNLSMKKRFERFSYALKLLDQEITFDTDDEIELDRTDAAWPKDQTELNELWRQRVKYDALNLKLTGKDWPEIKEILEKRYNNAMKRITQTRNEDVFQLYMNAFAREVDPHTSYLSPRNAEQFQSEMNLSLEGIGAVLQMTDDYTVIRSLVAGGPASKSKQLGEGDRIIGVGQDKKDIVDVIGWRLDDVVQLIKGPKGTKVHLQVLPEGKDSKSYVVTIVRDKIRLEDRAVKAEVIEKDGKKIGVLEVPSFYVGLSADTDKLLTDLKGKGVDGIIVDLRNNGGGALTEATALTGLFIEKGPVVQVRDSYGRVKVNADTDGQISYSGPMTVLVNRYSASASEIFAAALQDYGRAIILGENSFGKGTVQQHRSLNHIYDLFDKEIGYVQYTIQKFYRIDGGSTQNKGVVPDIPFPTAIDPEETGESVEDNALPWDSIEKADYQVLQRNDSLIEQLRVKHDERIANELEFKFIAEDIAKYKAEKDDNTLSLNEKVRKQESEQADKQRLDRINQRQALAGKEAFKTLDDVPKDYETPDAYLDESVAIMVDMLKKPS

SEQ ID NO: 13595 - protein, 278 aa, Zea mays; identical to SEQ ID NO: 11644

SEQ ID NO: 13596 - protein, 118 aa, Salmonella enterica
MSLAKNGTNLFSGDKYAGLSEQALYYIGGVIKHAKAINALANPTTNSYKRLVPGYEAPVMLAYSARNRSASIRIPVVASPKARRIEVRFPDPAANPYLCFAALLMAGLDGIKNKIHPG

SEQ ID NO: 13597 - protein, 607 aa, Strobilanthes attenuata; identical to SEQ ID NO: 10234

SEQ ID NO: 13598 - protein, 471 aa, Herbaspirillum seropedicae
MARTAAEVLKMVKDNEVKFVDFRFADTRGKEQHVSVPVSHFDIDKFESGHAFDGSSIAGWKGIEASDMLLIPDPNTANIDPFMEETTLFMQCDVIEPSDGKGYDRDPRSIAKRAEAYLKSSGLGDTAYFGPEPEFFIFDGVRWGADMSGSFVKIDSEEASWSTGAKIEGGNSGHRPTVKGGYFPVPPVDSFQDMRSEMSLIIESLGIPVEVHHHEVAGAGQNELGTKFSTLVERADWTQTMKYVIWNVAHTYGKTATFMPKPLVGDNGSGMHVHQSVWKDGKNLFAGDGYAGLSEFALYYIGGIIKHAKALNAITNPGTNSYKRLVPGFEAPVKLAYSARNRSASIRIPHVANPKGRRIETRFPDPLANPYLCFSALLMAGLDGVQNKIHPGEAATKDLYHLPPEEDKLIPTVCSSLDEALEHLDKDREFLTRGGVFTDSMIDAYIDLKMQEVQRFRMTTHPIEFDMYYSL

SEQ ID NO: 13599 - protein, 92 aa, Salmonella enterica
MSLAKNGTNLFSGDKYAGLSEQALYYIGGVIKHAKAINALANPTTNSYKRLVPGYEAPVMLAYSARNRSASIRIPVVASPKARRIEVRFPDP

SEQ ID NO: 13600 - protein, 856 aa, Cupriavidus taiwanensis
MEVSRIRALRGPNLWCRHTAIEAIVACQDTANMLSALPGFEDRLRARFPEIGPLRPDEESVELSLAHVLEVTALRLQAAAGCPVTFSRTAQTVEPGIYQVIVQYSEEEVGRLAFELAEALCHAARHDTPFDLADALHRLRELDEDVRLGPSTGSIVYAAVARGIPYRRLTQGSMVQFGWGSKQRRIQAAETDRTSAVAESIAQDKELTKSLLHAAGVPVPLGRSVRSAEEAWAAAQEIDAPVVVKPRDGNQGKGVAVRIRTREEVMTAYEVASDISSDVIVERYIPGHDFRLLVVGKQLVAAARRDPPQVIGDGVHTVRQLVDEVNRDPRRGEGHATSLTKIRFDDIALATLAKQNLTADSVPAAGTRVVLRNNANLSTGGSATDVTDDVHPDIAARAVAAAQMVGLDIAGVDAVCETMLKPFEEQAGGIVEVNAAPGLRMHLQPSYGKGRAVGEAIVSTMFADGDDGRIPVVAVSGTNGKTTTVRLITHIMATSGLRMGMTGTDGVYIQGERIDTGDCSGPRSARNVLLHPDVDAAVFETARGGLLREGLAFDRCDVAVVTNVGEGDHLGLSYINSVEDLAVLKSVIVQNVAPHGMAVLNAADPMVVRMADACPGSVTFFAHDPDQPAMATHRAQGKRVVFVDGAEIVAGEGDAEVRIALAEIPLTRNGTIGFQVENAMSSIAAAWALGIDWSVIRRGLATFVNDAQTAPGRFNVFDYRGATLIADYGHNPDAILALCNAIESIPAKRRVVVISGAGDRRDDDIRRQTQILGGVFDEVVLYQDQCQRGRADGEVLALLREGLQGAQRASQVEEIRGEFLAIDTALSHLQPGDLCLILVDQVEEALGHIAGRIAQG

SEQ ID NO: 13601 - protein, 612 aa, Tozzia alpina; identical to SEQ ID NO: 10236

SEQ ID NO: 13602 - protein, 877 aa, Cupriavidus taiwanensis
MKKKDIEIVDVMSLRGPNMWTYRPVLEAWVDIGELEDFPSNTIPGFYERLSAWLPSLIEHRCSIGERGGFLQRLKEGTWPGHILEHVTLELQNLAGMPGGFGKARETPVRGVYKVIVRAWHEEVTRAALFGARDLVMAAIEDRPYDVAATVEHLRRLVDKHCLGPSTACIVDAADDRDIPAIRLSDGNLVQLGYGARQRRIWTAETDRTSAIAESISRDKDLTKSLLESCGVPVPEGRLVESPEDAWDAAEDIGVPVVVKPYDGNHGRGVFTNLMTREEVETAYGVAIDEGSGVIVERFIPGNEHRLLVVGGRLVAAAMGETASVVGDGKSTIDELIELQINSDPRRGNTEDHPLNRVRLDSAARLELKRQGMDGSSVPPQGRTVLIQRNGNVAFDVTDRVHPSVAAHAALAARVVGLDIAGVDLVAEDISRPLHEQRGAIVEVNAGPGLLMHIKPAEGTPRPVGRAIVNHLFPESDDDQGRIPVVGVTGTNGKTVVARLVARLLQLSGKHTGLACSDGLFLDRRQVESGDRANWEAGHRILMNRAVEAAVFENDSGSILSEGLAYDRCQVGVVTNFDQPDHLGDYYVEDEDRMYNVLRTQVDVVLQDGAAVLNARDERLVEMAGLCDGDVIFFGLTPELPAIVSHRAAGKRAVYVREGKIVLATGTSETALVDVAAVPLTYAGRVAFQIENVLAAVAAGWALGISNDLIRAGVVTFDVGQVDVPGRFTLFERNGATVVVDDAHNAPALEALATALERFPAERRMVVYGAGVQRRDQDLVRQGKVLGQHFDRVFLCEDRSVKRALPDAEARALLKQGLYEGRRVTKIIDEGTRASAIEAALSQLVPGDLLVLQCDEAATGATVDLVHHWMGQPARRA

SEQ ID NO: 13603 - protein, 634 aa, Gibberella zeae PH-1
MATETPQPAYVGQPANVPGANIFDFIFSNPFQNESDFVPRARRVPKIRDDQPIFTDHANDRPLTFSRVKRDALTLAANLQSLGLDPDALETLPPTASCTGPEVAPVVLIQLPNCLPFATLFMGTVAAGLTATLASPSLTTTELAWVIKNSRPRVLFTAKALLDTVEKALESQEDEAYKNSVRVYTVDVARDMYPISPASHAEDGDWRNLVVNTSNSLTAGHSFAPESAATRTAVILWSSGTSGRSKGVLLSHQAINFSLASLWHDADFYKSHQRWLGYVPFYHVFGLTNIFLLAFATGSSVFTMPAFKLDTVLSAIPRRQITYLHMAPPVAVMLAKSPVVEPFARRDARGRNAFSSVVGGMTGGAPLGHEVVEKVFRRLGFLVRLGYGMSEACSITVQRGLREKDMHGYKNDTGKPHWGVELMIAASGEVDSASDDSTTKAAPFGAPGEILVRSPGLMTAYVPTQGLGSMETPDMSVTAEALTADGWLRTGDVGTLDAEGNLCITDRIKELIKVRAFQVAPAELEAILCSADSVADAGVVGVYDKTEATEWPRAYVVAADQNKSEADLKTLAHDLKTLVESHAARYKWLVGGIVFVKAIPKSPSGKILRRVIRDGGVQGFEVMPYQRKKRDAKL

SEQ ID NO: 13604 - protein, 165 aa, Triticum aestivum
  misc_feature (51)..(51): Xaa can be any naturally occurring amino acid
  misc_feature (67)..(67): Xaa can be any naturally occurring amino acid
MADDDSGSPRGGGGVREQDRFLPIANISRIMKKAVPANGKIAKDAKETLQXECVSEFISFVTSEASXDKCQKEKRKTINGDDLLWAMATLGFEEYVDPLKIYLQKYRDMEGDSKLTSKSGEGSVKKDIIGAHSGATSSNAQAMVQHGAYAQGMGYMQPQYHNGDT

SEQ ID NO: 13605 - protein, 121 aa, Salmonella enterica
GSGMHCHMSLAKNGTNLFSGDKYAGLSEQALYYIGGVIKHAKAINALANPTTNSYKRLVPGYEAPVMLAYSARNRSASIRIPVVASPKARRIEVRFPDPAANPYLCFAALLMAGLDGIKNK

SEQ ID NO: 13606 - protein, 609 aa, Triphysaria pusilla; identical to SEQ ID NO: 10239

SEQ ID NO: 13607 - protein, 227 aa, Xanthomonas oryzae pv. oryzae KACC10331
MRWITGVVLNYNTDTQAVNCLSSPTDGTPSPVRRLNYRRALLMLLNRLLVIVFIGFFAKSAFAAGTPVLDVDYRPLAGKTPINLNLTYGGKVVMVVNTASKCGYTPQYEGLEALNQRFASRGFTLLGFPSNDFHGQEPGSEKQIQEFCTLTYGVKFPMFEKVHVLGAEATPLYQRLTQATGVAPGWNFHKYLIGRDGRVVAQFPSKIKPDDPSVLAAIERELKAPSR

SEQ ID NO: 13608 - protein, 238 aa, Oryza sativa Japonica Group
VSVLRVITKGVYPQDANGLRKSAILYFVVSIVVMIICIVCYNVADKLPVVIYYKNIKKRAQKAEEDGGMSGSAWRSTLWSIVGRVKWHGIGIALIYAITLSIFPGYITEDVHSEALKDWYPIMLITAYNVFDLVGKSLPAFYFLENANIAVAGSFARLLFYPLFYGCLHGPSFFRTEIPVTILTCLLGFTNGYLTCILMTLAPKAVPIQHSETAGIVIVLFLVAGLVVGSFVAWFWVI

SEQ ID NO: 13609 - protein, 419 aa, Zea mays
MAVGDVETAAPLLPPPASALADEPSAGPPPDDRLGIGYLIFFTLGAGFLLPWNAFITAVDYFDFLYPGAPVDRVFSISYMVSALLPLLVIVLFFPKSSAPIRINTGLTLFTLTLVLVPAMDLIYVKGRAGLYGAFDVTVAATALCGVADALVQGGVIGFAGELPERYMQAVVAGTAASGVLVSALRVFTKALYPQDANGLRQSAILYFVAGIVLMVICIVCYNVADRLPVVIYYKNMKKRAQKAEVGGGMTGPAWRSTLWSIVGTVKWYGIGVALIYAVTLSIFPGYITEDVHSEALGDWYPIILITAYNVFDLVGKALPAVYLLQNGSAAIAGSFARLLFYPLFYGCLHGPSFFRTEIPVTVLTCLLGLTNGYLTSVLMILAPKAVPIHHSETAGIVIVLFLVVGLVIGSIVAWFWVI

SEQ ID NO: 13610 - protein, 447 aa, Methanosarcina barkeri str. Fusaro
MVQIKKCITKEDVLEAVKERDVKFIRTQFTDTLGIIKSWAIPVEQLEEAFENGVMFDGSSIQGFTKIEESDMKLVLDPSTFRILPWRPTTGAVARILGDVYLPNGRPFEGDPRYVLKSAIEEAKKMGYSMNVGPELEFFLFKLDANGNPTTELTDHGGYFDFSPLDRAQDVRRDIDYTLERMGFQIEASHHEVAPSQHEIDFRFGDVLSTADNVITFKYVVKSIAYHKGYYATFMPKPLFGVNGSGMHTNQSLFKGDNNVFYDPESADQLSQEAMYYIGGLLNHIIEFAAVTNPVVNSYKRIVPGYEAPVYLTWSAKNRSSLIRIPETRGNGTRVELRCPDPSCNPYLAFALMLRSGLDGIKNKIDPGEPTNTNIFHLTEKEREGKGIRSLPADLKGAIDEMKGSKFVKEVLGEHVFNHYLCAKEMEWDEYKAIVHPWELEKYLHML

SEQ ID NO: 13611 - protein, 245 aa, Zea mays
  misc_feature (109)..(109): Xaa can be any naturally occurring amino acid
  misc_feature (160)..(160): Xaa can be any naturally occurring amino acid
LASASLLRTSGSTDSYPQTQTRRVTLYLRTNVSVKAAEKYSCRVLCKTDNFSSTSIHHTHARSLHLKLPGVFPGWRHVCHSTHTHCGYALNLSSSARDTEGIEPKYRKXIRKGIIAFVAVDESRFTLAHELTCTPYFRSARSWGLLRRRSRLLCRKCGGXIGSAYGEEEDARDAGSSSLFGGDGSSDDTRPSSGLGRRSSVASSQKRYVVRISTLQLSLDDCCRSLHATLKQVSSWCAVFFFQPG

SEQ ID NO: 13612 - protein, 657 aa, Cryptococcus neoformans var. neoformans B-3501A
MASFRGLPLCGAVNFIFSFSLLLPHPKKASNPKSHTANHLYTNMSAEDVFEGAIGIDLGTTYSCVGVWQNDRVEIIANDQGNRTTPSYVAFTEGERLIGDAAKNQSAMNPLNTIFDAKRLIGRRYDDADVKKDMKHWPFSVIDKDGSPYVEVDYLNEKKTFSPQEISAMVLTKMKEIAEAKIGKTVKKAVVTVPAYFNDSQRLATKDAGAIAGLEVLRIINEPTAAAIAYGLDEKTEEERNVLIFDLGGGTFDVSLLTIQGKVFSVKATAGDTHLGGEDFDNNLLEHFKAEFKRKTKLDISDDARALRRLRSACERAKRTLSSVTQTTVEVDSLYQGNDFSSNITRARFEEINAVAFKSTVDPVEKVLKDSKIPAAKVDDIVLVGGSTRIPKIQSLVSEYFGGRQLNKSINPDEAVAYGAAVQAAVLTGQTSDKTADLLLLDVAPLSLGVAMQGDVFGVVLPRNTPIPSNKSRVFTTVEDNQTTVMFPVYEGERTQCKDNRLLGEFELSGIPPMPRGQAELVCTFEVDANGLLKVSAQDRASGRKAQITIQNSVGRLSSEEIQAMIKDAEQFKNADKDFSARHEAKSDLEAYLHTCEQSISAPELSMKIKRGARAAVESEIAKALEKLEQEDATADELKKAQLGVKRAMQKAMASAR

SEQ ID NO: 13613 - protein, 440 aa, Clostridium thermocellum ATCC 27405
MSYNIKIKEVLEFVEENDVKFIRLAFCDILGIPKNISIMPQELERAFEQGISFDASSILGFMNVEKSDLFLHPDPSTLSILPWRPQQGRVIRFFCDIKHPDGSAFEGDSRNILKKAVERAEKMGYACRIGSECEFYLFETDEKGRPTYIPHDEGGYLDMAPLDKGENVRREICLSLEQMGIQPESSHHEQGPGQHEIDFKYSDALTAADDLMTFKTVVKAVASRNGLFASFMPKPILTESGSGLHINISLSKDGFNIFKERNYDSSAAKSFIAGVIDKILDITAFANPITNSYARLGSFRAPKYVSWSHQNRSQLIRIPAETGEYSRMELRSPDPACNPYITFALILHAGLDGIERKLELPGPINQNLYNAGADELQNIKALPQNLKEALDVASKSSFVRNILGEEMLSKYLEIKLKEWNMYFESEDRESVEKQMYFKII

SEQ ID NO: 13614 - protein, 392 aa, Gaudichaudia albida; identical to SEQ ID NO: 10249

SEQ ID NO: 13615 - protein, 947 aa, Arabidopsis thaliana
MDGVTGGGTNIGEAVTAPPPRNPHPATLLNANSLPPPFLSKTYDMVEDPATDAIVSWSPTNNSFIVWDPPEFSRDLLPKYFKHNNFSSFVRQLNTYGFRKVDPDRWEFANEGFLRGQKHLLKKISRRKSVQGHGSSSSNPQSQQLSQGQGSMAALSSCVEVGKFGLEEEVEQLKRDKNVLMQELVKLRQQQQTTDNKLQVLVKHLQVMEQRQQQIMSFLAKAVQNPTFLSQFIQKQTDSNMHVTEANKKRRLREDSTAATESNSHSHSLEASDGQIVKYQPLRNDSMMWNMMKTDDKYPFLDGFSSPNQVSGVTLQEVLPITSGQSQAYASVPSGQPLSYLPSTSTSLPDTIMPETSQIPQLTRESINDFPTENFMDTEKNVPEAFISPSPFLDGGSVPIQLEGIPEDPEIDELMSNFEFLEEYMPESPVFGDATTLENNNNNNNNNNNNNNNNNNNNTNGRHMDKLIEELGLLTSETEHYRSNISRSNAANPGVVFVCNRFLCVIERNDQRKLSGKVMMKSSVNFRQNLSVALVRIVSVLLVSSISVVTTDSPPSWGLTEENLLFLEAWRTIDRAYIDKTFNGQSWFRYRETALRNEPMNTREETYMAIKKMVATLDDPFTRFLEPGKFKSLRSGTQGAVTGVGLSIGYPTASDGPPAGLVVISAAPGGPANRAGILPGDVIQGIDNTTTETLTIYDAAQMLQGPEGSAVELAIRSGPETRLLTLTRERVSVNPVKSRLCELPGSGSNSPKIGYIKLTTFNQNASSAVREAIETLRGNNVNAFVLDLRDNSGGSFPEGIEIAKFWLDKGVIVYICDSRGVRDIYDTDGSNAIATSEPLAVLVNKGTASASEILAGALKDNKRALVYGEPTYGKGKIQSVFELSDGSGLAVTVARYETPAHTDIDKVGVTPDHPLPKSFPKDEEAFCGCLKDPTAACYLNQGLLFSR

SEQ ID NO: 13616 - protein, 392 aa, Gallardoa fischeri; identical to SEQ ID NO: 10252

SEQ ID NO: 13617 - protein, 640 aa, Pseudoalteromonas tunicata D2
MGKIIGIDLGTTNSCVSVLEGGKPRVIENSEGDRTTPSIIAYTADGETLVGQPAKRQAVTNPQNTLFAIKRLIGRRFEDEEVQRDIAIMPFKIVKADNGDAWVEARGEKRAAPQISAEVLKKMKKTAEDYLGEPVTEAVITVPAYFNDSQRQATKDAGRIAGLEVKRIINEPTAAALAYGIERKQGDNVVAVYDLGGGTFDISIIEIDDVEGEQTFEVLATNGDTHLGGEDFDNRVINYLVTEFKKDQGIDLKNDPLAMQRVKEAAEKAKIELSSAQSTEVNLPYVTADATGPKHMNVKLSRAKLESLVEDLVLKSLEPLKKALADADLSVSEVNDIILVGGQTRMPMVQKAVADFFGKEPRKDVNPDEAVAMGAAVQGGVLAGEVKDVLLLDVCPLSLGIETMGQVMTALIEKNTTIPTKKSQTFSTAEDNQSAVTIHVLQGERKRSSDNKSLGQFNLEGIRPAQRGAPQIEVTFDVDADGILHVSAKDKDTGKEQKITIQANSGLSDDEVEAMIRDAEANAEADKKFAELVGIRNQADALVHGTRKQVEEAGDDLPAADKEVIEAAVVELETAIKSDNKEEIEAKTQALMEKSQKLMEIAQAKAQGQQAGGAEQQQKSSAKQDDDVVDAEFEEVKDDK

SEQ ID NO: 13618 - protein, 357 aa, Enterococcus faecalis
MNAVHFGAGNIGRGFIGEILAKTGFILPFVDVNGNHHQALKERKSYTIELADASHQQINVENVTGLNNMTEPEKVVEAIAEADLVTTAIGPNILPRIAELIAQGIDARAEANCQNGPLDIIACENMIGGSTFLAEEVAIIFEKPSLSEQWIGFPDAAVDRIVPLQKHKDPLFVQVEPFCEWVIDDTNRKAKEIQLEGVITCRLEPYIERKLFSVTSGHATVAYTGALLGYQTIDEAMQDALVVAQLKSVLQETGKLLVAKWNFDEQEHAAYIEKIINRFQNKYISDAITRVARTPIRKLGAQERFIRPIRELQERNLVSAAFIAMIGIVFNYHDPEDEQSRQLQEMLDQESVDTVDR

SEQ ID NO: 13619 - protein, 392 aa, Peixotoa glabra; identical to SEQ ID NO: 10255

SEQ ID NO: 13620 - protein, 462 aa, Leptospira interrogans serovar Lai str. 56601
MKNKERMIWIGIVSFLSFALIFPIETVKGISKTGESYLQIFHEVLSTIHSDYVESVDEEKLYQGAIRGLISSLGDPHSRFMDKDDFSQLQEETRGSFGGLGMEVSFADGAIVVISPIEDTPAMKAGILPQDRIIEIDGKNTHDLSLSDSIKLMRGKVGTSVSIKLERKNQKEPMVLTLVREMIKIRYVRSSFLEKEKLGYIKLNQFMGKENTLSEFKKELNSLKEKGAEGLILDLRMNPGGLLDLAIALSDLFLKPDLDIVSVRGRGGELVRVFRSTAANDKFINLPLVVLINEGSASASEIFAGAMQDHGRGKILGTVSFGKGSVQNIYSLSHNTGIALTIQKYYTPSGKSIHGKGIQPDVIVKPIEPTEDDRFYIRKMAEKKMLETFLLKNPNYSEANFVLLEKYLSEKGIKLSADVARFLYKSKTRQEGQNSILDLELDPQLRKAIEILSPNKDGEKKS

SEQ ID NO: 13621 - protein, 192 aa, Neisseria gonorrhoeae
MSIKNAVKLIEKSKARFVDLRFTDTKGKQHHFTVPARIVLEGPEEWFENGQAFDGSSIGGWKGIQASDMQLRPDPATAFVDPFYDDATVVLTCDVIDPADGQGYDRDPRSIARRAEAYLKSSGIGDTAYFGPEPEFFVFDGVEFETDMHKTRYEITSESGAWASGLHMDGQNTGHRPAVKGGYAPVAPIDCG

SEQ ID NO: 13622 - protein, 392 aa, Ryssopterys timorensis; identical to SEQ ID NO: 10258

SEQ ID NO: 13623 - protein, 698 aa, Neptuniibacter caesariensis
MHRSLLKPLVITAFSFLIPVTANALVAKLESEPVHKQTLLEITQSLKHGHYNNLNLNDQLSSKVFEQYLKDLDPSRSYFYKSDIDEFETYRNVFDDRIKAGNLEEAYIIFNRFQQRLEDRLSFTLDELNNNKAFDYAVDEHLDTDRENAPWIESEQEMNELWDKRLKSALLNLKLAGKDNKEAVDVLIKRYTNQLNRAKQVNSEDVFQTFTNAFTKQYDPHTQYFSPRKSENFKINMSLSLEGIGAVLKSENEFTQIVRLVPAGPAEKTGQLKATDIILGVGQGEEGEIEDVVGWRLDDVVQLIRGPKGTTVRLEVKSSERDDIPSKIVKITRNKVKLEEQSAQKRIIEVEHLGRPFKLGVIEIPAFYIDFAALQRGDENYKSTSRDVEKLIGELAEEQIDGLIVDLRNNGGGSLREANDTVGLFIKHGPTVQVKDSTGRVEVLRDRDSKVAYSGPLAVLVNRLSASASEIFAGAVQDYNRGIVIGGQTFGKGTVQTLLPLNHGQLKLTHAKFYRISGESTQNKGVHPDIYFPTLYDPEIIGESALDQALSWDKVRSAPHGTYPSIKRFLKQIDTRYQSRTMTNPDFIFMKEQVEHLNEARKESSQIPLMESALKAERDKAEQWQIDAENRRREKKQLPKIDKISDLEEELEKDALGRPINPESEAMLVESGRILLDAVFMQLQYSANETLPEIEQNK

SEQ ID NO: 13624 - protein, 517 aa, Zea mays
MHGPYLIIAPLSTLSNWVNEISRFVPSVSSIIYHGDKVARAEIRRKFMPKTAGPDFPIIVTSYEIAMLDARFLAHYRWTYVVVDEGHRLKNSKCKLLREMKRIPMANKLLLTGTPLQNNLAELWSLLNFILPDIFSSNEEFESWFDFSAKGSEEPEESEEKRRVHVVSKLHAILRPFLLRRMKEDVEQMLPRKKEIIIYANMTEVQKRIQDHLVEKTFDVYLNDESDIVLRRPGIKTKLNSLFIQLRKNCAHPDLLEAAFGTTSLYPPVNKLLEQCGKFQLLDRLLTSLLARKHKVLIFSQWTKVLDILEYYLDSKGLGVCRIDGSVNLEERRRQIAEFNDLNSSLNVFILSTRAGGLGINLTSADTCILYDSDWNPQMDQQAMDRCHRIGQTRPVHVYRLATSYSVEERIIKKAFGKLKLEHVVIGKGQFEQERAKPNALEEGELLALLRDEQDEEDRMIQTDISDEDLLKLMDRSDLSGPPGAADAAPLIPLKGPGWEVVVPTKSGGGMLSSLTS

SEQ ID NO: 13625 - protein, 170 aa, Helicobacter pylori
GSGMHTHVSIWKNNENLFGGETYKGLSEFALHFLGGVLRHARGLAAFTNASTNSYKRLIPGYEAPSILTYSASNRSASVRIPYGISKNSARFEFRFPDSSSNPYLAFGAILMAGIDGVKNKMDPGEAMDINLFKLTLDEIREKGIKQMPHTLRRSLEEMLADKQYLKEGQ

SEQ ID NO: 13626 - protein, 151 aa, Glycine max
MGAFTEKQEALVNSSFEAFKANLPHHSVVFFNSILEKAPAAKNMFSFLGDAVDPKNPKLAGHAEKLFGLVRDSAVQLQTKGLVVADATLGPIHTQKGVTDLQFAVVKEALLKTIKEAVGDKWSEELSNAWEVAYDEIAAAIKKAMAIGSLV

SEQ ID NO: 13627 - protein, 192 aa, Neisseria gonorrhoeae
MSIKNAVKLIEKSKARFVDLRFTDTKGKQHHFTVPARIVLEGPEEWFENGQAFDGSSIGGWKGIQASDMQLRPDASTAFVDPFYDDVTVVITCDVIDPADGQGYDRDPRSIARRAEAYLKSSGIGDTAYFGPEPEFFVFDGVEFETDMHKTRYEITSESGAWASGLHMDGQNTGHRPAVKGGYAPVAPIDCG

SEQ ID NO: 13628 - protein, 480 aa, Haloarcula marismortui ATCC 43049
MSKCRRKRRNLCANQQGFSSSTAPIGCPKMTSELSEAAQEVLDEIDEKNVDFLRLQFTDILGTIKNVSITADQAEKAFTEGIYFDGSSINGFVRIQESDMRLDPDPSTFSVLPWRENVEGGSSARLICDVIDTSTGEPFSGDPRGVLKRAIERANDMGYTVNAAPEPEFFLFEEDEEGRATTKTNDAGGYFDLAPKDLASDVRRDIIYGLEDMGFDIEASHHEVAQGQHEINFTYDDALSTADNVATFRSVVRAIAAEHDLHATFMPKPIPKINGSGMHTHLSLFTEDGENAFHDEDDEFNLSETAKSFTAGILKHAPAITAVSNPTVNSYKRLVPGYEAPVYVAWSDRNRSALIRKPAARTPAASRIEARFPDPSCNPYLAFAALIHAGLDGVEQDLECDDPVRENIYDFDEEKREEYGITTLPSNLGEAVEALEDDEVIQDALGEHVYENFVEAKTQEHKEYLVDVSDWELDRYLEKF

SEQ ID NO: 13629 - protein, 170 aa, Helicobacter pylori
GSGMHTHVSVWKNNENLFSGETYKGLSELALHFLGGVLHHARGLAAFTNASTNSYKRLIPGYEAPSILTYSANNRSASVRIPYGISKNSARFEFRFPDSSSNPYLAFSAILMAGMDGVKNKIDPGEAMDINLFKLTLDEIREKGIKQMPHTLRRSLEEMLADKRYLKEGH

SEQ ID NO: 13630 - protein, 392 aa, Sphedamnocarpus sp. Davis 03-01; identical to SEQ ID NO: 10263

SEQ ID NO: 13631 - protein, 192 aa, Neisseria gonorrhoeae
MSIKNVVKLIEESEARFVDLRFTDTKGKQHHFTVPARIVLEDPEEWFENGPAFDGSSIGGWKGIEASDMQLRPDPATAFVDPFYDDATVVLTCDVIDPADGQGYDRDPRSIARRAEAYLKSSGIGDTAYFGPEPEFFVFDGVEFETDMHKTRYEITSESGAWASGLHMDGQNTGHRPAVKGGYAPVAPIDCG

SEQ ID NO: 13632 - protein, 166 aa, Oryza sativa Japonica Group; identical to SEQ ID NO: 10505

SEQ ID NO: 13633 - protein, 170 aa, Helicobacter pylori
GSGMHTHVSVWKNNENLFSGETYKGLSELALHFLGGVLRHARGLAAFTNASTNSYKRLIPGYEAPSILTYSANNRSASVRIPYGISKNSARFEFRFPDSSSNPYLAFSAILMAGMDGVKNKIDPGEAMDINLFKLTLDEIREKGIKQMPHTLRRSLEEMLADKQYLKEGH

SEQ ID NO: 13634 - protein, 169 aa, Oryza sativa Japonica Group
MAANGSNVVSRGAVRFTEEQEALVLKSWAIMKNDSAHIGHRFFLKIFEVAPSARQLFSFLRNSDVPLEKNPKLKIHAMAVFVMTCEAAAQLRKTGRVTVRDTTIKRLGSTHFKNGVSDAHFEVAKFALLETIKEAVPASMWSPAMKGAWGEAYDHLVAAIKQGMKPAAA

SEQ ID NO: 13635 - protein, 635 aa, uncultured marine bacterium 583
MAKIIGIDLGTTNSCVAVMDGGTVKIIENSEGNRTTPSIIAYPKDSDEILVGQPAKRQAVTNPENTLYAIKRLIGRRFEEDAVQKDIDLVPYKIIKAKNGDAWVEVKGKKMAAPEISARVIQKMKQTAEDYLGTEVKEAVITVPAYFNDSQRQATKDAGKIAGLDVKRIINEPTAAALAYGVDKVTGDKKVAVYDLGGGTFDVSIIEMEDIDGEKHFEVLSTNGDTFLGGEDFDQRIINHLVEEFKKEQGFDLTKDAMALQRLKEAAEKAKIELSSSEQTEVSLPYITADASGPKHLNIKITRAKLESLVADLLKRSIEPCKIALKDAGLSSGDVDEVLLVGGQTRMPKVQKMVQDFFGKEPKKDLNPDEAVAMGAAIQAGVLGGDVKDVLLLDVTPLSLGIETLGGVMTKLIEKNTTIPTHQSQVFSTAADNQSAVTVHVLQGEREVASANKSLGQFNLEGIAPAPKGQPQIEVTLDLDSDGILHVSAKDKNTGKEQSITIKASSGLSDEEVEKMIKDAETHAEEDKKFQELITTRNMADSLVHSTKQTLEELKDEISDEEKSTIESAVNELEESIKGDDKDDIDAKVQNLSEKAQVLAQKAQEKASAENPEAGNGKADEDVVDADFEEVKEEK

SEQ ID NO: 13636 - protein, 170 aa, Helicobacter pylori
GSGMHTHVSIWKNNENLFSGEAYKGLSEFALHFLGGVLRHARGLAAFTNASTNSYKRLIPGYEAPSILTYSANNRSASVRIPYGISKNSARFEFRFPDSSSNPYLAFAAILMAGMDGVKNKIDPGEAMDINLFKLTLDEIREKGIKQMPHTLRRSLEEMLADKQYLKESQ

SEQ ID NO: 13637 - protein, 415 aa, Oryza sativa Japonica Group
MAWWWWWSEAVVVGGGTGGGSSGTVVSICVFTAVLCVCLVAGHLLEENKWVNESITALLIGCVVGAIIFLLSEGKNSRILRFDEQLFFIYVLPPIIFNAGFQVKKKQFFHNFLTIMSFGIFGVFISVAIVSTGCYWLFPKVGFGDLGAVDYLDLILFTTTALGAIFSSTDTVCTLQVISQDETPRLYSLVFGEGVVNDATSVVLFNAIKNLDITQLKGGVALKVISDFLYLFFTSTMLGVTIGLSTAYALKALYFGRHSTDREVALMALMAYLSYMLAEGKFTFSGVTLDPVHATIITSTIIVVFFTTLVFGFLTRPLISAILPHQHRQSTTPGTGGGGRSTGSNSPKDDFIMPFLSPDEEASGSGSGFLQAKRSISMLLERPVHTVHIYWRKFDDRFMRPIFGGPMERDRGNCY

SEQ ID NO: 13638 - protein, 192 aa, Neisseria gonorrhoeae
MSIKNAVKLIEESEARFVDLRFTDTKGKQHHFTVPARIVLEDPEEWFENGPAFDGSSIGGWKGIQASDMQLRPDASTAFVDPFYDDATVVLTCDVIDPADGQGYDRDPRSIARRAEAYLKSSGIGDTAYFGPEPEFFVFDGVEFETDMHKTRYEITSESGAWASGLHMDGQNTGHRPAVKGGYAPVAPIDCG

SEQ ID NO: 13639 - protein, 167 aa, Oryza sativa Japonica Group
MAFASASNGAVRFTEEQEALVLKSWAIMKDDSANIGHRFFLKIFEVAPSARHLFSFLRNSDVPLEKNPNLKKHAMAVFVMTCEAAAQLRKTGRVTVRDTTIKRLGSTHFKNGVSDTHFEVARFALLETIKDGIPASMWSPEMKNAWGEAYEHLVAAIKEGMKPVALL

SEQ ID NO: 13640 - protein, 668 aa, Glycine max
MAGSWARRSLIVLAIISFGCLFAISIAKEEATKLGTVIGIDLGTTYSCVGVYKNGHVEIIANNQGNRITPSWVAFTDSERLIGEAAKNLAAVNPERTIFDVKRLIGRKFEDKEVQRDMKLVPYKIVNKDGKPYIQVKIKDGETKVFSPEEISAMILTKMKETAEAFLGKKINDAVVTVPAYFNDAQRQATKDAGVIAGLNVARIINEPTAAAIAYGLDKKGGEKNILVFDLGGGTFDVSILTIDNGVFEVLATNGDTHLGGEDFGQRIMEYFIKLIKKKHGKDISKDNRALGKLRREAERAKRALSSQHQVRVEIESLFDGVDFSEPLTRARFEELNNDLFRKTMGPVKKAMEDAGLQKSQIDEIVLVGGSTRIPKVQQLLKDYFDGKEPNKGVNPDEAVAYGAAVQEGILSGEGGEETKDILLLDVAPLTLGIETVGGVMTKLIPRNTVIPTKKSQVFTTYQDQQTTVSIQVFEGERSLTKDCRLLGKFDLSGIPPAPRGTAQIEVTFEVDANGILNVKAEDKGTGKSEKITITNEKGRLSQEEIERMVREEKDFAEEEKKVKERIDARNSLETYVYNMKNQVSDKDKLADKLESDEKEKIETAVKEALEWLDDNQSMEKEDYEEKLKEVEAVCNPIISAVYQRSGGAPGGGGASGEEDEDDSHDEL

SEQ ID NO: 13641 - protein, 234 aa, Asarum yakusimense; identical to SEQ ID NO: 10272

SEQ ID NO: 13642 - protein, 234 aa, Saruma henryi; identical to SEQ ID NO: 10273

SEQ ID NO: 13643 - protein, 623 aa, Mycobacterium avium subsp. paratuberculosis
MARAVGIRYGTTNSVVAVLEGGDPVVVANSEGSRTTPSIVAFARNGEVLVGQPAKNQAVTNVDRTIRSVKRHMGTDWSIEIDGKKYTAQEISARVLMKLKRDAEAYLGEDITDAVITVPAYFNDAQRQATKEAGQIAGLNVLRIVNEPTAAALAYGLDKGEKEQTILVFDLGGGTFDVSLLEIGEGVVEVRATSGDNQLGGDDWDDRIVNWLVDKFKGTSGIDLTKDKMAMQRLREAAEKAKIELSSSQSTSINLPYITVDADKNPLFLDEQLTRAEFQRITQDLLDRTRQPFKSVIADAGISVSDIDHVVLVGGSTRMPAVTDLVKELTGGKEPNKGVNPDEVVAVGAALQAGVLKGEVKDVLLLDVTPLSLGIETKGGVMTKLIERNTTIPTKRSETFTTADDNQPSVQIQVYQGEREIAAHNKLLGSFELTGIPPAPRGVPQIEVTFDIDANGIVHVTAKDKGTGKENTIKIQEGSGLSKEEIDRMIKDAEAHAEEDRKRREEADVRNQAESLVYQTEKFVKDQREAEGGSKVPEETLSKVDAAIADAKTALGGTDITAIKSAMEKLGQESQALGQAIYEATQAESAQAGGPDGAAAGGGSGSADDVVDAEVVDDDRESK

SEQ ID NO: 13644 - protein, 134 aa, Salmonella enterica
MPKPMFGDNGSGMHCHMSLAKNGTNLFSGDKYAGLSEQALYYIGGVIKHAKAINALANPTTNSYKRLVPGYEAPVMLAYSARNRSASIRIPVVASPKARRIEVRFPDPAANPYLCFAALLMAGLDGIKNKIHPG

SEQ ID NO: 13645 - protein, 474 aa, Anabaena azollae
MTTSQEVLKRIQDEKIPLIHLKSIDTVGTWQHLTLYQNQIDESSFTDGVPFDGSSIRGWKAINESDMTMVLDPNTAWIDPFMEVPTLSIVCSIKEPRTGEWYNRCPRVIAQKAVDYLVATGIGDTAFFGPEAEFFIFDSARFAQTANEGYYFLDSVEGAWNSGKEGTADKPNLAYKPRFKEGYFPVSPTDSFQDIRTEMLLTMAKLGVPIEKHHHEVATGGQCELGLRFGKLIEAADWLMIYKYVIKNVAKKYGKTVTFMPKPIFGDNGSGMHCHQSIWKDGKPLFAGDQYAGLSEMGLYYIGGLLKHAPALLAITNPSTNSYKRLVPGYEAPVNLAYSQGNRSASIRIPLSGTNPKAKRLEFRCPDATSNPYLAFAAMLCAGIDGIKNKIHPGEPLDKNIYELSPEELAKVPSTPGSLELALEALENDHAFLTDTGVFTEDFIQNWIDYKLANEVKQMQLRPHPYEFSIYYDV

SEQ ID NO: 13646 - protein, 118 aa, Salmonella enterica
NGSGMHCHMSLAKNGTNLFSGDKYAGLSEQALYYIGGVIKHAKAINALANPTTNSYKRLVPGYEAPVMLAYSARNRSASIRIPVVASPKARRIEVRFPDPAANPYLCFAALLMAGLDG

SEQ ID NO: 13647 - protein, 1121 aa, Ceratodon purpureus; identical to SEQ ID NO: 10279

SEQ ID NO: 13648 - protein, 121 aa, Glycine max
MSDAPASPSHESGGEQSPRGSLSGAAREQDRYLPIANISRIMKKALPPNGKIAKDAKDTMQECVSEFISFITSEASEKCQKEKRKTINGDDLLWAMATLGFEDYIEPLRVYLARYREAEVS

SEQ ID NO: 13649 - protein, 122 aa, Salmonella enterica
MSLAKNGTNLFSGDKYAGLSEQALYYIGGVIKHAKAINALANPTTNSYKRLVPGYEAPVMLAYSARNRSASIRIPVVASPKARRIEVRFPDPAANPYLCFAALLMAGLDGIKNKIHPGEAMD

SEQ ID NO: 13650 - protein, 166 aa, Bordetella pertussis Tohama I
MNTMYDFSAPTITGAERALADFRGQVALVVNVASRCGFTPQYSGLEELYRSYRNEGFVVLGFPCNQFGRQEPGDEAAIAQFCETQYAISFPLFAKIDVNGAHAHPLYRWLKARKPGLLGTRAIKWNFTKFLVGRDGLPLRRYAPAHTPESLRHDIARACAAPGPTP

SEQ ID NO: 13651 - protein, 161 aa, Shewanella sp. MR-7
MTSTIYSHSANDIQGNPTALAQYQGKVILIVNTASECGFTPQYKGLEALYQKYKAQGLVVLGFPCNQFGAQEKADEKGIQSFCELNFGVSFPLFSKIEVNGEHTHPLYQYLKKAAPGVLGTERIKWNFTKFLINRQGEVVARFAPTTKPEAISDKIEALLK

SEQ ID NO: 13652 - protein, 318 aa, Zea mays
MEAEAAAKRTRDSGEDAAAAGISAVIPGWFSEISPMWPGEAHSLKVDKVLFQGKSDYQSVMVFQSSTYGKVLVLDGVIQVTERDECAYQEMITHLPLCSIKDPKKVLVIGGGDGGVLREVSRHSSVEQIDICEIDKMVVDVSKQFFPHLAVGFEDPRVSLHIGDGVAFLKNAPEGTYDAVIVDSSDPIGPAQELFEKPFFQLVARALRPGGVVCTQAESIWLHMHIIEDIVVNCRQVFKGSVNYAWTTVPTYPSGVIGFMLCSTEGPAVDFQHPVFNIEEDEHPMKSKGPLKFYNSEIHTASFCLPSFAKRVIESKAN

SEQ ID NO: 13653 - protein, 533 aa, Mycobacterium avium 104
MIDLTVAQIADIVGGTLADITAPDAARRRVTGTVEFDSRAVGPGGLFLALPGARTDGHDHAESAVAAGAVAVLAARPVGVPAIVAPPVDAADALAGVLEHDADGSGAAVLAALAKLARAVAAELVAGGLTIVGITGSSGKTSTKDLVAAVLAPLGEVVAPPGSFNNELGHPWTVLRATADTDYLVLEMSARHPGNIAALAEIAPPAVGVVLNVGTAHLGEFGSREAIARTKSELPQSVPASGVVVLNVDDPTVAAMAEVTAARVVRVSRAEHTEAGPSDVWAGPVSLDELARPGFTLYHSHAGGTRQARVQLGVSGDHQVGNALCAAAVALECGATVEQVVAALAGAGPVSRHRMQVSTRGDGVTVIDDAYNANPDSMRAGLQALAWIARGGAEPGAPARRSWAVLGEMAELGDDAIAEHDRIGRLAVRLDVSRLVVVGTGRSVSAMHHGAVMEGSWGSADKGAVNVPDAEAALELLRAELQPGDVVLVKASNAAGLGALADALARDDREGGAAGRSGSSPLARDDSAGGTRR

SEQ ID NO: 13654 - protein, 378 aa, Epifagus virginiana; identical to SEQ ID NO: 10283

SEQ ID NO: 13655 - protein, 419 aa, Synechococcus sp. PCC 7335
MGRRIFRVGLAIALTVLIWLGAVDGGIAGLNRMPVASAFTNQQQLVMEVWRIVNRSYLDETFNHQNWWFMRQKVLRKSLPTWKETYTAIAEMLAVLDDPYTRFLPPQQYQSLQTNTNGELLGVGLQIAKDDEASPLRVIAPIEGSPAESAGLQPLDTILAINGTSTQSLSLDEAAARMRGAIGTKVTLTVGRDQSEPFDVNVQRDRITLNPVSFELRAEPGLPKVGYLRLGQFNGNAVEELRESLQTLEKQGADAYVLDLRNNPGGLLQAGIEIARMWIDQGTVVYTVNRQGSLGSYDANGRAITADPLVVLVNKGTASASEILAGALQDNGRAQLVGETTFGKGLIQSLFDLPHGAGLAVTIAKYETPSHRDINKLGINPDQLVTSSVERRQQFGSKEDAQYEAAVALLAQSFAMAQK

SEQ ID NO: 13656 - protein, 432 aa, Populus trichocarpa
MGLTSTEPDTESSLLLPTTAATTTTTTTTTNSTISQQKIPKDTFHLAYIIYFTLGLGFLLPWNAFITAVDYFSYIYPDVSVDRIFSVAYMVMGLACLVVIILFYAHKSDAYLRINLGLGLFIVALLVVPVMDAVYIKGRVGLYDGFYVTVGALALSGMADALVQGGLIGAAGELPERYMQAVVAGTAASGVLVSLLRILTKAVYTQDSHGLRKSANLYFAVGIVVMAICLVFYNMAHRLPIMKYYADLKIQAVNEDKEEKGSLTGARWRSTLWEIVCSVQWYGIGIVIIYVVTLSIFPGYITEDVHSEILKDWYSIILITGYNVFDLVGKSLTAVYLLKNAKIAIGGCFVRLLFYPLFFGCLHGPKFFRTEIPVTLLTCLLGLTNGYLTSVLMIHAPKVVPLRQAETAGIVIVLYLVAGLAAGSIVAWFWVI

SEQ ID NO: 13657 - protein, 279 aa, Exiguobacterium sibiricum 255-15
MEQKLKLWFTEHQTEDYGITFRVNHVYESEQTEFQRLEMVETDEFGTMLLLDGMVMTTDRDEFVYHEMVAHVPLFTHPNPKSVLVVGGGDGGVIREVLKHPSVEKAVLVEIDGKVIEYSKKYLPNIAGGLDDARVEVIVGDGFMHIAEAVNEYDVIMVDSTEPVGPAVNLFTKGFYSGISKALKEDGIFVAQSDNPWFTPELIRDVQRDVKEIFPITKLYIANVPTYPSGLWTFTIGSKKHDPLAVAPERFHEIETKYYTPELHTAAFALPKFVKDLTI

SEQ ID NO: 13658 - protein, 132 aa, Frankia sp. ACN14a
MFTKAEDVLRYIRDEDVQFIDVRFCDLPGIMQHFTIPTQVFAESVFTDGLMFDGSSIRGFQAIHESDMLLLPDPQTAFVDSFREHKTLAMTFFIHDPITKEQFSRDPRNIAQKAETFLRRTGIADTGYFGPE

SEQ ID NO: 13659 - protein, 438 aa, Oryza sativa Japonica Group
MDADEVVEEKDSGILSQDFFCTPDYITPDAPQLGSGFDANKENIPCPNSPEKSVCRSKRYKRDCSPKGLGSNDIFDSQWIAPVQFEGLDDSEEEQLKESSSHKRGSYVSQSAVALRCRVMPPPCIRNPYLNTDHQIDDNVFGGRQCKSSGFSPSVDGDGLSRYRTDFHEIEVIHFHFMLVLLMSTLDFQQIGRGNFSVVFKVLKRIDGCLYAVKRSIRQLHNDRERRQAVKEVQALAALGCHENIVGYFTSWFENKQLFIQMELCDRCLSMDRNQPLKCGEALELLYQICKGLDFIHERGIAHLDVKPDNIYVRNGVYKLGDFGCATLIDRSLAIEDGDSRYMPPEMLNDKYEHLDKVDIFSLGAAIYELIRGTQLPDSGPQFTSLREGKIALLPGCPMQFQSLIKSMMDPDPVRRPSAKEVLRHPIFDKLHKAPAKK

SEQ ID NO: 13660 - protein, 392 aa, Tristellateia madagascariensis; identical to SEQ ID NO: 10287

SEQ ID NO: 13661 - protein, 95 aa, Brassica napus
  misc_feature (43)..(43): Xaa can be any naturally occurring amino acid
SENHLILISIFVGVTIVTKAKEPACFSSVIPGWFSEMSPKWPXATYGKVLVLDGVIQLTERDECACQEMITHLPLCSIPNPKRVSQSKTFALFYL

SEQ ID NO: 13662 - protein, 495 aa, Pectobacterium atrosepticum SCRI1043
MADRNLRDLLAPWVQDAPACALREMILDSRVAAAGDLFVAIVGHKADGRRYIPQAIAQGVAAIVAEADGEAADGTVREMHGVPVVYLSSLNQRLSALAGRFYQQPAEKLQLIGVTGTNGKTTTTQLLAQWSQALGEMSAVMGTVGNGLLGRAIPTENTTGSAVDVQQVLSQLVEQGATFAAMEVSSHGLVQNRVAALPFTAAVFTNLSRDHLDYHGDMESYEAAKWLLFAEHRVGQMIINADDEVGLRWLAKLPDAVAVTMENNLVPGCRGRWLKATQIDYHDNGATIAFDSSWGQGEIESRLMGAFNVSNMLLALATLLSLGYPLDKLVIAGSQLQPVCGRMEVFHAEGKPTVVVDYAHTPDALEKALEAARLHCQGKLWCVFGCGGDRDKGKRPLMGGIAEQLADRVVVTDDNPRSEEPQAIVADILSGLLDAGRVQVIHGRAEAVTSAIMQAQENDVVLVAGKGHEDYQLVGNQRLDYSDRITVARLLGVIA

SEQ ID NO: 13663 - protein, 392 aa, Tristellateia africana; identical to SEQ ID NO: 10289

SEQ ID NO: 13664 - protein, 735 aa, Saccharomyces cerevisiae
MGEFKPPLPQGAGYAIVLGLGAVFAGMMVLTTYLLKRYQKEIITAEEFTTAGRSVKTGLVAAAVVSSWIWCSTLLTSSTKEYADGIFGGYAYAAGACFQIIAFAILAIKTKQMAPNAHTYLELVRTRYGKIGHGCYLFYAIATNILVTSMLLTSGSAVFSDLTGMNTIASCFLLPVGVVVYTLFGGIKATFLTDYMHTCVIIIIVLVFAFKVYATSDVLGSPGKVYDLVREAAKRHPVDGNYQGEYMTMTSKSAGILLIINLIGNFGTVFLDNGYWNKAISASPAASLKAYAIGGLAWFAVPSLISLTMGLACLAVETSPNFPTYPDPLTSFQANSGLVLPAAAIAIMGKGGAVASLLMIFMAVTSAMSAELIAVSSVFTYDIYREYIDPRASGKKLIYTSHVACIFFGLAMSGFSVGLYYGGISMGYIYEMMGIIISSAVLPVVLTLCSKDMNLVAAVVSPILGTGLAIMSWLVCTKSLYKELTVDTTFMDYPMLTGNLVALLSPAIFIPILTYVFKPQNFDWEKMKDITRVDETAELVQADPDIQLYDAEANDKEQEEETNSLVSDSEKNDVRVNNEKLIEPNLGVVISNAIFQEDDTQLQNELDEEQRELARGLKIAYFLCVFFALAFLVVWPMPMYGSKYIFSKKFFTGWVVVMIIWLFFSAFAVCIYPLWEGRHGIYTTLRGLYWDLSGQTYKLREWQNSNPQDLHVVTSQISARAHRQSSHFGQVDEII

SEQ ID NO: 13665 - protein, 588 aa, Hordeum vulgare; identical to SEQ ID NO: 2879

SEQ ID NO: 13666 - protein, 392 aa, Heladena multiflora; identical to SEQ ID NO: 10295

SEQ ID NO: 13667 - protein, 208 aa, Melaleuca quinquenervia
MGRGRLELKRIENSNNRQVTYSKRRNGLIKKAKEISVLCDAQVSLIIFGSSGKMHEYCSSNTSLVDILDQYQTQCGKRLWDAKHENLSNELDRIKKENDNLQIQLRHLKGEDVTSLNHRELIILEDTLENGLACVRDQKDEFVMTQRRNQKQLEEETKELHFFAQHKDMMMAENARAANDGYHQKIKADFGSHAYHVQPIQPNLQRRF

SEQ ID NO: 13668 - protein, 297 aa, Zea mays; identical to SEQ ID NO: 11332

SEQ ID NO: 13669 - protein, 192 aa, Neisseria gonorrhoeae
MSIKNAVKLIEKSKARFVDLRFTDTKGKQHHFTVPARIVLEGPEEWFENGQAFDGSSIGGWKGIEASDMQLRPDASTAFVDPFYDDVTVVITCDVIDPADGQGYDRDPRSIARRAEAYLKSSGIGDTAYFGPEPEFFVFDGVEFETDMHKTRYEITSESGAWASGLHMDGQNTGHRPAVKGGYAPVAPIDCG

SEQ ID NO: 13670 - protein, 384 aa, Bunchosia armeniaca; identical to SEQ ID NO: 10301

SEQ ID NO: 13671 - protein, 170 aa, Helicobacter pylori
GSGMHTHVSIWKNNENLFGGETYKGLSEFALHFLGGVLCHARGLAAFTNASTNSYKRLIPGYEAPSILTYSANNRSASVRIPYGISKNSARFEFRFPDSSSNPYLAFAAILMAGMDGVKNKIDPGEAMDINLFKLTLDEIREKGIKQMPHTLRRSLEEMLADKQYLKESH

SEQ ID NO: 13672 - protein, 192 aa, Neisseria gonorrhoeae
MSIKNVVKLIEESEARFVDLRFTDTKGKQHHFTVPARIVLEDPEEWFENGPAFDGSSIGGWKGIEASDMQLRPDASTAFVDPFYDDVTVVITCDVIDPADGQGYDRDPRSIARRAEAYLKSSGIGDTAYFGPEPEFFVFDGVEFETDMHKTRYEITSESGAWASGLHMDGQNTGHRPAVKGGYAPVAPIDCG

SEQ ID NO: 13673 - protein, 165 aa, Alteromonadales bacterium TW-7
MQKFHQLSATSLQGQPISFDDFEGKVVLIVNTASKCGFTYQYASLQALHEKYASQGLVIIGFPCNQFGQQEPGDASQIEQGCLINYGVSFLITDKVDVNGKNAHPVFRFLKSALPGFLTRKIKWNFTKFLIAADGIPIKRYAPFTKPEKIELTIQKALSKAKSTQ

SEQ ID NO: 13674 - protein, 1108 aa, Vitis vinifera
MAEEEDRILLSSLGVTSANPEDVEREILAAATNEAENGSEAGRSTEEEFLDKSKATELSSTSQAKLYSKLRALEVEIDAVAYTVQQARNTERNENHDDKLVIQASPNNLTLQHALAADRLRSLKKTKAQLEIELSDWQKEKPSKTVEHDKVIQNLVKEEARPKKRLKEIPKSGKDLKKRKKTISFDDDVDFDAVLDAASAGFVETERDKLVRKGILTPFHKLKGFERHKIDDLASASIARAVQSISESAQARPTTKLLDSETLPKLDAPSHPFHSEVEKNKDKKRKKKRPLPSKKWRKIISHEEELLEESEDTSDNLVTSSNEEVNREDIEDADDNEPPCVTLEGGLRIPESIFSKLFDYQKVGVQWLWELHCQQVGGIIGDEMGLGKTIQVLSFLGALHFSNMYKPSIVICPVTLLRQWKREAKKWYQKNLSSKDTKKWDSLINRVLRSQSGLLITTYEQIRLQAGKLLDIKWGYAILDEGHRIRNPNAEVTILCKQLQTVHRIIMTGAPIQNKLAELWSLFDFVFPGKLGVLPVFEAEFAVPISVGGYANATPLQVSTAYRCAVVLRDLIMPYLLRRMKADVNAQLPNKTEHVLFCSLTTEQRSVYRAFLASSEVEQIFDGSRNSLYGIDVMRKICNHPDLLEREHAYQNPDYGNPERSGKMKVVAHVLKGWKEQGHRVLLFAQTQQMLDILENFLIAGGYVYRRMDGFTPIKHRMALIDEFNDSDDVFIFILTTKVGGLGTNLTGANRVIIYDPDWNPSTDMQARERAWRIGQTRDVTVYRLITRGTIEEKVYQRQIYKHFLTNKILKNPQQKRFFKARDMKDLFVLNDDGEDASTETSNIFSQLSEDVNVVGKHKDSQDKQKSIIPVSSHACGAVDEGNNSTIGPSRSGENEKDDQSDEMDKETNILRSLFDAHRLHSAVNHDAIMNAHGDEKMRLEEEASRVAKRASEALRQSQMLRSRESISVPTWTGRSGAAGAPSSVSRKFGSTVSSQLINRSKSSEESSSNGMSKPNGIAAGASADSGPSSSRSTHNLSSVQPEVLIRKICTFIQQKGGSTNSTSIVQHFKDRIPSKDLPLFKNLLKEIATLEKDPNGSSWVLKPEYRL

SEQ ID NO: 13675 - protein, 52 aa, Arabidopsis thaliana
RITLKRASFPDTTTKKGKDYAVGPILLGFFVFVVIGSSLFHIIRTATSEGML

SEQ ID NO: 13676 - protein, 392 aa, Thryallis longifolia; identical to SEQ ID NO: 10309

SEQ ID NO: 13677 - protein, 232 aa, Thottea tomentosa; identical to SEQ ID NO: 10308

SEQ ID NO: 13678 - protein, 192 aa, Neisseria gonorrhoeae
MSIKNAVKLIEESEARFVDLRFTDTKGKQHHFTVPARIVLEDPEEWFENGPAFDGSSIGGWKGIEASDMQLRPDASTAFVDPFYDDVTVVITCDVIDPADGQGYDRNPRSIARRAEAYLKSSGIGDTAYFGPEPEFFVFDGVEFETDMHKTRYEITSESGAWASGLHMDGQNTGHRPAVKGGYAPVAPIDCG

SEQ ID NO: 13679 - protein, 303 aa, Daucus carota; identical to SEQ ID NO: 1046

SEQ ID NO: 13680 - protein, 574 aa, Yarrowia lipolytica CLIB122
MTTIIHKSTFPDIELFQGSITDFIRTGAYAEDDYKPCMIDAETGEQLTQKQILDCADQFRSLLYQHGVQKTPNRDERIGDVVIPFIDNNIYLPAIHYACLELGCCMNPASTQQTPLELSKQIRVTDPKVIIYQRKYRKTVMHAIDLVCYTNFPIVIEFETMLFLRNSVPPPPKKAKFHITSTEQARKRIAYLGMSSGTSGKSKAVRLSHHNIVACSQVSQVTFPALYKASNVCVAVLPSCHVFGLYIFFMVLPRSGGTTIMHTKFDLKQLLESQKKYKANFLPLVPPIAVQLAKNPMVKNYADSLKQVKLIMSAAAPLGAEVTQSLIKAIGPQVRVVQGYGMTETSPCVTLFDPADPHLHIKACGKLVPNCEVRIVADGVDQPAYSGSVSDVAKNKTDNLPVGEIWVRGPQVMDGYHKNKSATSEAFVEANDSSVCYNTKWLRTGDVGLVDSLGRFMIVDRTKEMIKSMSKQVAPAELEDMLLAHADVSDAAVIGVENEAKGTEQIRAFLVLKKGGDALEVKKWMDSKLPKYKQLHGGVVVIDQIPKSQAGKILRRMLRLRQDDVVLGTDQAKL

SEQ ID NO: 13681 - protein, 152 aa, Casuarina glauca
MALTEKQEALLKQSWEVLKQNIPAHSLRLFALILEAAPESKYVFSFLKDSNEIPENNPKLKAHAAVIFKTICESATELRQKGHAVWDNNTLKRLGSIHLKNKITDPHFEVMKGALLGTIKEAIKENWSDEMGCAWTEAYNQLVATIKAEMKE

SEQ ID NO: 13682 - protein, 300 aa, Sulfolobus tokodaii str. 7
MYEWHWHIEWQTPYEFHGHAITKVIAEEKTPYQRALLVELARFGKALILDGKIQSTITDEFIYHEALVHPLLLSINNPEKILILGGGEGATLREVLKHKTIKNVTMVDIDPVVIDFAKKYLQEWHQGAFDNPKSKLVIEDGYKFIKETKEKFDAVVIDLTDPIKDSPSQMLYTKEFYEEVKRISKWGIVTQATSPSFSLETFSIIYNTIKHVFKKVSAGITYVPAFDGLWGFVYASDEVNPAEFSKEEINNRIKERIDGSLRFYDGETHITMFSIPKHIREVLEKENKISTRENPVAVPA

SEQ ID NO: 13683 - protein, 192 aa, Neisseria gonorrhoeae
MSIKNAVKLIEESEARFVDLRFTDTKGKQHHFTVPARIVLEDPEEWFENGPAFDGSSIGGWKGIEASDMQLRPDASTAFVDPFYDDVTVVITCDVIDPADGQGYDRDPRSIARRAEAYLKSSGIGDTAYFGPEPEFFVFDGVEFETDMHKTRYEITSESGAWASGLHMDGQNTGHRPAVKGGYAPVAPIDCG

SEQ ID NO: 13684 - protein, 210 aa, Thermobifida fusca YX
MTLPNSLCRIACATILGPRGSEHGTVRHAARQDSPVGSSDGQGAEARLRDMKIYQSELRTLEGEPFRLPQTQLLLIVNVASKCGLTPQYSGLERLQEAYAYRGFSVIGVPCNQFGGQEPGDAQEIRLFCATTYGISFPILEKMEVNGPNRHPLYVELTKARDSQGLAGDVQWNFEKFLVAPGGRVLYRFRPQVEPEDPEIIRAIEENLPN

SEQ ID NO: 13685 - protein, 99 aa, Salmonella enterica
GSGMHCHMSLAKNGTNLFSGDKYAGLSEQALYYIGGVIKHAKAINALANPTTNSYKRLVPGYEAPVMLAYSARNRSASIRIPVVASPKARRIEVRFPDP

SEQ ID NO: 13686 - protein, 131 aa, Medicago sativa
KSFKQNPGNSVLFYTIILEKAPAAKGMFSFLKDSAGVQDSPKLQSHAEKVFGMVRDSAAQLRATGGVVLGDATLGAIHIQKGVVDPHFAVVKEALLKTIKEVSGDKWSEELNTAWEVAYDALATAIKKAMV

SEQ ID NO: 13687 - protein, 156 aa, Citrus medica
MDQAISSVVRKLQMVNTSDHNSVVSINIFVALLCASIVIGHLLEESRWTNESITALLIGVCAGVIILLTTGGKSSHLFVFSEDLFFIYVLPPIIFNAGFQVKKKQFFRNFITIMLFGAIGTLVSCTIISLAIGAIFAATDSVCTLQVLNQDDTPLL

SEQ ID NO: 13688 - protein, 83 aa, Salmonella enterica
TNLFSGDKYAGLSEQALYYIGGVIKHAKAINALANPTTNSYKRLVPGYEAPVMLAYSARNRSASIRIPVVASPKARRIEVRFP

SEQ ID NO: 13689 - protein, 147 aa, Medicago sativa
MSFTDKQEALVNSSWEAFKQNLPRYSVFFYTVILEKAPAAKGLFSFLKNSAEVQDSPQLQAHAEKVFGLVRDSAVQLRATGGVVLGDATLGAIHVRKGVVDPHFVVVKEALLKTIKEAAGDKWSEELNTAWEVAYDALATAIKKAMS

SEQ ID NO: 13690 - protein, 191 aa, Bradyrhizobium sp. BTAi1
MIDRRTVLFGIGASMAGSAFISPAARAENAVSKTTAYRFSFPALSGDPIRLAEFTGKPVLVVNTASQCGYTPQYTGLQQLWSEFHERGLSIIAVPSNDFNQEPGVAGDIAELANKQFGVTFPMTAKAVVTGSNAHPFYRWAAEARPKDTPRWNFHKYLIGRDGYIADVFASSVEPTDTRVKTAIARNLADG

SEQ ID NO: 13691 - protein, 967 aa, Oryza sativa Japonica Group
MPANPKLAAKPSPSTAEPPPQTASRPKATAKPPLGAGYRDNDDDDDDFQSPPRASSRAARALKPSGNGAASRRPSKRLKPSSSCCSGKENRPAAAGSGRAPAGRAASKGAGVGETLGVVSRVSSGVPGGDKARGGGICGLLRCGSDDFSSVSNGKKGLDRYWRRDGGLHSRPNPMDSTVSMPDATCDLENGGSQVAQMLSSNDRISVQLEGNAKVELGKSESDPTTMRKERNGSGACESDHPARLIEPRLLTLVTNCDFGGADSMDSKELGSAIHPSVSKDRNVENESGGASVCTFALHNRNCHSSCVESELEMLNAKYDLGPRDCKESQEGPGLCSLISEERTVAAEGDATFTFEERGNTSSGLEACKGSHCLDPVEPKLMDSCATHALEGDGCDDFEIGTQLNELINLCMEDYTEGPLSNKVACLEGNGMDCGSFNSSCEVQCPLCGSNISDLSEELRLVHTNSCLDGDKPAKEPNSDNQNEPCGESNVEKRRVMEWLRNLGLSKYEEIFIKEEVDWETLQWLTEEDLLGMGITSLGPRKKIAHALCELRKKNNDANDLAADMLNLENTKKAKIPMNGNKLITEYFRCPSSDQRQKKACKVNTPSNLNSQKKSNAKATGGRRTVKGKVKDTPIWCCIPGTPFRVDAFRYLRGDCCHWFLTHFHVDHYQGLTKSFCHGKIYCSSVTANLVHYKIGIPWDRLHVLPLNEKITIAGVNLTCFDANHCPGAVIILFEPSNGKAVLHTGDFRFSSEMANNRVLQSSPIHTLILDTTYCNPRYDFPTQEIVIQFVIEAIQAEAFNPKTLFLIGSYTIGKERLYMEVARLLQKKIYVGAAKLQILKHLGLPQEIMHWFTANEAESHIHVVPMWTLASFKRMKYLSTQYADRFDLIVAFCPTGWSFGKGKKRTPGRKWQQGAIIRYEVPYSEHSSFTELREFVRFISPEHIIPSVNNDGPDSANAMLAQLLND

SEQ ID NO: 13692 - protein, 132 aa, Salmonella enterica
SGMHCHMSLAKNGTNLFSGDKYAGLSEQALYYIGGVIKHAKAINALANPTTNSYKRLVPGYEAPVMLAYSARNRSASIRIPVVASPKARRIEVRFPDPAANPYLCFAALLMAGLDGIKNKIHPGEAMDKNLY

SEQ ID NO: 13693 - protein, 111 aa, Salmonella enterica
SLAKNGTNLFSGDKYAGLSEQALYYIGGVIKHAKAINALANPTTNSYKRLVPGYEAPVMLAYSARNRSASIRIPVVASPKARRIEVRFPDPAANPYLCFAALLMAGLDGIK

SEQ ID NO: 13694 - protein, 116 aa, Salmonella enterica
LAKNGTNLFSGDKYAGLSEQALYYIGGVIKHAKAINALANPTTNSYKRLVPGYEAPVMLAYSARNRSASIRIPVVASPKARRIEVRFPDPAANPYLCFAALLMAGLDGIKNKIHPG

SEQ ID NO: 13695 - protein, 491 aa, Listeria monocytogenes str. 4b F2365
MKLNELMQAIPVFTGEASETIEISHIAQDSRKVKPGTLFICIDGELVDGHQFASRAVELGAVAIIAEKQLDVSIPVIYVRDSKRAMAMLADYFYGSPTQALKLVGITGTNGKTTVSHLVEQIVRENGEQTGLIGTMYRKIGDQILETKNTTPDSLTLQETFRDMLLSGVSTAVMEVSSHALVQGRVYGSDYDVAVFMNLSQDHLDYHHTMEEYANAKSLLFAQLGNSYHTSNPKIAVLNADDEESVRMQKATAAHVITFGIKQQADFKANNIRITSHGSTFDLRTPIGNFTLKIKMIGNFSVYNVLAAIATSFALHIPMEKAIKTVESIPGVKGRFELVHAGQEFPVIVDYAHTPDGLLNVLETIAEFAEKRVFVVVGCGGDRDKGKRPQMAKIAVDYATNPIFTSDNPRSENPRAIIEDMIQGVPYSDSYVVHENRRDAIRFAVNEAEAGDVILIAGKGHEDYQVIGDEVIDFDDRVEARIAIEKKLGLA

SEQ ID NO: 13696 - protein, 314 aa, Zea mays
FLENFVGSMSSGIGVGLISALLFKYAALGVENLHNLESCLFVLFPYFSYMLAEGIGLSGIISILFTGIVMKRYTFSNLSDDSQCFTARFFHLLSSLAEAFVFIYMGFDIAIERQSWSHIGFIFFSVIFILVARAANVFSCAYILNLARPPHCQIPRQYQQALWYSGLRGAMAFALALQSVHDLPDGHGETIFTATTSIVVLTVLLIGGSTGTMLEALQVVGDSNRYCQLYEESSNGNDTGYTGQNYDEGASTSSKFRSKLRDLRRSTSSFALLDRNYLTPIFTSQNGDCNDNTTESPNEELTIFRGPGDLEVHD

SEQ ID NO: 13697 - protein, 349 aa, Pseudomonas aeruginosa UCBPP-PA14
MPAEVAAGLPPLPPNHFYFYPPDPLLEGDGAITAIEDSDPFDQYVYRLRRVLYQGRTRWQNVLIADTYNYDRVLMLDGAIQSAESDESLYHELLVQPAMLAHDEPRDVLIIGGGEGATLREVLSHASVRRAVMVDLDRELVELCREHLFQWHQGAFDDPRCELLAEDGRAYLERDPSLYDVVIIDVVDMLDNGPAQALYTRQFYELLHSRLRPGGVVAVQGLEFSHSDDKPHAALARTLRSVFSQVHSYRATVPSFLSSWGFLLASDWLDANHWQAEDIDRRIERKLGPLWLDHLDGDYLKACFVMDRETRFLLAQPGPVLEDGVPFVAPPDIEEIEFGPAQLPALART

SEQ ID NO: 13698 - protein, 986 aa, Vitis vinifera
MDGGLDEAKEEEKPVKVKLQGRRRLCKLSSNDDDENTKTGDGFYEPKFSEISDFDSPHHCSNAGGNEIRGILNDLSSRLESLSIETKRNPKRADQTRESLNFAAADVAINQEKKLDVPEYASASSSFSVTSDGADSSPDAAWVGDGVDNVVDDHEAGSEVGSVHDVDNFISRVHGNRHNGEAANSRRVNVNSVPMGQSSVCDFEEEEEDGNSDDCVILSGKKVVEAAVSRGSKFKEEYDDSDVVDVLDDCTDGSVLEDESAITLSGPRSTYKLPGKIAKMLYPHQRDGLKWLWSLHCQGKGGILGDDMGLGKTMQICGFLAGLFHSCLLRRAVVVAPKTLLSHWIKELSAVGLSEKTREYYGTCTKTRQYELQYVLQDKGVLLTTYDIVRNNSKSLCGGNYFHDKRSEDDFTWDYMILDEGHLIKNPSTQRAKSLMEIPCAHRIVVSGTPIQNNLKVMSSLLWNFFFPRFKVKYESPILRGNDKNASDREKHISSRVAKELRERIQPYFLRRLKNEVFHEDDASETAKLSKKNEIIVWLRLTSCQRQLYEAFLNSEIVLSAFDGSPLAAITILKKICDHPLLLTKRAVEDVLEGMDSMLNQEDLGMASKLAMHLATAYERDDFLEKNDNVSSKMSFILALLDTLIPEGHNVLIFSQTRKMLNLIEELLISNGYKFLRIDGTTKANDRVKIVNDFQDGVGAPIFLLTSQVGGLGLTLTKADRVIVVDPAWNPSTDNQSVDRAYRIGQTKDVIVYRLMTCGTIEEKIYRKQIFKGGLFRTATEHKEQTRYFSQQDLQELFSLPKHGFDVSVTQQQLHEEHDHQHNMDESLKEHIKFLETQGIAGVSHHNLLFSKTARVLVVDEEEEVASRTGTTSVMNKSAGSSHEQDVEWAQYAFKPKEVNLHKTNSSADSAGKLTESEIKGRINRLSQILANKATVSKLPDKGERIQKQIAELNLELDKMRMTKRIETEVIDLDDVTGKLENVLNL

SEQ ID NO: 13699 - protein, 168 aa, Litchi chinensis
MASQSKTGSVYDFTVKDARGNDVDLSTYKGKVLLIVNVASQCGLTNSNYTELSQLYEKYKNQGLEILAFPCNQFGGQEPGNNEQILETACTRFKAEFPIFDKVEVNGDNAAPLYKHLKSSKGGLFGDSIKWNFSKFLVDKEGNVVDRYAPTTSPLSIEKDVKKLLGIA

SEQ ID NO: 13700 - protein, 390 aa, Echinopterys eglandulosa; identical to SEQ ID NO: 10329

SEQ ID NO: 13701 - protein, 713 aa, Physcomitrella patens subsp. patens
MASTGCPANLPGLEYYTFANGVCSRQDSYFGGKPLLSQGIGYAVVLGFGALFALVTSFLVWLEQRYIFSRHNSEWFNTAGRNIKTGLIASVIVSQWTWAATILQSSNVAWQYGVSGPFWYASGATVQVLLFGVLAIEIKRKAPGAHTICEIIRARWGTATHIVFLCFCFATNIIVTAMLLLGGSAVVNALTGMNLYAASFLIPLGVVVYTLHGGLKATFLASYLHSVIVHAVLVVFVFLVYVTSEKLGSPKDVYAKLHSVVAIQDCTAPLNHNTQACGPVKGNNGGSYLTMLSTGGLVFGIINIVGNFGTVFVDNGYWMSAIAARPSSTHKGYLLGGLVWFAVPFSLATSLGLGSLALGLPLTADEANHGLVPPATATALLGKSGAILLLTMLFMAVTSAGSSELIAFSSLCTYDIYRTYVNPKATGKQILWVSRLIVLLFGCFMGVLAVVLNKAGVSLGWMYLAMGVFIGSAVIPVAFLLLWRKANAKGAICGSIIGMLAGVITWLVVTAVMYKRVNLDTTGRNAPMLAGNLVSILIGGAVHAVMSFVAPQNYNWDTTKHITMVELDASDVPDEEYSEAKLKHARAWIIKWGVGFTILIVIIWPIFALPAKVFSEGYFTFWAAIAIIWGTVGSAVIIFLPLYESWDTISFIVMGMFTSDIMYERLDDISSRLRAIMTSMPEAERLYLLEKEKHKIEEANESIMAKEKELNDG

SEQ ID NO: 13702 - protein, 271 aa, Microcoleus chthonoplastes PCC 7420
MPQSTKTAIIVIGGAEDKVHGREILQTFFRRSGAGEARIAIIPSASREPAIIGDRYQRIFEDMGAKEIKVLDVRDRAQGSDAELQEYVETCTGVFMTGGDQLRLCGLLSDTPLMEKVRQRAHLGEITLAGTSAGAAVMGHHMIAGGGSGESPNRSLVDMATGLGIIPEVIVDQHFLNRNRIARLMSAIAMHPDRLGIGIDEDTCIIFERDGWLQVMGKGTVTIIDPGELSHTNQVDIGSTDPIGLHNLRVHVLCHGDRYHVYKRALMPVNA

SEQ ID NO: 13703 - protein, 171 aa, Candida albicans SC5314
MGNELLSTARIYTFKIPDAYNNVIDFDQFKNKVILIVNVASLCGFTPQYKELQLLYEKYHERGLEILGFPCNQFGNQEPLQEEEIVESCRRNFGVSFPIMKKTKVNIDCDGHESELYKYLKSEKPGEVGFKGVRWNFEKFIVNRKGEVVARFNSLITPLQLEGFIEQLLSE

SEQ ID NO: 13704 - protein, 392 aa, Dicella nucifera; identical to SEQ ID NO: 10331

SEQ ID NO: 13705 - protein, 685 aa, Idiomarina loihiensis L2TR
MKHWAVKKCALALMCVVPVAVAIPPEHKISELPELEQEAQHDTASERIASYFTRYHFSSLTLDNELSEQIHERYFDLLDYSKMFLLKEDIEAAQEYRHLFDDMLKRGELDVAYDIYQKSLERRFQRYEYALSILDEDKPMDFSVEGDKYYYDREDADWAESKEELDELWQNRVKYDALNLKLAGKEWPEIVETLGKRYNSALNRLTKSKSEDVFQTVMNAFARSVEPHTSYLSPSNSERFQQNMNLELEGIGAVLQSEYDYTIIRSLVPGGPADKTDELSPEDKIIAVGQGSGEDEEEFVDIIGMRLDDVVELIKGPKGTTVRLQVLKASQGAGGTPSEVEIVRDKVKLEDRAAKAEVKEFEEGPYKGRRLGVIEIPGFYNNLTADVKKLIEDLESQKVEGLVIDLRGNGGGALTEAIGLSGLFIDKGPVVQVSDGRGRVDVSEDKDGKTYYDGPLFVMVDRYSASASEIFAAAMQDYERALIIGENTFGKGTVQQHRGLARRFDFYDKPLGSVQYTIAKFYRIDGGSTQLRGVQPDVVFPSFVEASDWGESKEDNALPWDKIDKASYSPVGEINSAEVKDLQQQLNQRIEDDPEFSYIFEEIERYREEKDKTWVSLVLTEREKKQEQQKAKQLERVNERLKRAGKEPIENVEDAPDEFTEVDPFLDQAALVAFDFIDKNQLASN

SEQ ID NO: 13706 - protein, 859 aa, Candida albicans SC5314
MGLGKTLQTISFLGYLRFIRGINGPHLVITPKSTLDNWQREFNRWIPDIKVLVLQGDKDERAELIKNKVMTCDFDVIVSSYEIVIREKATLKKFDWQYIIIDEAHRIKNEESLLSQIIRMFHSRNRLLITGTPLQNNLRELWALLNFIVPDVFAENESFDEWFQKDSNNENGGEDQVVSQLHKVLKPFLLRRIKADVEKSLLPKKELNVYVKMSPMQKNLYQKILEKDIDAVNGANGKKESKTRLLNIVMQLRKCCNHPYLFEGVEPGPPYTTDEHLVYNSQKMLILDQLLKKFQQEGSRVLIFSQMSRMLDILEDYCYFREYQYCRIDGQTEHSDRINAIDEYNKPGSEKFIFLLTTRAGGLGINLTSADIVILFDSDWNPQADLQAMDRAHRIGQTKQVKVFRFITERAIEEKVLERAAQKLRLDQLVIQQGRNTGGLDGQQSSKAASKNELLDMIQFGAADMFQKTDGEGESIDIEQILKRSEERTQELNKKYAKLDLNALQNFTNDESVYEWNGENFKKKEPTANAQIPQVWINPGKRERKENYSIDMYYKDVLNTGGRTASNAPKSGPKPPKQLNVYDHQFYPAKVLELYELEKNYYRKQVHYKVPLKAGTDEASQKENELEQKLEQEEIENSRPLTDEEKQLKEELMQKGYSNWNRRDFHHFISLSTKYGRNSIRLIASEFEDKTEEEVREYAKAFWQNYQEIDGYERYINQIEQGEEKIIKVKIQKEALRRKLSQYRYPLQELVLKFPPASTNKRVFSEEEDRFLLVQLYRFGIDSPDVYDRIREAIRQSPLFQLDFFFQSRNAGEISRRCNTLLGCILKEISPEQSSMPATNGKRSKDSTPEVKNKKQKQT

SEQ ID NO: 13707 - protein, 392 aa, Heteropterys thyrsoidea; identical to SEQ ID NO: 10332

SEQ ID NO: 13708 - protein, 295 aa, Yarrowia lipolytica CLIB122
MSKITYSIFGSSLVEVYTGMSMYKLLLALATLQLTCLPTCSLNLFYHAYFEGPSCPAYHTIHTMICLPGDQIDFPKQDLTLGPGFLDDPLAADPIPIVAGEVHRTDPEDKKTKNQNLVYIDSDTRRYIPAVNDNVIGTVTTRHAEGYKVSVSDLSPGVQLNAMAFPNASKKNRVNLANDALVYARVSSASREVEAEIECIDPQSGKAGGYGELKDGFCFDAPIAFTRQLLFKGHTVLDTIGELVPFEIAIGVNGKIWVKSEDVPTTLKIYQCIDKCREWPEDQVRENVEQIMSAP

SEQ ID NO: 13709 - protein, 292 aa, Yarrowia lipolytica CLIB122
MTELTHPSIVDGWFREISDTMWPGQAMALRVNQILHVEKSKYQDVLVFESTDYGNVLVLDGAIQATERDEYAYQEMIAHLALNSHPNPKKVLVIGGGDGGVLREIVKHDCVEEAVLCDIDEAVPRVSKQYLPTMSVGFNHPKTKVHIGDGFKFLQEYQNTFDVIITDSSDPEGPAASLFQKPYFELLSGALTEKGVITTQGESIWLHMKIIKELRQACKQVFPSADYAYCTIPTYPSGQIGFMVCSKDKDANLRKPLRSVSPEEESKLYRYYNKDIHSASFVLPTWARDDLA

SEQ ID NO: 13710 - protein, 619 aa, Pediococcus pentosaceus ATCC 25745
MASNKIIGIDLGTTNSAVAVMDGDKPKIITNPEGARTTPSVVAFKNGETQVGEVAKRQAITNPDTIASIKRHIGEAGYKVTVDGKSYTPQEVSAMILSYIKKFAEDYLGEEVDKAVITVPAYFDDSQRQATKDAGKIAGLDVKRIINEPTASSLAYGLDQNGKDEKILVYDLGGGTFDVSVLELGDGVFQVLSTNGDTHLGGDDFDQKIIDWLVDEFKKDNGVDLSQDKMALQRLKDAAEKAKKDLSGVSEAQISLPFISAGEAGPLHLEKTLTRAQFDQLTADLVERTKAPVENALKDAGLSASEIDEVILNGGSTRIPAVQEAVKNWTGKEPNHSINPDEAVALGAAVQGGVLTGDVKDVVLLDVTPLSLGIETMGGVFTKLIDRNTTIPTSKSQVFSTAADNQPAVDIHVLQGERPMAADNKTLGRFQLTDIPAAPRGIPQIEVKFDIDKNGIVNVSATDKGTGKEQKITIKSSSGLSDEEIDRMMKEAKENEEADKKRKEEVDLRNEVDQLIFTTDKTLKDLEGKVSEDEIKKAKDAKEALEKAQKDNNLDEMKAKKDDLSKIVQDLSVKLYQQAQEAQGQAADGAQANAGDAKTDDDNTVNGDFEEVDPDKDNK

SEQ ID NO: 13711 - protein, 381 aa, Heteropterys leona; identical to SEQ ID NO: 10336

SEQ ID NO: 13712 - protein, 392 aa, Tetrapterys microphylla; identical to SEQ ID NO: 10339

SEQ ID NO: 13713 - protein, 444 aa, Bacillus anthracis str. Ames
MARYTKEDIFRLAKEENVKYIRLQFTDLLGVIKNVEIPVSQLTKALDNKMMFDGSSIEGFVRIEESDMYLYPDLDTWVIFPWTAEKGKVARLICDIYNADGTPFEGDPRNNLKRVLKEMEALGFSDFNLGPEPEFFLFKVDEKGNPTLELNDNGGYFDLAPMDLGENCRRDIVLELEEMGFEIEASHHEVAPGQHEIDFKYANAIRSCDDIQTFKLVVKTIARKHGLHATFMPKPLYGVNGSGMHCNLSLFKNGENVFFDQNGDLQLSDDARHFIAGILKHAPAFTAVANPTVNSYKRLVPGYEAPCYVAWSAQNRSPLVRIPASRGISTRVEVRSVDPAANPYLVMATLLAAGLDGIKNKLTPPAAVDRNIYVMTKEEREEAGIVDLPATLAQALVTLQSNEVISNALGDHLLEHFIEAKEIEWDIFRTQVHQWERDQYMSLY

SEQ ID NO: 13714 - protein, 414 aa, Nitrosococcus oceani C-27
MVLAERSENRPEALPLEELRAFSEVFGQIKRSYVEIVDDKTLIEDSIRGMLTGLDPHSAYLDPEAYKELRIGTSGEFGGLGIEVGMEDGFVRVVAPIDDTPAQKAGINAGDLIVRIDDTPVKGMSLSDAVQRMRGKPGTDILLTIIREGEEQPLKFTITRAIIKVKSVKNRTLEEGYGYLRISQFQTETASNLQKAIEKLKKENGGKLKGLVLDLRNNPGGVLSAAIEVSDAFLEKGIIVYTEGRDLESKQKFRATSGDALKGSPIVILVNGGSASASEIVSGALQDHHRAIVVGSRTFGKGSVQTILPLTENTALKLTTARYYTPSGRSIQAEGIIPDIELESVKVSASALSDINPVREANLSRHLSNGRKAEEKKESTEKVKKTSLATEDYPLYEALNLLKGLSIAASQQYR

SEQ ID NO: 13715 - protein, 229 aa, Glycine max
MGTMGAAANNTSEEANFSPATRMKNNAPNFSSGLMSSRAEVGNKSNTQNNNAENEGFAESQGNEFIPAGFPVGPWNDSAIMSDNVTGLKRFRDEDVKPFSGGLNAPESQNETGGQQPSSALAHQLSLPNTSAEMAAIEKFLQLSDSVPCKIRAKRGCATHPRSIAERVRRTKISERMRKLQDLVPNMDKQTNTADMLDLAVEYIKDLQNQVEALSDNRAKCTCLHKKQQ

SEQ ID NO: 13716 - protein, 826 aa, Kluyveromyces lactis NRRL Y-1140
MAMDIIQMMKRGSGARAKPVASYKEKSENDLTADVYLDSDSDTDVKDTTDEPIWLDGKGPDEDDDTLLDSDDSDGSDEELDGLIDEKSAGRKASSEDAAKNEDSDENFENDSHTISLKIKKLQEFVQQSQVYSSIIADTLLERAGQNDEDETPQKKKQKKEAIQTLMKRDEPKDEGSPSTSLSSSFMQPSFLKNCQLKPYQKEGLNWLITLYENGLNGILADEMGLGKTIQSIALLAFIYEMDTKGPFLIAAPLSTVENWMNEFARFAPDIPVLKYYNSEGQAARHAMMGKFFKNNKGEGVIITSYEIIIRDIELILSYQWKFLIVDEGHRLKNINCKLIRELKRINTSNRLLLTGTPLQNNLGELWSLLNFILPNIFSDFEIFNKWFDFSDLNLESSSEKLTKIINDELEKNLISNLHTILKPFLLRRLKKNVLAGSLPPKREYIITCPVTPLQKKYYKQALKGNLKQTIQKQAIKDFFTLNAEYIGTVSNKSIRDFIEWKLSADSQDIPNDNIGKMEKLYDMHIHKELLNKRLQNMMIQLRQIVNSTYLFYFPLLEPTDLTLENLLKTSGKLQVLQKLVPELIKKKHKVLIFSQFVSMLDLIEDWSELNNFISCRIDGSMQNNSRKEQIEEFSKKGSKANLFLLSTRAAGLGINLTAADSVIIFDSDWNPQVDLQAMDRAHRIGQTKPVIVYRLYCDNTIENVIMTRAVNKRKLEKLVIQMGKFNTLKKLAFNEQTFLKMNGSSLATTTKQSANKELVKELSQLLISNETNQGQADTSKIENSDDILEESEMKELLDRSPPAYIPHETQFNHIRLFETTTGFDN

SEQ ID NO: 13717 - protein, 946 aa, Oryza sativa Japonica Group
MYYRRQRKASSEANANVFMPGGPNDISFPASNRDHDWGYGGVGKEWEASYARKLQLMNFLSSLHQRTANPLVTTRMDANMDTPLEQKQKDSSAIIVLDSDDEDGYTEGCEQLTSENNKQQAPSGLTSPYTTWIVSSAKDQVNGTLHVDGVQSTQIVPYYGQNAPLINQFPLQTSWQPSIQYERVILQKRPEEQRVQDLVAASHAEKIAETQVLLTLPTLPNERKRRKTEPTTLVDVDGGTNLGKRKRKNHQNQAAVDSNLDLQQNDVPSQSYRTMIEEEKPVKESDGLEDLWKDFSLAAECTKLDTNEDMSNEKDVDDENEMDDDCNHDIRIHEDLGHVCRICGMIVRKAETIIDYQWKKASRTRTNYYESRSKDADEIDTGAVKVSEDFIVSDIAIHPRHAKQMRPHQLEGFSFLVKNLVGDKPGGCILAHAPGSGKTFMLISFIQSFLAKYPSARPLVVLPKGILGTWKREFQRWQVEDIPLYDFYSVKADKRVEQLEVLKSWEAQMSILFLGYKQFSRIICGDGDGNIAAACRDRLLMVPNLLILDEGHTPRNRETDVLASLKRVQTPRKVVLSGTLFQNHVSEVFNILDLVRPKFLKMESSRPIARRIMSQVAISGIRSLKGVHDSAFTESVEDTLLNDDNFTRKAHVIRSLRELTKDVLHYYKGDILDELPGLVDFSVFLKLSTKQKEIVHKIEAYEKFKRSAVGTALYIHPCLSEISEGDAADRASNLTDATVDSLIESIIIKDGVKAKFFFNILSLANSAGEKLLAFSQYILPMKFLERLLVKRLGWHVGKEIFMISGDTSADDREVAMDQFNNSADAKVLFGSIKACGEGISLVGASRVIILDVHLNPSVTRQAIGRAFRPGQQKKVFVYRLVAADSPEVKFHETAFKKEVIPKLWFEWSELCTTEDFKLNQVDIDDSEDELLEANAIRQDIKALYRR

SEQ ID NO: 13718 - protein, 264 aa, Zea mays
MSSMESRPGRTNLVEPIGHGAALPSGGQAVQPWWTSSGAVLGAVSPAVVAVAPGSGTGISLSSSPAGGSGGGGAAKGAASDESSEDSRRSGEPKDGSASQEKNHATSQIPALAPEYLAPYSQLELNQSIASAAYQYPDPYYAGMVAPYGSHAVAHFQLPGLTQSRMPLPLEVSEEPVYVNAKQYHGILRRRQSRAKAELEKKVVKARKPYLHESRHQHAMRRARGNGGRFLNTKKSDSGAPNGGENAEHLHVPPDLLQLRQNEA

SEQ ID NO: 13719 - protein, 636 aa, Mannheimia succiniciproducens MBEL55E
MGKIIGIDLGTTNSCVAVMDGDKPRVIENAEGERTTPSIIAYTQDNEVLVGQPAKRQAVTNPKNTLFAIKRLIGRRFEDQEVQRDVNIMPFQIIKADNGDAWVDVKGDKLAPPQISAEVLKKMKKTAEDFLGETVTEAVITVPAYFNDAQRQATKDAGRIAGLEVKRIINEPTAAALAYGLDKGKGNQTIAVYDLGGGTFDLSIIEIDEVGGEKTFEVLATNGDTHLGGEDFDNRVINYLVDEFKKEQGVDLRNDPLAMQRLKEAGEKAKIELSSAQQTDVNLPYITADATGPKHLNIKLTRAKLEALVEDLVARSMEPVKVALSDAGLSVSQIDDVILVGGQTRMPLVQQKVAEFFGKEPRKDVNPDEAVAVGAAVQGGVLAGNVTDVLLLDVTPLSLGIETMGGVMTTLIEKNTTIPTKKSQVFSTAEDNQSAVTIHVLQGERKQASANKSLGQFNLEGINPAPRGMPQIEVTFDIDADGIIHVSAKDKGTGKEQQITIKASSGLSDEEIQQMVRDAEANAEADRKFEELVQARNQADALVHSTRKQLTEAGDKLSADDKAPIEKAVNELEAAAKGEDKAEIEAKIQALIQVSEKLMQAAQQQAQADAGAQQAQGNNGGDDVVDAEFEEVKDNK

SEQ ID NO: 13720 - protein, 629 aa, Coprinopsis cinerea okayama7#130
MAPVRSRSTSRNVLSSLSVFFFAFLALLFVTTPAHAEEAHPEYGTVIGIDLGTTYSCVGVTRGGVVEIIANDQGHRITPSWVSFTDEERLVGDSAKNAFHSNPENTVFDAKRLIGRKLQDDEVQRDVKHWPFKVREKEGKPVISVKHKGETRDFTPEEISAMILGKMKETAEAYLGNKVTHAVVTVPAYFNDAQRQATKDAGTIAGLQVLRIINEPTAAAIAYGLNKKGGESQIIVYDLGGGTFDVSLLSIDDGVFEVLATAGDTHLGGEDFDNRIIEYLTKQYKKKTGTDVSRNLRALGKLKREVEKAKRTLSSQQSVRIEIESFEDGNDFSETLTRAKFEELNMDLFRKTLKPVEQVLKDANVKKEDVDEIVLGGILSGAEGTSEVVLVDVCPLTLGIETTGGVMTKLIPRNTVIPTRKSQIFSTAADNQPTVLIQVFEGERTLTKDNNLLGKFELSGIPPAPRGVPQIEVTFEIDANGIMKVSAADKGTGKSESITITNEKGRLSQEEIDRMVADAEKFAAEDEAQRKRIEALNALSSFVYGLKSQLGDKEGMGGKLADDDKKTVTEIIKDTTDWIDEHGQSASTEDLEEKLAEVQGLINPITSKLYSQGSSDSDDDNLGRDHDEL

SEQ ID NO: 13721 - protein, 396 aa, Arabidopsis thaliana; identical to SEQ ID NO: 11286

SEQ ID NO: 13722 - protein, 424 aa, Adiantum capillus-veneris; identical to SEQ ID NO: 10362

SEQ ID NO: 13723 - protein, 392 aa, Mascagnia anisopetala; identical to SEQ ID NO: 10363

SEQ ID NO: 13724 - protein, 392 aa, Mascagnia chasei; identical to SEQ ID NO: 10366

SEQ ID NO: 13725 - protein, 1634 aa, Oryza sativa Japonica Group
MASPPPFDICGDLDDDPTPPAPTPLAAPTPNGLNDRLLRLTRTHQRGPSQNPNPNPNPNPKPPPPPPPQEPEPAKVKLAGRRRLCKLSTAGDESAGDDDSIRDILDDLTTRLDSLSVDRPTARPRPHVSPLPCALHADPDPSQSQLNDGTKPSSSFVDCDDDDDDAGGAYGGFGVKEEVTRKVFKASSSFGGRGNDDKMKAKGAYAFDTVSRKTTTESKASKFFGDYDDEDDIDQDAENGKENHADDVGWEKTEDFKMEPTGTGVTRKPYNLPGRIFNMLYPHQREGLRWLWVLHCRGTGGILGDDMGLGKTMQVSAFLAGLFHSRLIKRVLVVAPKTLLTHWTKELSVVSLKDKIRDYSGPNANARNYELKYAFKEGGILLTTYDIVRNNFKMIKGNFTNDFDDEEETLWNYVILDEGHIIKNPKTQRAQSLFEIPCAHRIVISGTPIQNNLKVQSKELRERIKPYFLRRMKNEVFLDSGTGEDKKLAKKNELIIWLKLTSCQRQLYEAFLNSELVHSSMQGSPLAAITILKKICDHPLLLTKKAAEGVLEGMDAMLNNQEMGMVEKMAMNLADMAHDDDDVELQVGQDVSCKLSFMMSLLQNLVSEGHNVLIFSQTRKMLNIIQEAIILEGYKFLRIDGTTKISERERIVKDFQEGPGAPIFLLTTQVGGLGLTLTKAARVIVVDPAWNPSTDNQSVDRAYRIGQMKDVIVYRLMTSGTIEEKIYKLQVFKGALFRTATEHKEQTRYFSKRDIQELFSLPEQGFDVSLTQKQLQEEHGQQLVMDDSLRKHIQFLEQQGIAGVSHHSLLFSKTAILPTLNDNDGLDSSRRAMPMAKHYYKGASSDYVANGAAYAMKPKEFIARTYSPNSTSTESPEEIKAKINRLSQTLANTVLVAKLPDRGDKIRRQINELDEKLTVIESSPEPLERKGPTEARTLKDWESLKAKEEEAGGRARGEGRKGSELNSTPFRLNSTSSTLVVFKVPSTFTTGRGALAAAAANGRFVPMAPTSQPQPQQEVEVEVDEDEELVNMVVEAGVGAIKMKMKIPRRVLGSLYPHQRDGLAWLWALHCTATGGILADDMGLGKTIQEGGILLTSYHIVRNNYMLLRGNGNGNNVDNNEEEPLWDYVILDEGHIVKNTKTQRAQSLFQIPSAHRIVLTGTPIQNKLKRRLYEAFLNKDPVRSQTGALKGSSLEASTILRKICDHPLLLTKRDTDDFLEEMGAMLNNRDMCMVERILEDNLYADKRLQIVQGASCKIAFILPLLRNLVEEGHYVLIFSQTRVMLNLIQDAVSIEGHKFLRIDGTTKISERKKILKDFQEGLDSPILLLTSHVGGLGNTLTKADRVIVVDPAWNPSIDNQSVDRAYRIGQTKDVIVYRLVTCGTIEEKIYKQQIFKGGLFRTATECKEQPQFYNQDLYLQNEQEYSSLPPHGFDASLTQHKMQVENGQQLVMDESLKKHIQFLEQQGIAGVNRHGVLFCKTETTATLGDDGAINRKVRDIMVRRCYAPWEHICRDVEKKSLIDQVKEMSKKMDGLGDTMGRIVALEEEYAAELIGMLHENRWERSHLEKIRMQIDDLHEEHMAKFDEMLERIKRMELADEGELIAKFGEMVERMRQRCDMDRLSLPLLSSTLVA

SEQ ID NO: 13726 - protein, 392 aa, Mascagnia bracteosa; identical to SEQ ID NO: 10369

SEQ ID NO: 13727 - protein, 243 aa, Vitis vinifera
MEIGRDDGRTANQLRPLACSRNILNRAHGSASWSQGDTKVLAAVYGPKAGTKKNENPEKACIEVVWKPKTGQIGKPEKEYEVILKRTLKSICLLNINPNTTTSIIIQVVSDDGALLPCAINAACAALVDAAIPLKHLAVAICCCLTESGYVILDPTKVEEQKMKAFAYLVFPNSAISIIPEGSSHMEGELMEHGIITSVTHGVMSVDDYLHCLERGQAASTKMSAFLRRSLQSQAPNDSSRAG

SEQ ID NO: 13728 - protein, 393 aa, Mascagnia stannea; identical to SEQ ID NO: 10372

SEQ ID NO: 13729 - protein, 392 aa, Hiptage benghalensis; identical to SEQ ID NO: 10374

SEQ ID NO: 13730 - protein, 621 aa, Lactobacillus reuteri
MASNKIIGIDLGTTNSAVAVMEGNEPKIITNPEGSRTTPSVVSFKNGETQVGEVAKRQAITNPNTISSIKSHMGEAGYTVEVDGKKYTPQEISAMILQYLKKYAEDYIGDTVTQAVITVPAYFNDAQRQATKDAGKIAGLDVKRIINEPTASSLAYGLDKKDKDEKILVYDLGGGTFDVSILELGDGVFQVLSTNGDTHLGGDDFDQKIMDWLIDGFKEEHGVDLSQDKMALQRLKDAAEKAKKDLSGVQEAQISLPFISAGENGPLHLEKTLSRAQFNQLTNDLVERTKQPVLNALKDADLTFDDIDEVILNGGSTRIPAVQEMVKELTGKEPNHSINPDEAVALGAAIQGGVLTGDVKDVVLLDVTPLSLGIETMGGVFTKLIDRNTTIPTSKSQIFSTAADNQPAVDIHVLQGERPMAADNKTLGNFQLTDIPAAPRGVPQIKVTFDIDKNGIVNVSAEDQGTHKKQNITIKSNSGLSDEEIGRMKKDAEEHVVADKKKKEEVDLKNEVDQELFQVDKTLKEVKGKVPEDDIKKAESARDELKKAKESGNLDEMKAKKDALNKVIQDLSVKLYQQAQGAQGGAANGQPGDNQQNGNNNGNDDNTVDGDFKDVTPDDKK

SEQ ID NO: 13731 - protein, 165 aa, Glycine max
MSDAPASPCGGGGGGSHESGEHSPRSNFREQDRFLPIANISRIMKKALPPNGKIAKDAKETVQECVSEFISFVTSEASDKCQREKRKTINGDDLLWAMTTLGFEEYIDPLKVYLAAYREIEGDSKGSAKGGDASAKRDVYQSPNGQVENVAHQGSFSQGVNYTNS

SEQ ID NO: 13732 - protein, 444 aa, Pseudomonas putida GB-1
MLPAETQRTLDQHGIKYVLAQFVDIHGSAKTKSVPVSGLKMVAEEGAGFAGFAICGMGMEPHGPDFMARGDLTTLIPVPWQPGYGRVVCVGHVNGQPWPYDSRHVLQQQVQRLAEKGWTLNTGLEPEFSLFRRDEGGKLQLVDASDNLDKPCYDYKGLSRSRLFLERLTEALQPVGFDIYQIDHEDANGQFEINYTYSDAMESADRFTFFRMAAGEIANDLGMICSFMPKPDPKRAGNGMHFHLSLASSTNKNLFHDPSDSSGMGLSKLAYHFAAGLLAHGPALCAFAAPTVNSYKRLVVGRSLSGSTWAPAFVAWGANNRSAMVRIPYGRLEFRLPDAGCNPYLVTAAIIAAGLDGIDRQLEPGEMCNENLYNLSLEDIAARGIKTLPQSLKEAVDALQTDPLFREVLGAEIVDEFIKLKRMEWVEYCRHVSDWEIQRYTEFF

SEQ ID NO: 13733 - protein, 158 aa, Streptococcus pneumoniae TIGR4
MTSLYDFSVLNQNNQATPLDSYRGKVLLIVNTATGCGLTPQYQGLQELYERYQDQGFEILDFPCNQFMGQAPGSAEEINAFCSLHFQTTFPRFAKIKVNGKEADPLYVWLQDQKSGPLGKRVEWNFAKFLIGRDGQVFERFSSKTDPKQIEEAIQTLL

SEQ ID NO: 13734 - protein, 476 aa, Solibacter usitatus Ellin6076
MANELQDFLKLSYTELEELNLEAKADRMGRKPMHEIQEKRLKYLTDEKRIKAVTVLFSDLEGRLHMLDYDKKFLVKSWDNLTFDGSSIRGFTAQRESDLRLNMDWSAFYWAPSDIFGAGKVLVFGEVIDKDGTPYSADIRGVLKAYAQSLFDKQGYTLNAANEIEGFLFNGSDAERRYHETTKFDYVNTGGYYHSLPGDPLRKFIDTCAEVQRAMGFQNEKDHPEVAPSQFEINYSYAEVVAAADQIQLYKLICRQVATGMGLTASFLPKPVVGVNGSGMHTNVSITKNGKNLFWDPSGQEKMSKFAWQFVDRILTHGNDLCLLLNASVNAYRRLDPHFEAPNQIKASATDRGSMIRIPIGNERSSRVEVRSVGPDANPYMVMLSVFRTGLDGETAKIKNLRSAERYLPDNVYDALANFKNAEWTTKLLGEDVKGRYADLKQSSADRCPRLLGTFVKAPEVQYHHEVYNQFLWNMF

SEQ ID NO: 13735 - protein, 1151 aa, Populus trichocarpa; identical to SEQ ID NO: 10391

SEQ ID NO: 13736 - protein, 261 aa, Pinus balfouriana
NPFYKPGEIAKQAKAAGARIIVTQAAYVEKLADLQSHDVLVITIDDAPKDGCKHISVLTEADETQCPAVKIHPDDVVALPYSSGTTGLPKGVMLTHKGLVSSVAQQVDGENPNLYFHSEDVVLCVLPLFHIYSLNSVLLCALRAGAATLIMQKFNLTTCLELMQKYKVTVAPIVPPIVLDITKSPIVSQYDVSSVRIIMSGAAPLGKELEDALRKRFPKAIFGQGYGMTEAGPVLAMNLAFAKNPFPVKSGSCGTVVRNAQ

SEQ ID NO: 13737 - protein, 635 aa, Haemophilus influenzae R2846
MGKIIGIDLGTTNSCVAVMDGDKARVIENAEGARTTPSIIAYTDNETLVGQPAKRQAITNPKNTLFAIKRLIGRRFESEEVQRDIKIMPFEITRADNGDAWVNVKGDKLAPPQISAEVLKKMKKTAEDFLGEAVTEAVITVPAYFNDAQRQATIDAGKIAGLDVKRIINEPTAAALAFGLGSSKENQVIAVYDLGGGTFDISIIEIDNFDGEQTFEVLATGGNTHLGGEDFDNRVIDYIIDEFKKEQNIDLRNDAMALQRVKEAAEKAKIELSSAQSTEVNLPYITADATGPKHLALNITRAKLEALVEDLVASSIESLKAVLKDAGKGVSEIHDIILVGGQTRMPLVQQKVAEFFGKEARKDVNPDEAVAIGAAVQGGVLKGDVKDVLLLDVTPLSLGIETMGGVMTTLIEKNTTIPTKKSQVFSTAEDNQSAVTIHVLQGERKRAADNKSLGQFNLEGINPAPRGMPQIEVTFDIDANGVINVSAKDKNTGKEQQIRIQASSGLSDEEIQQMVRDAEANADADRKFEEVVQARNQADGIAHATRKQIAEAGDALSVADKEKIETAVAELETAAKGEDKAEIEAKIEAVIKASEPLMQVAQAKAQQAGGEQPQQSSAKDDGVVDAEFEEVKDNK

SEQ ID NO: 13738 - protein, 1146 aa, Populus trichocarpa; identical to SEQ ID NO: 10393

SEQ ID NO: 13739 - protein, 261 aa, Pinus balfouriana
NPFYKPGEIAKQAKAAGARIIVTQAAYVEKLADLQSHDVLVITIDDAPKDGCKHISVLTEADETQCPAVKIHPDDVVALPYSSGTTGLPKGVMLTHKGLVSSVAQQVDGENPNLYFHSEDVVLCVLPLFHIYSLNSVLLCALRAGAATLIMQKFNLTTCLELMQKYKVTVAPIVPPIVLDITKSPIVSQYDVSSVRIIMSGAAPLGKELEDALKRRFPKAIFGQGYGMTEAGPVLAMNLAFAKNPFPVKSGSCGTVVRNAQ

SEQ ID NO: 13740 - protein, 373 aa, Xylella fastidiosa Temecula1
MGDRILLDTLDTDISDKNKPVRLYCYHINTAGVKKEFEFDLPAPPLGAQQTAVPSGDHVLHIARFDQGEIQALKHVSEDRNSSITQLHYISLGAVTTALHLPKNKVIDVVKDSEADKAGVEIGSFIGNGTNIKAGPENIGGKKVIKTDSRYEVVLPDGRKVTFSINKIIPKLNDIEGIRSAQLIGKTLVITFNEMSDENTQWALQQIKNTPATAILLDLRYNTGGSGIAGEKLLAGFLASGTRIATEIRGKKTNEINVPAGYTPTDKPTAVLISLLSASGAELAARTLQFHHRARIYGAQSSGQVLTSRFYKLTDGTYMQIADTNLLDPAGKPIEWYGVMPDVKKWKTLSDVRAGRDPVLECALTDLSGGQCH

SEQ ID NO: 13741 - protein, 462 aa, Saccharophagus degradans 2-40
MPHLYSFLRKLSVFTLAACAPLFVQAQTPSNEPEDADTISVLPLEDLRVFTKAYEHIRSSYIEEIDDRTLLEYAIRGMLDELDPHSAFLDASSFDDLQVHTSGEFGGLGIEVGIEDGFVKVISPIDDTPAQKAGVEAGDLIIKINGTSVKGITLSDAVEKMRGAPGTDITLTIMRKDVEQPFDLVLTRDKIKVRSVRSDIVEHDFAYLRVAQFQLRTGQDLANEIKKLQKINSDLKGVILDLRNNPGGVLTASVEVADLFLNDGLIVYTEGRMHDANSQYSATPGDAVDGLPMVVLINGGSASASEIVAGALQDQNRALVLGTRSFGKGSVQTVISITEDRAIKITTALYFTPNGRSIQAQGIEPDIEVERVKITAVQPQADITEADLSGHLKNAKGGAEVKASDRGKRKNELHERDSQLYEAVNILRGLHLFQKAQQAKAEKELEKSQAAEQAAAETTETP

SEQ ID NO: 13742 - protein, 394 aa, Xylella fastidiosa Temecula1
MSKVLSLETWSPLYAHGVRVGDRILLDTLDTDISDKNKPVRLYCYHINTAGVKKEFEFDLPAPPLGAQQTAVPAGDHVLHIARFARFDQGEIQALKHVIEDRNSPMTQLHYIPLGAVTTRPHLIRTKVIDVVKDSEADKAGVEIGSFIGDGTDPKTESKNIGGKTVVKSNGIYKMILPDGKKVTFSINKEITLSNFEGIRSAQLIGKTLVIAFNEMTDENTQWALQQIKNTPATAIVLDLRDNTGGSSIAVPKLLAGFLASGTRIATEIRGKKTNEINVPTGYTPTDKPMAVLIGLVSASGAEVTARTLQFHRRARIYGAQSSGQVLMSRFYKLTDGSYIQIPHANLLDPAGKPLEWYGVMPDVKKWKTLSDVRAGRDPVLECALTDLSGGQCH

SEQ ID NO: 13743 - protein, 158 aa, Chromobacterium violaceum ATCC 12472
MSIYDFSFRRLDGSEQAMADYRGSVLLLVNTASRCGFTSQYAGLEALHRRFGPQGLAIIGFPCNQFGAQEPGDAGEIGAFCQKNYGVDFAMADKVDVNGANAHPLWQYLKRQKRGLLGQAIRWNFSKFLVDRQGRVVARFAPFTRPEKLAARIEALLK

SEQ ID NO: 13744 - protein, 261 aa, Pinus balfouriana
NPFYKPGEIAKQAKAAGARIIVTQAAYVEKLADLQSHDVLVITIDDAPKDGCKHISVLTEADETQCPAVKIHPDDVVALPYSSGTTGLPKGVMLTHKGLVSSVAQQVDGENPNLYFHSEDVVLCVLPLFHIYSLNSVLLCALRAGAATLIMQTFNLTTCLELMQKYKVTVAPIVPPIVLDITKSPIVSQYDVSSVRIIMSGAAPLGKELEDALRERFPKAIFGQGYGMTEAGPVLAMNLAFAKNPFPVKSGSCGTVVRNAQ

SEQ ID NO: 13745 - protein, 611 aa, Bacillus cereus ATCC 10987
  misc_feature (262)..(262): Xaa can be any naturally occurring amino acid
MSKIIGIDLGTTNSCVAVMEGGEPKVIPNPEGNRTTPSVVAFKNEERQVGEVAKRQAITNPNTIMSVKRHMGTDYKVEIEGKEYTPQEISAIILQNLKASAEAYLGETVTKAVITVPAYFNDAERQATKDAGRIAGLEVERIINEPTAAALAYGLEKQDEEQKILVYDLGGGTFDVSILELADGTFEVISTAGDNRLGGDDFDQVIIDHLVAEFKKENNIDLSQDKMALQRLKDAAEKAKKDLSGVTQTQISLPFISAGAAXPLHLELTLTRAKFEELSANLVERTLEPTRRALKDAGLSASELDRVILVGGSTRIPAVQEAIKRETGKEPYKGVNPDEVVALGAAVQGGVLTGDVEGVLLLDVTPLSLGIETMGGVFTKLIERNTTIPTSKSQVFSTAADNQPAVDIHVLQGERPMSADNKTLGRFQLTDIPPAPRGIPQIEVTFDIDANGIVNVRAKDLGTSKEQAITIQSSSGLSDEEVDRMVKEAEANADADQKRKEEVELRNEADQLVFQTDKVVKDLEGKVDAAEVAKATEAKEALQAAIEKNELEEIRAKKDALQEIVQQLTVKLYEQAQAAAGQAEGAQGAQDAGAKKDNVVDAEFEEVKEDK

SEQ ID NO: 13746 - protein, 260 aa, Pinus longaeva
NPFYKPGEIAKQAKAAGARIIVTQAAYGEKLADLQSHDVLVITIDDAPKDGCKHISVLTEADETQCPAVKIHPDDVVALPYSSGTTGLPKGVMLTHKGLGSSVAQQVDGENPNLYFHSEDVVLCVLPLFHIYSLNSVLLCALRAGAATLIMQKFNLTTCLELMQKYKVTVAPIVPPIVLDITKSPIVSPYDVSSVRIIMSGAAPLGKELEDALRRFPKALFGQGYGMTEAGPVLAMNLAFAKNPFPVKSGSCGTVVRNAQ

SEQ ID NO: 13747 - protein, 636 aa, Photorhabdus luminescens subsp. laumondii TTO1
MGKIIGIDLGTTNSCVAIMDGTTARVLENSEGDRTTPSIIAYTQDGETLVGQPAKRQAVTNPQNTLFAIKRLIGRRFQDEEAQRDVAIMPYKIIAADNGDAWLEVKDQKMAPPQVSAEVLKKMKKTAEDYLGEPVTEAVITVPAYFNDAQRQATKDAGRIAGLEVKRIINEPTAAALAYGLDREVGNRTIAVYDLGGGTFDISIIEIDEVDGEKTYEVLATNGDTHLGGEDFDSRMINYLVDEFKKDQGIDLRNDPLAMQRLKEAAEKAKIELSSAQQTDVNLPYITADATGPKHMNIKVTRAKLESLVEDLVKRSMEPVRVALQDAGLSVSDVNDVILVGGQTRMPMVQKVVADFFGKEPRKDVNPDEAVAMGAAVQGGVLAGDVKDVLLLDVTPLSLGIETMGGVMTSLIVKNTTIPTKHSQVFSTAEDNQSAVTIHVLQGERKRAGDNKSLGQFNLDGIQAAPRGMPQIDVTFDIDADGILHVSAKDKNSGREQQITIKASSGLNEEEIQRMVRDAEANAESDRKFEELVQVRNQADQLVHGTRKQVEEAGDKLPAEDKTAIESAVAELEKVAKGEDKADIEAKIQALVQASAKLLEIAQQQAQAGATADAGDSAKKDDDVVDAEFEEVKDKK

SEQ ID NO: 13748 - protein, 392 aa, Callaeum septentrionale; identical to SEQ ID NO: 10403

SEQ ID NO: 13749 - protein, 280 aa, Methanococcus maripaludis S2
MKFDAWYTEPQTENLSLSTKLKDILYVGQSEYQEIQVLDTYEFGRVLILENTYQTTERDEFIYHELISHPALFTHGNPKKVLVIGGGDGGSVREVLKHKSVEKIDFVELDGQVVEVAKKFLPTLSCEIDNEKVNTIITDGIKYVAETSEKYDVILVDCPDPVGPAAGLFEKEFYNNLYKCLNDDGIMVQQTESPLLHEKLINKIKGHLKDAGFSTIRPLVCSIPTYPSGFWSFTLASKKNDPLNSDVSEIENKLKDMTTKYYDQDVHKGVFLATPRYLKE

SEQ ID NO: 13750 - protein, 663 aa, Zea mays
MASARLVALAAFLLLLLFALGPGEARAADDGEVRALLALGAALDPTGRLLPSGRGSPARSRPPVAGLRSLTGLYLHYNALRGGIPRELAALAALTDLYLDVNNFSGPIPSEIGAMASLQVVQLCYNQLTGSIPTQLGNLTRLTVLALQSNRFNGAIPASLGDLPLLARLDLSFNRLFGSIPVRLAQLPCSLVVLDVRNNSLTGSVPAELAAKLQAGFQYGNNSDLCGAGLPALRPCTPADLIDPDRPQPFSAGIAPQVTPSDGRGNGRVPSTRALAAVVVVAVALLLTTGVGLFALSWRRWHRQKVAGASPSTISGGRCSTEVVPSAAKASSARKSASSALASLEYSNAWDPLADARGGLGFVSQDVQLAQSLRISTEEVESATRYFSELNLLGGHGKKAGGLAATYRGTLRDGTSVAVKRLGKTCCRQEEADFLSGLRLLAELRHDNVVALRGFCCSRARGECFLVYDFVPNGSLSQFLDADTTAGGSGRVLQWSTRISIIRGIAKGIEYLHSTRTNKPALVHQNISADKVLLDYAYRPLVSGCGLHKLLVDDLVFSTLKASAAMGYLAPEYTTVGRLSEKSDVYAFGVIVLQVLTGRRKVTATAQLLAGNVDDDELVDGNLQGSYSAAEAAMLAKIGSACTSEDPDQRPTMAELLQELDTI

SEQ ID NO: 13751 - protein, 471 aa, Thermosynechococcus elongatus BP-1
MATPQEILNLIDSKYELIDLKFTDMPGTWQHLTVHKSQISESSFTEGVPFDGSSIRGWKAINESDMVMVPDPNTAWEDPFMKEPTLSLICTIKDPRTGELYDRCPRSIATRAIEYLKATGIGDTAYFGPEAEFFVFDDVRYDQNQKSGYYYIDSIEGVWNSGREEEGGNLGYKIRGKEGYFPVAPTDTLQDLRTEMLLTMAKCGVPIEKHHHEVATAGQCELGFRFGTLVQAADWLMTYKYCVKNVARKHGKVATFMPKPVFNDNGSGMHTHQSIWKDGQPLFWGDGYANLSQIALWYIGGILKHAPALLAFTNPTTNSYKRLVPGFEAPVNLAYSQGNRSASVRIPLTGPNPKAKRLEFRCPDATSNPYLAFAAMLCAGIDGIKNQIDPGSPLDVDIYDLSPEELAKIPSTPGSLMAALENLQKDHSFLTAGGVFSEDFILNWIQYKLDTEVIPMSLRPHPYEFALYFDA

SEQ ID NO: 13752 - protein, 392 aa, Mascagnia hippocrateoides; identical to SEQ ID NO: 10407

SEQ ID NO: 13753 - protein, 895 aa, Kluyveromyces lactis NRRL Y-1140
MARRRLPDRPPNGIGAGARPNLRPRRLDTNQALETLTKPFKVPFKVNKTDHAKRYGVRSSRRSQTTYANMDSSLDSDLHVKRKDALSLSRLNAEPSRLDTIYSTLRRSFTVPIKGYVPRHNIPMALGTKAKVVIPPRPLHDPTDELAIVLYDPTVDGDIPEQHEDLESFRQNAVDTKKSQKGKDSESQDQKAKESSPNSAPSIHHPKMLSNGVKNKTLKELLGSSEDNTSKKFPNVPVVIDPKLAKILRPHQVEGVRFLYRCVTGLVMKDFLDAKTVLDSSSQSMEKADTQADSNITGSKSPVETDVSSLKDVIKINENSRNRGAYGCIMADEMGLGKTLQCLALMWTMLKQGPQGRRSIDKCIIVCPSSLVNNWANEIDKWLGPGSLSSLAIDGKKSSLNNGNVADSVSHWASAQGRNIVKPVLIISYDTLRRNVEQLKNCEVGLMLADEGHRLKNADSLTFTALDSIRCPRRVILSGTPIQNDLSEYFALLNFSNPGLLGSRNDFRKNFELPILQSRDSLATDEEVTLGKDRLRQLSNIVSKFIIRRTNNILAKYLPCKYEHVIFINLTPFQQSLYQHFIESRAVKKIVKGDSNQPLKAIGLLKKLCNHPDLLELSEDIPGSEELIPDDYQSSVDSRTSRNRSVIQTAFSSKFSVLARFLYKIKTESNDKIVLISNYTQTLDLIEKMCFSNHYGVLRLDGTMNINKRQKLVDRFNDPEGQEFIFLLSSKAGGCGINLIGANRLILLDPDWNPAADQQALARVWRDGQKKDCFIYRFISTGTIEEKIFQRQSMKMSLSSCVVDEKEDVERLFSSDNLKQLFKLDTKTICDTHETYNCKRCKNGKQILKAPVMLYGDATSWNHLNHDALAKTNDHLLKNEFNHKDISFAFQYISH

SEQ ID NO: 13754 - protein, 667 aa, Malus pumila
MAGSWRARGSLIVLAIVTFGCLFAFSIAKEEATKLGTVIGIDLGTTYSCVGVYKNGHVEIIANDQGNRITPSWVAFSDSERLIGEAAKNQAAVNPERTVFDVKRLIGRKFEDKEVQKDMKLVPYKIVNRDGKPYIQVRIKDGETKVFSPEEVSAMILTKMKETAEAFLGKKIKDAVVTVPAYFNDAQRQATKDAGVIAGLNVARIINEPTAAAIAYGLDKKGGEKNILVFDLGGGTFDVSILTIDNGVFEVLSTNGDTHLGGEDFDQRIMEYFIKLIKKKHGKDISKDNRALGKLRREAERAKRALSSQHQVRVEIESLFDGVDFSEPLTRARFEELNNDLFRKTMGPVKKAMDDAGLEKRQIDEIVLVGGSTRIPKVQQLLKDYFDGKEPNKGANPDEAVAYGAAVQGSILSGEGGEETKDILLLDVAPLTLGIETVGGVMTKLIPRNTVIPTKKSQVFTTYQDQQTTVSIQVFEGERSLTKDCRNLGKFDLTGIPPAPRGTPQIEVTFEVDANGVLNVRAEDKGTGKAEKITITNDKGRLSQEEIERMVKEAEEFAEEDKKVKERIDARNSLETYVYNMKNQINDKDKLADKLESDEKEKIETATKEALEWLDDNQTAEKEDYDEKLKEVEAVCNPIISAVYQRSGGAPGGAGASEEDDESHDEL

SEQ ID NO: 13755 - protein, 472 aa, Erythrobacter sp. NAP1
MASAKDVVKQIKDGDIEWVDLRFTDPKGKWQHLTMAASVMDEDALDDGLMFDGSSIEGWKAINESDMILKPDMDAVYPDPFSETPMLSIFCDIVEPSDGQLYARDPRSTAKRAEAYLASTGIGDTVYVGPEPEFFMFDDVRFEDGYAGSGYRIDDIELPTNTGTDYTELGGGNMGHRPRAKGGYFPVAPVDSAMDIRGEMVSTMMEMGLNMDKHHHEVAAAQHELGITFSTLTKTADQVQVYKYVVQQVAHAYGKTATFMPKPIKDDNGSGMHTHMSIWNDGKPTFAGNEYAGLSETCLHYIGGVIKHAKAINAFTNATTNSYKRLVPGFEAPVLLAYSARNRSASCRIPYGAGEKAKRVEFRFPDAICNPYLAFSALLMAGLDGIENKIHPGDAMDKNLYDLPPAELAEVPTVCGSLREALEALEEDHEFLLKGDVFSMDQIEAYAELKWEEQLRLETTPSPVEFDMYYSS

SEQ ID NO: 13756 - protein, 392 aa, Hiraea fagifolia; identical to SEQ ID NO: 10410

SEQ ID NO: 13757 - protein, 145 aa, Oryza sativa Indica Group
MTNGQDNLLPIANVGRIMKDGLPPQAKISKRAKETIQECATEFISFVTGEASERCRRERRKTVNGDDVCHAMRSLGLDHYADAMHRYLQRYREGEELAASLNSSSSAAAAAAAAGGSRGGGAIQIDVRAELSIFRSGNNQGRPNN

SEQ ID NO: 13758 - protein, 520 aa, Arabidopsis thaliana
MAQVSRICNGVQNPSLISNLSKSSQRKSPLSVSLKTQQHPRAYPISSSWGLKKSGMTLIGSELRPLKVMSSVSTAEKASEIVLQPIREISGLIKLPGSKSLSNRILLLAALSEGTTVVDNLLNSDDINYMLDALKRLGLNVETDSENNRAVVEGCGGIFPASIDSKSDIELYLGNAGTAMRPLTAAVTAAGGNASYVLDGVPRMRERPIGDLVVGLKQLGADVECTLGTNCPPVRVNANGGLPGGKVKLSGSISSQYLTALLMSAPLALGDVEIEIVDKLISVPYVEMTLKLMERFGVSVEHSDSWDRFFVKGGQKYKSPGNAYVEGDASSACYFLAGAAITGETVTVEGCGTTSLQGDVKFAEVLEKMGCKVSWTENSVTVTGPPRDAFGMRHLRAIDVNMNKMPDVAMTLAVVALFADGPTTIRDVASWRVKETERMIAICTELRKLGATVEEGSDYCVITPPKKVKTAEIDTYDDHRMAMAFSLAACADVPITINDSGCTRKTFPDYFQVLERITKH

SEQ ID NO: 13759 - protein, 177 aa, Oryza sativa Indica Group
MADHHGGHHADGHRRQQQLQGEAPDQAAAEIIKEQDRLLPIANVGRIMKQILPPNAKISKEAKETMQECVSEFISFVTGEASDKCHKEKRKTVNGDDVCWAFGALGFDDYVDPMRRYLNKYRELEGDRAAAAATSRSGAGAAAGPDHPSSSSSAAAATAGHFMFNAMDRSTDSSRQF

SEQ ID NO: 13760 - protein, 392 aa, Ectopopterys soejartoi; identical to SEQ ID NO: 10412

SEQ ID NO: 13761 - protein, 182 aa, Arabidopsis thaliana
MASSMLSSATMVASPAQATMVAPFNGLKSSAAFPATRKANNDITSITSNGGRVNCMQMQVWPPIGKKKFETLSYLPDLTDSELAKEVDYLIRNKWIPCVEFELEHGFVYREHGNSPGYYDGRYWTMWKLPLFGCTDSAQVLKEVEECKKEYPNAFIRIIGFDNTRQVQCISFVAYKPPSFTG

SEQ ID NO: 13762 - protein, 392 aa, Stigmaphyllon paralias; identical to SEQ ID NO: 10417

SEQ ID NO: 13763 - protein, 750 aa, Streptococcus agalactiae 2603V/R
MIIDRLLQRSHSHLPILQATFGLERESLRIHQPTQRVAQTPHPKTLGSRNYHPYIQTDYSEPQLELITPIAKDSQEAIRFLKAISDVAGRSINHDEYLWPLSMPPKVREEDIQIAQLEDAFEYDYRKYLEKTYGKLIQSISGIHYNLGLGQELLTSLFELSQADNAIDFQNQLYMKLSQNFLRYRWLLTYLYGASPVAEEDFLDQKLNNPVRSLRNSHLGYVNHKDIRISYTSLKDYVNDLENAVKSGQLIAEKEFYSPVRLRGSKACRNYLEKGITYLEFRTFDLNPFSPIGITQETVDTVHLFLLALLWIDSSSHIDQDIKEANRLNDLIALSHPLEKLPNQAPVSDLVDAMQSVIQHFNLSPYYQDLLESVKRQIQSPELTVAGQLLEMIEGLSLETFGQRQGQIYHDYAWEAPYALKGYETMELSTQLLLFDVIQKGVNFEVLDEQDQFLKLWHNSHIEYVKNGNMTSKDNYIVPLAMANKVVTKKILDEKHFPTPFGDEFTDRKEALNYFSQIQDKPIVVKPKSTNFGLGISIFKTSANLASYEKAIDIAFTEDSAILVEEYIEGTEYRFFVLEGDCIAVLLRVAANVVGDGIHTISQLVKLKNQNPLRGYDHRSPLEVIELGEVEQLMLEQQGYTVNSIPPEGTKIELRRNSNISTGGDSIDVTNTMDPTYKQLAAEMAEAMGAWVCGVDLIIPNATQAYSKDKKNATCIELNFNPLMYMHTYCQEGPGQSITPRILAKLFPEL

SEQ ID NO: 13764 - protein, 429 aa, Prochlorococcus marinus subsp. pastoris str. CCMP1986
MTTFSGLLVSNHSKATILENNYKEVIDHVWQIVYRDFLDSSGKFERSNWINLRKEFLAKKYSDNNEAYDAIRDMLSNLDDPYTRFLDPKEFNQMRIDTSGELTGVGIQIAKDNESDSIIIISPIEGTPAYEAGIKAKDIILSIDNVSTKGLNIEDAVKLIRGRRGTKVKLEILRNGNSFYKSLLRERIELKSVTSKINKTKDGLLIGYVRLKQFNANASREMKDTLKDLEIKKVSGYVLDLRSNPGGLLESSIDISRQFIDKGIIVSTLSKDGLRETKRGNGKALTKKPLIVLVNEGSASASEIVSGAIRDNNRGKLVGKKTFGKGLVQSMRTLVDGSGLTVTVAKYLTPNGTDINKFGITPDIEVKMNSNPILQREIGTKRDRQYRAGEKELLKIIKKTKLVSQFQPDSANVLAVFKNNENNFVYSLN

SEQ ID NO: 13765 - protein, 447 aa, Deinococcus radiodurans R1
MTPAAYCGSMNRNRIALVAGTLALTAAVAAAQMGGYTSQTLANTPEGKSLVQVLNDLNRYYLYPVNQDKVLRGAITGALASLDDEFTYYTEPEDNAVAEQDLSGSFGGIGVTLVAANSDGSGGKVDNVFKDNPAFKGGVHIGDVFLKIGDKDVTGAKLNDIVKLVRGPIGSEVDVTFGRNGKPYTVKLKRDKVNVISVEKTILPGNIGYVALNTFYNEQASAQFRAAIADMKKANVQKLILDLRDNGGGLLSAGVDVADQFLQSGPIVSLRERGGQPEVYGSARKQATDYTGKLVLLVNKNSASASEVVGGALQDNKRATIIGEQTFGKGVAQVPITLPDGGKVAIVNSAWITPKGREIHKKGITPDIVVKDTRFPVPLNFSGSGVAPGTTLTLTVGDQPVKVTADKDGKFTYVGEIKRRDRSDVQGQAVVDVEHDAILKKALETLK

SEQ ID NO: 13766 - protein, 406 aa, Zea mays
  misc_feature (129)..(129): Xaa can be any naturally occurring amino acid
  misc_feature (160)..(160): Xaa can be any naturally occurring amino acid
  misc_feature (170)..(170): Xaa can be any naturally occurring amino acid
  misc_feature (198)..(198): Xaa can be any naturally occurring amino acid
MEVGDARNGSAAAALTKGSADDAARKPLPPCCVKAKARVPETEANCHDTVVSGWFTEPRSRFGKTSKVQYFNNPMWPGEAHSLKVEKILFQGKSPYQEILVFESSTYGNVLVLDGIVQLTDKDECAYQXNGCYFATEQIELKDVLPTLRLLMSSNFMGSXPYDISLLTDXVLVVGGGDGGVLREIARHDSVETIDICXKEFFPNLSIGFKDPRVRLHVGDAVDFLRNSPEGKYDAIIVDSSDPIGPAQALVEKPFIQTIARALKPGGVLCNLAESMWLHTHLIQDMLAICRQTFKGAVHHAWTSVPTYPSGVIGFLLCAKEGRAVNFLTPVNPIEKIEGTAKAGRELRFYNSEIHRAAFVLPTFVRRELEAYTTPSASAENEKPKESVSEPQKIKILSNNAILTAT

SEQ ID NO: 13767 - protein, 414 aa, Herminiimonas arsenicoxydans
MHIKPSFGKGRPVGEAIVSTMFAEGDDGRIPVVAVAGTNGKTTTVRLIAHILQANKHRVGMTTTDGVYIENQRIDTGDCSGPRSARNVLMHPDVDAAVFETARGGVLREGLGFDRCNVAVVTNIGVGDHLGLNFISTVEDLAVVKRVIVQNVAPNGTAVLNAADPMVANMAASCPGSVTFFAKDGNHAVLATHRAKGHRVVFLDGTSIVASEGAFEHRIALADIAITHNGLIGFQIENAMAAIGAAWSLNLSWDIVLNGLRTFENSAATTPGRFNLFTHHGATVIADYGHNPDAIEALTHAVEAMPAKRRMVVISGAGDRRDDDLRRQTEILGDAFDDVILYEDQCQRGRADGEVLALLRQGLTKAKRAKSIKEIHGEFLAIDTALASLQAGDLCLILVDQVEEALAHIASRVA

SEQ ID NO: 13768 - protein, 438 aa, Campylobacter lari RM2100
MKTKRNLIIAASICSLVTASFIFTNLQAKNPTPSEAEKKIEALSKLTRTMSIIEQYYVDDVNYTDLVDKSIAGLLTNLDAHSSFLDEKGYKELKEQTNGEFGGLGFTITQKDGAITVVAPIEGSPADKAGIKTDDIILRINNESTLGMTLNEAVSKMRGEPKTKVTLTIYRKGDAKPFDVNLKRDIIKVDSVYTKLIENENLLYLRVTNFDKNVVDEASKAIKKHSNVKGIILDLRTNPGGILNQAVGLVNLFVDKGVIVSQKGKIESENVEFKANPSKKITNAPLVVLVNGGSASASEIVSGALQDFKRAIIVGEKTFGKGSVQLILPMDEKGKEGLRLTIAKYYLPSGRTIQAVGVSPDIEVFPGKVSKEENHGFEIKESDLKKHLQAELDKIGHQEKKKDNKEDKNIITKEQINNDIQLKTAIDAIKILNITKGE

SEQ ID NO: 13769 - protein, 141 aa, Zea mays
  misc_feature (52)..(52): Xaa can be any naturally occurring amino acid
MALAEADDGAVVFGEEQEALVLKSWAVMKKDAANLGLRFFLKVFEIAPSAKXMFSFLRDSDVPLEKNPKLKTHAMSVFVMTCEAAAQLRKAGKVTVTGFALLETIKEALPADMWSLEMKKAWAEAYSQLVAAIKREMKPDA

SEQ ID NO: 13770 - protein, 611 aa, Bacillus anthracis str. Ames
MSKIIGIDLGTTNSCVAVMEGGEPKVIPNPEGNRTTPSVVAFKNEERQVGEVAKRQAITNPNTIMSVKRHMGTDYKVEVEGKDYTPQEISAIILQNLKASAEAYLGETVTKAVITVPAYFNDAERQATKDAGRIAGLEVERIINEPTAAALAYGLEKQDEEQKILVYDLGGGTFDVSILELADGTFEVISTAGDNRLGGDDFDQVIIDHLVAEFKKENNIDLSQDKMALQRLKDAAEKAKKDLSGVTQTQISLPFISAGAAGPLHLELTLTRAKFEELSAGLVERTLEPTRRALKDAGFAPSELDKVILVGGSTRIPAVQEAIKRETGKEPYKGVNPDEVVALGAAVQGGVLTGDVEGVLLLDVTPLSLGIETMGGVFTKLIERNTTIPTSKSQVFSTAADNQPAVDIHVLQGERPMSADNKTLGRFQLTDLPPAPRGIPQIEVTFDIDANGIVNVRAKDLGTSKEQAITIQSSSGLSDEEVERMVQEAEANADADQKRKEEVELRNEADQLVFQTDKVVKDLEGKVDAAEVAKATEAKEALQAAIEKNELEEIRAKKDALQEIVQQLTVKLYEQAQAAAGQAEGAEGAQDAGAKKDNVVDAEFEEVKEDK

SEQ ID NO: 13771 - protein, 359 aa, Arabidopsis thaliana; identical to SEQ ID NO: 12629

SEQ ID NO: 13772 - protein, 210 aa, Carica papaya
MGRGKIEIKRIENLSNRQVTYSKRRNGIIKKAKEITVLCDARVSLIIFASSGKMHEYCSPSTSLTNMLDEYHKAGKPRLWDAKHENLNNEIERVKKENDNMQIELRHLRGEDITSLNHRDLMALEETLETGLASVRNKQMEVLKMMRRNEKILEEENRRLSFALQQQEIAIENSAREMENGYQQRMREYNAHMPFAFRVQPIQPNLQDRI

SEQ ID NO: 13773 - protein, 527 aa, Mycobacterium smegmatis str. MC2 155
MGASLLAALVVAVLVAAVARRFDVSAPLVLVVAGLAGSTLPGFGDVALDPDLVLFVILPPLLWSAGMESSYVALRRNMRSIGLLAVGLPLVTTFVVGIVAYHTVPELTLAAALTLGAIVAPPDAVSATAVGRRLGLPRRTMTLLGGESLLNDATALTAYKVALAAAIGAATSWGTALGTFALAAVGGLVVGLVLGMLVHYVRTRLDDPLVESAIGLVAPFSIYLIAEEAHGSGVIAVVVAALLLGQRETQASYATRLQDKAVWKALQLVLESFAFLLIGLQLPAVVGELAGISAATLAISSAAVLAAVIGVRIVWVYGCTYLGRLFTKNHEPPPSHAQVFILSWAGMRGVVSLAAAFGIPLITLSGEQFPGRAQLCFLTFVVVVGTLLLHGLTLPWFIRVLGAEGDEAHSDAIATAAAQDKAARAAAERLDALLAEQPASAEVSHRAADVLRAWNTRRRNAAWERLGRDEEDIGESPTSAFRRLRLEMLAAERETFIAERDAGHIDDEVLRTVLHGLDLEEATLNRD

SEQ ID NO: 13774 - protein, 461 aa, Bacillus pumilus SAFR-032
MKKQFKFVIAILLTAALSSVITFVITKQGAVNVSGDEKFSKLMAAYTKVKDEYYEKTDDQKLVDGAIQGMIASLDDPYSTYMDQEEAEGFNNTISSSFEGIGAQVEEKDGQILIVAPIKGSPAEKAGLKPHDRILKVDGKSTKGMSVNQAVSLIRGKKGTDVKLHLNRQGVGNVDVTITRDTIPVETVYAKLTKDKIGEIQITSFAETTSKELDKAIDDLEKKGAKGFVIDLRDNPGGIMTEAIEMSNDFIDKGKVIMQVEEKGKKEEYKAEKERKVHQPAVVLVNGGSASAAEIMAAALHQSSGIKIIGEKTFGKGTVQNAQSYNDGSSVKLTIAKWLTPDGSWIHKKGIEPQVKASLPSYAKLPYLSPKKTYQLNDSGDEVKAAQKMFQALDYKAKANGEYDQAFQAIVKKFQTDNDLKADGILTGDTTTVLMTKIQDKLKNNDTQMKKAIEVLKKEMK

SEQ ID NO: 13775 - protein, 481 aa, Bordetella pertussis Tohama I
MSTRKFRGFGLVAIGAVAGILLSVGVSAVAQRGSPLPLDELRQLSNVFAAIKNNYVEAVDDKTLIGNAISGMVSNLDPHSAYLDADAFREMQTATQGEFGGLGIEVGAEDGFVKVISPIEDTPAARAGIQAGDLIIKIDDTPTKGMSLNDAVKLMRGAPKSPITLTIMRADRPQPIVVKIVRDIIKVRSVRSKMLDSNVAYLRIAQFQEKTGPDLARHLKELGAKGAPKSLVLDLRNDPGGLLTSAIGVAGAFLPPDALVVSTDGRTPDSRHKYRATPSEYARGEGNYLNDLPGWVKTVPMVVLVNVGSASASEIVAGALQDHKRAKVLGNRTFGKGSVQVILPLSESTAVKLTTSRYFTPSGRSIQATGIEPDYVVADTADGDLFRLPREADLQRHLSNQQSPDAEVKSNNDDNTEVAGKAFEFGGKDDFQLQQALNLLAGKPVQKGSARAQAKADIKPSEGKTQRMTITPTGVEPAKSK

SEQ ID NO: 13776 - protein, 443 aa, Geobacter metallireducens GS-15
MFGTRKGKKIALLAVVLFAMLAGGGFVAQKHCAAQGGNDYESIELFTDVLAIVKKSYVEEVDTKKLIYGAINGMLASLDPHSSFMPPDMYKEMKIDTKGSFGGLGIEITIKDGILTVISPIEDTPAFRAGIKAGDQILKIDDRFTKDMTIMDAVKRMRGAKGTKVILTIVREGFDKPKDFTLVRDIIQVKSVRFSSLDNGYGYIRIAQFQEKTDDDLVKALATLKEENGGSLKGLVLDLRNDPGGLLDQAVKVADHFVEQGLIVYTEGREKDSRMQFNAHKGGTEPAYPMVVLINGGSASASEIVAGALQDHKRAVVMGTQSFGKGSVQTIIPLSDDSGLRLTTARYYTPNGRSIQAKGITPDIIVERAEIQPTEKKDGHIREKDLENHFESGEKVEGEDKKTEKGKVPAAKSDDQLKGDYQVLRALDLLKGWEILKTMNRAN

SEQ ID NO: 13777 - protein, 468 aa, Saccharophagus degradans 2-40
MSEKTLNLIKESEATWLDLRFTDTKGKEQHVTIPASYVDEEFFENGQMFDGSSIAGWKGINESDMILMPDDSTAMLDPFTDEATVILRCDIVEPSTGQGYERDPRSVAKRAEEFLKSTGLGDTAFFGPEPEFFVFDDVKWGADMSGSFVKINSEEAAWSSGSKFTDGNLGHRPRVKGGYFPVPPVDSLHDIRASMCNAMMQMGLDVEVHHHEVATAGQCEIGVKFNTLVKKADEVQILKYCVHNVAHAYGKTATFMPKPIVGDNGSGMHVHQSYWKDGVNQFAGDGYAGLSETALYYIGGIIKHAKAINAFSNPGTNSYKRLIPGFEAPVMLAYSARNRSASIRIPYVPSPKGKRIEARFADPIANPYLCFAAMLMAGIDGVKNKIHPGDAADKDLYDLPKEEADKIPQVCGSLREALDNLDKDREFLTQGGVFTDDMIDAYIELKMEDVFKIEHTTHPLEFDLYYSV

SEQ ID NO: 13778 - protein, 1468 aa, Saccharomyces cerevisiae
MAAKDISTEVLQNPELYGLRRSHRAAAHQQNYFNDSDDEDDEDNIKQSRRKRMTTIEDDEDEFEDEEGEEDSGEDEDEEDFEEDDDYYGSPIKQNRSKPKSRTKSKSKSKPKSQSEKQSTVKIPTRFSNRQNKTVNYNIDYSDDDLLESEDDYGSEEALSEENVHEASANPQPEDFHGIDIVINHRLKTSLEEGKVLEKTVPDLNNCKENYEFLIKWTDESHLHNTWETYESIGQVRGLKRLDNYCKQFIIEDQQVRLDPYVTAEDIEIMDMERERRLDEFEEFHVPERIIDSQRASLEDGTSQLQYLVKWRRLNYDEATWENATDIVKLAPEQVKHFQNRENSKILPQYSSNYTSQRPRFEKLSVQPPFIKGGELRDFQLTGINWMAFLWSKGDNGILADEMGLGKTVQTVAFISWLIFARRQNGPHIIVVPLSTMPAWLDTFEKWAPDLNCICYMGNQKSRDTIREYEFYTNPRAKGKKTMKFNVLLTTYEYILKDRAELGSIKWQFMAVDEAHRLKNAESSLYESLNSFKVANRMLITGTPLQNNIKELAALVNFLMPGRFTIDQEIDFENQDEEQEEYIHDLHRRIQPFILRRLKKDVEKSLPSKTERILRVELSDVQTEYYKNILTKNYSALTAGAKGGHFSLLNIMNELKKASNHPYLFDNAEERVLQKFGDGKMTRENVLRGLIMSSGKMVLLDQLLTRLKKDGHRVLIFSQMVRMLDILGDYLSIKGINFQRLDGTVPSAQRRISIDHFNSPDSNDFVFLLSTRAGGLGINLMTADTVVIFDSDWNPQADLQAMARAHRIGQKNHVMVYRLVSKDTVEEEVLERARKKMILEYAIISLGVTDGNKYTKKNEPNAGELSAILKFGAGNMFTATDNQKKLEDLNLDDVLNHAEDHVTTPDLGESHLGGEEFLKQFEVTDYKADIDWDDIIPEEELKKLQDEEQKRKDEEYVKEQLEMMNRRDNALKKIKNSVNGDGTAANSDSDDDSTSRSSRRRARANDMDSIGESEVRALYKAILKFGNLKEILDELIADGTLPVKSFEKYGETYDEMMEAAKDCVHEEEKNRKEILEKLEKHATAYRAKLKSGEIKAENQPKDNPLTRLSLKKREKKAVLFNFKGVKSLNAESLLSRVEDLKYLKNLINSNYKDDPLKFSLGNNTPKPVQNWSSNWTKEEDEKLLIGVFKYGYGSWTQIRDDPFLGITDKIFLNEVHNPVAKKSASSSDTTPTPSKKGKGITGSSKKVPGAIHLGRRVDYLLSFLRGGLNTKSPSADIGSKKLPTGPSKKRQRKPANHSKSMTPEITSSEPANGPPSKRMKALPKGPAALINNTRLSPNSPTPPLKSKVSRDNGTRQSSNPSSGSAHEKEYDSMDEEDCRHTMSAIRTSLKRLRRGGKSLDRKEWAKILKTELTTIGNHIESQKGSSRKASPEKYRKHLWSYSANFWPADVKSTKLMAMYDKITESQKK

SEQ ID NO: 13779 - protein, 423 aa, Thermodesulfovibrio yellowstonii DSM 11347
MKKKITISALILIIAFMGIIIGRWSAAQNTDSVYEDLRTFTEVFTTVKKSYVEDINPRELIRSAIKGMINSLDPHSAYLTPEAYKEFQTETKGEFGGIGIQIGIKEGILTVIAPIEDTPAWKAGIKAGDKIIKIDGQSTKDMNINDAVSKMRGPKGKSVILTIQRDEWKEPRDITIVRDIIKIKSVKYKMIDKEIGYVKLVQFQEGTAQDLANALQNLKDSGMRSLILDLRNNPGGLLQSAVDVSEQFLPPKHLVVSIQGRVGEKMQYYTEQLRPSYTEIPMIVLVNQGSASASEIVAGALQDWGRALILGVQTFGKGSVQSLIPLSDGSALKLTTAKYYTPKGRSIHAVGIMPDIVVKLETKNGKEVPVIREKDLEQHLKGEKVEPQEKVPQEVDEKEDTQLQRAIDILKSWKIMEKMKKAA

SEQ ID NO: 13780 - protein, 392 aa, Lasiocarpus sp. Anderson 13834; identical to SEQ ID NO: 10442

SEQ ID NO: 13781 - protein, 164 aa, Ralstonia eutropha JMP134
MSNVYQFEAKSLAGQPVPLSQFRGKVLLIVNTASECGFTPQYAGLQALHDAYAARGLEVLGFPCNQFGKQEPGDAQQIGQFCESRFSVKFPMFAKIDVKGPDAHPLYQWLTSAKRGVLGTQAIKWNFTKFLLRRDGTVYKRYGSITKPEEIRADIETLLADPAA

SEQ ID NO: 13782 - protein, 392 aa, Ptilochaeta nudipes; identical to SEQ ID NO: 10444

SEQ ID NO: 13783 - protein, 217 aa, Brassica napus
  misc_feature (82)..(82): Xaa can be any naturally occurring amino acid
  misc_feature (95)..(95): Xaa can be any naturally occurring amino acid
  misc_feature (116)..(116): Xaa can be any naturally occurring amino acid
  misc_feature (135)..(135): Xaa can be any naturally occurring amino acid
MERGGFHGYGKFSLNNTNPSEPAKFLMAAGSMQLSVFNKPNKTANGGEEECTVREQDRFMPIANVIRIMRSILPVHAKISVXDDSKETIQECVSXYTSFVTREANERCQREQRKTXTAEDVLWAMSKIGFDDYIXYLHRYRELEGDRGVSYGAGSVSMTNGLVVKRPNGTMAEYGAVAGIHMAPYHYHHQNGFVFSANEPNSKMGGSSSGASVKVYP

SEQ ID NO: 13784 - protein, 705 aa, Citrullus lanatus
MASSTVQIHGLGAPSFAAASMRKSNHVSSRTVFFGQKLGNSSAFPTATFLKLRSNISRRNSSVRPLRIVNEKVVGIDLGTTNSAVAAMEGGKPTIVTNAEGKRTTPSVVAYTKIGDRLVGQIANRQAVVNPRDTFFSVKRFIGRKMSEVDEESKQVSYRVVRDENGNVKLECPAIGKQFAAEEISAQVLRKLVDDASKFLNDKVTKAVVTVPAYFNDSQRTATKDAGRIAGLEVLRIINEPTAASLAYGFEKKSNETILVFDLGGGTFDVSVLEVGDGVFEVLSTSGDTHLGGDDFDKRIVDWLAANFKRDEGIDLLKDKQALQRLTETAEKAKMELSSLTQANISLPFITATADGPKHIETTLTRAKFEELCSDLLYRLKTPVENSLRDAKLSFKDVHEVVLVGGSTRIPAVQELVKKMTGKEPNVTVNPDEVVALGAAVQAGVLAGDVSDIVLLDVSPLSLGLETLGGVMTKIIPRNTTLPTSKSEVFSTAADGQTSVEINVLQGEREFVRDNKSLGSFRLDGIPPAPRGVPQIEVKFDIDANGILSVTAIDKGTGKKQDITITGASTLPSDEVERMVSERRKFAKEDKEKRDAIDTKNQADSVVYQTEKQLKELGDKVPGPVKEKVESKLGELKEAISGGSTEAIKEAMAALNQEVMQLGQSLYNQPGAAPGAGAGSESGPSESTGKGPEGDVIDADFTDSK

SEQ ID NO: 13785 - protein, 68 aa, Populus trichocarpa x Populus deltoides
MTTSKRLSERKVAKFHKNITKRGSVPETSTKKGYDYPVGPILLGFFVFVVIGSSLFQIIRTASSGGMA

SEQ ID NO: 13786 - protein, 411 aa, Neptuniibacter caesariensis
MQIVNILIMFLIMLMLAALLRPLASRLHLPYSLVLVFAGFIGSEVITSLGYDTGLRWQHFQLLVFYIFLPVLIFEAALHIDAKRLCKKLLPILLLSTPLMLLATAVSAVFLYYGIGYPNHYPVLAALLTGALLSATDPAAVISLLKKAGVSEDLILLMEGESLFNDASAIMMFGLISSLLLMPEGDFSFSYAALSFAKIFFGGIAVGGAVLVILGGCFYLVKDSFSRMVFMLSGAYAGYVIAESVLHVSGVMCVLVTGVGFGELIRRYSRDEQKIRLSNHWLFAGELSSAMIFLLLGVTVTLAMFQQQWLAMLLGIAAVLIARGVGLVIIGPLINVIPGTRLNWKDHCIIYWGGLRGAVTIALALSLPLELDAWFTIQSIAYGVVMFSLCVQATSTPWLLTKLARKEKEGK

SEQ ID NO: 13787 - protein, 392 aa, Ptilochaeta bahiensis; identical to SEQ ID NO: 10447

SEQ ID NO: 13788 - protein, 442 aa, Agrobacterium tumefaciens str. C58
MIRKVSLLLIGGLMGATAMSVIYSASMPAQAAGPSTYKELSIFGDVFERVRAQYVTPPDDEKLVENAINGMLSSLDPHSSFMNAKDANDMRTQTKGEFGGLGIEVTMENELVKVISPMDDTPASRAGILAGDYISEIDGTPVRGLKLEQAVEKMRGAVKTPIKLTVIRKGADKPLEFTVVRDVIAVRAVKSRVEGDNVGYLRVISFTEKTYDDLEKAIKKIKADVPADKLKGYVLDLRLNPGGLLDQAINVSDAFLERGEVVSTRGRNPDETRRFNATAGDLTDGKPVIVLVNGGSASASEIVAGALQDLRRATVVGTRSFGKGSVQTIIPLGEAGALRLTTALYYTPSGKSIQGTGIEPDIKVEQPLPAELQGRVTAEGESSLSGHIKGQSETDEGSGSSAYVPPEAKDDIQLNYALDLLRGAKTDPSFPPNPDKAVVNKQ

SEQ ID NO: 13789 - protein, 392 aa, Dinemandra ericoides; identical to SEQ ID NO: 10449

SEQ ID NO: 13790 - protein, 228 aa, Phytophthora sojae
MDVATDATVEFSEELKHGIKLANPKATEVFAAESKEKQEEWLNSFINAGAQYREVFNVADTAKIKSFYELKDFDMAGNEVSMAKYKGKVVLAVNVSSKCGLTPTNYPELQELYAKYKDEGLEVLAFPCNQFAGQEPGTHEEIMEFVKQYNVTFPFFEKHDVNGATARPVFTYLKTKLPGSFGDFVKWNFTKFLVDRNGQPYKRFAPKDRPLSFEEDIKTLLAQKASEE

SEQ ID NO: 13791 - protein, 392 aa, Mcvaughia bahiana; identical to SEQ ID NO: 10452

SEQ ID NO: 13792 - protein, 495 aa, Bordetella parapertussis 12822
MAGPIIRHQYREVCMSTRKFRGFGLVAIGAVAGILLSVGVSAVAQRGSPLPLDELRQLSNVFAAIKNNYVEAVDDKTLIGNAISGMVSNLDPHSAYLDADAFREMQTATQGEFGGLGIEVGAEDGFVKVISPIEDTPAARAGIQAGDLIIKIDDTPTKGMSLNDAVKLMRGAPKSPITLTIMRADRPQPIVVKIVRDIIKVRSVRSKMLDNNVAYLRIAQFQEKTGPDLARHLKELGAKGAPKSLVLDLRNDPGGLLTSAIGVAGAFLPPDALVVSTDGRTPDSRHKYRTTPSEYARGEGNYLNDLPGWVKTVPMVVLVNVGSASASEIVAGALQDHKRAKVLGIRTFGKGSVQVILPLSESTAVKLTTSRYFTPSGRSIQATGIEPDYVVADTADGDLFRLPREADLQRHLSNQQSPDAEVKSNNDDNTEVAGKAFEFGGKDDFQLQQALNLLAGKPVQKGSARAQAKADIKPSEGKTQRITITPTGVEPAKSK

SEQ ID NO: 13793 - protein, 450 aa, Methanothermobacter thermautotrophicus str. Delta H
SISGIFTTLGAAEAGDIVIRHWIDEKGIEIASERGVSAIITQDLRGKSSRLAEEHGLPVILVDRIENANALALSWTIERFAPSSRRVVVTGTNGKSTTTHMIHHIIETTGASSYTNTDSRSEFNTLIDPVVSQQIAEASSDGAPEFMVIEVSEVQGWLGRVMRDHARMMTAAIGPEVVVITNVAMDHIGLVESVEDVFREVAGALRAIESGVAVLNADDERVRAMAHVNPGLSVVFYGSDSPVRYDGEGIHIGGDLIIPAEELPFRSEHFIQNTLAAAAACLELGFSPEDIRMGVKTYRPLKRRFSVLMTEPLVIDDFAHNPSGIRFTVRSAAANLRGRLWVVNAIRGSRGEDINVMNAAALADSLRGLNAELIVTSSSDVVDEQNRVLENERRAFLGVLDERGASYIHVEKLRDALRMVLDAAKPHDTILLLGAQGMDPAAGIIDEIRM

SEQ ID NO: 13794 - protein, 162 aa, Pseudomonas syringae pv. tomato str. DC3000
MSAFHDIRLKALGGQELPLADFKNKVVLVVNVASKCGLTPQYAALENLYQQYRDKGLVILGLPCNQFAGQEPGTEQEIAEFCQLNYGVTFPLGEKLDVNGPNRHSLYRLLAGEGAEFPGDITWNFEKFLVGKNGGVSARFSPRTAPDDPAVIQAIEKALAHN

SEQ ID NO: 13795 - protein, 533 aa, Lactobacillus acidophilus NCFM
MKIMVFIGIIMLAVAFSTMIQQRFFKIISVNYIAMAMGMILALIPQTNLLIENFSSEVFMGLIVAPLLFFEGQRTRLYSILRSWRAILGLTVIMIVLATITASFGIYLSLGVSLPLSFILAAISTPTDATATESVTHGLKLPKKIEFYLKDESLFNDASGIILLNMGVDWYIHQRLRVGAAIGNFLYSAGGGIIFGVLIAILLIFLRQKSPRSKYHLANSVLMPIEILFLLTPFFIYFLAEEIHVSGIIAVVAAGLVHNVESERSRLTNAAIFYNSKQISQLLTDILNGIVFIVLGIIIVRSMREDVFNKQTIEAIIIGIILYLANLIVRFLYCRFSPLIKGKISSKDAWIFSLGGIHGAVTFALAYTLSEMSVNIADLHLILISEITLILLSMIVPTILFRFILEPDKPDLDQRKEVDRVRVEMVQYAMEQMNKIYLPKKIKKQLEFDLRAQMNQTSIEDFIKELKYTAKQKELPEDEKDFRATVYRYAFRQERNYLGRIVQQEREYRHGFLVLYREILIAEVIFLGDEEID

SEQ ID NO: 13796 - protein, 195 aa, Brassica napus
  misc_feature (154)..(154): Xaa can be any naturally occurring amino acid
TFTHSSLMLSAMRTGAALLILPRFELNLVMKMVQKYKVTVVPMAPPVVLAFVKSPETEKYDLSSVRMMLSGSATLKKELEDAVRLKLPNAIFGQSYGMTEAGTVANSLAFAKHPFKTKSGSCGTVIRNAEMKVVDTITGASLPRNKAGEICIRXGHQLMKGYLNDPEATARTIDKDGWLHTGDIGFVDDDDEIFI

SEQ ID NO: 13797 - protein, 185 aa, Oryza sativa
MQGLPRASSSSTSASRDRDGGDGDGGGGGVTMTNGQDNLLPIANVGRIMKDGLPPQAKISKRAKETIQECATEFISFVTGEASERCRRERRKTVNGDDVCHAMRSLGLDHYADAMHRYLQRYREGEELAASLNSSSSAAAAAAAAGSRGGGAIQIDVRAELSIFRSGNNQGKKGVNSLFVEVKLN

SEQ ID NO: 13798 - protein, 584 aa, Vicia faba
MGSVEDDSSRLEEALIQDEESKLYTGDGSVDFKGRPVLKKNTGNWKACPFILGNECCERLAYYGIATNLVKPILLAKLHEGNVSAARNVTTWQGTCYLAPLIGAVLADSYWGRYWTIAIFSMIYFIGMGTLTLSASIPALKPAECLGAVCPPATPAQYAVFFIGLYLIALGTGGIKPCVSSFGADQFDDTDSRERVKKGSFFNWFYFSINIGALISSSFIVWIQENAGWGLGFGIPALFMGLAIGSFFLGTPLYRFQKPGGSPLTRMCQVVAASFRKRNLTVPEDSSLLYETPDKSSAIEGSRKLQHSDELRCLDRAAVISDDERKRGDYSNLWRLCTVTQVEELKILIRMFPVWATGIVFSAVYAQMSTMFVEQGTMMDTSVGSFKIPAASLSTFDVISVIFWVPVYDRFIVPIARKFTGKERGFSELQRMGIGLFISVLCMSAAAIVEIKRLQLAKELDLVDKAVPVPLTIFLQIPQYFLLGAAEVFTFVGQLEFFYDQSPDAMRSLCSALSLLTTSLGNYLSSFILTVVLYFTTRGGNPGWIPDNLNKGHLDYFSGLAGLSFLNMFLYIVAAKRYKSKKAS

SEQ ID NO: 13799 - protein, 494 aa, Staphylococcus aureus subsp. aureus MSSA476
MDASTLFKKVKVKRVLGSLEQQIDDITTDSRTAREGSIFVASVGYTVDSHKFCQSVADQGCKLVVVNKEQSLPANVTQVVVPDTLRVASILAHTLYDYPSHQLVTFGVTGTNGKTSIATMIHLIQRKLQKNSAYLGTNGFQINETKTKGANTTPETVSLTKKIKEAVDAGAESMTLEVSSHGLVLGRLRGVEFDVAIFSNLTQDHLDFHGTMEAYGHAKSLLFSQLGEDLSKEKYVVLNNDDSFSEYLRTVTPCEVFSYGIDEEAQFMAKNIQESLQGVSFDFVTPFGTYSVKSPYVGKFNISNIMAAMIAVWSKGTSLETIIKAVENLEPVEGRLEVLDPSLPIDLIIDYAHTADGMNKLIDAVQPFVKQKLIFLVGMAGERDLTKTPEMGRVACRADYVIFTPDNPANDDPKMLTAELAKGATHQNYIEFDDRAEGIKHAIDIAEPGDTVVLASKGREPYQIMPGHIKVPHRDDLIGLEAAYKKFGGGPVGQ

SEQ ID NO: 13800 - protein, 461 aa, Zea mays
LSWNKGHGILGISYGLYTKLTSEKPGCTEENKVRSILLDNPGLLVLDEGHTPRNERSVMWKTLGNVKTEKRIILSGTPFQNNFLELYNILCLVRPRFGEMFLTKSRVGRRHYVSKKQKDKFSDKYEKGVWASLTSNVTDDNAEKVRSILKPFVHIHNGNILRTLPGLRESVIILKPLPLQKSIIKKVENIGSGNNFEHEYVISLASTHPSLVTAINMSEEEASLIDKPMLAKVRSNPYEGVKTRFVIEVVRLSEALREKVLIFSQFIQPLELIKEHLRKFFKWREGKEILQMDGKILPRYRQASIEAFNNPNNDSRVLLASTRACCEGISLTGASRIVLLDVVWNPAVGRQAISRAFRIGQKKFVYTYNLITYGTGEGDKYDRQAEKDHLSKLVFSTEDEFNNVRNMLSKAEMEHCSKNISEDKVLEEMTSHDQLKGMFLKIHYPPTESNIVYSYNQIATE

SEQ ID NO: 13801 - protein, 635 aa, Haemophilus influenzae Rd KW20
MGKIIGIDLGTTNSCVAVMDGDKARVIENAEGARTTPSIIAYTDNETLVGQPAKRQAITNPKNTLFAIKRLIGRRFESEEVQRDIKIMPFEITRADNGDAWVNVKGDKLAPPQISAEVLKKMKKTAEDFLGESVTEAVITVPAYFNDAQRQATIDAGKIAGLDVKRIINEPTAAALAFGLGSSKENQVIAVYDLGGGTFDISIIEIDNFDGEQTFEVLATGGNTHLGGEDFDNRVIDYIIDEFKKEQNIDLRNDAMALQRVKEAAEKAKIELSSAQSTEVNLPYITADATGPKHLALNITRAKLEALVEDLVASSIESLKAVLKDADKGVSEIHDIILVGGQTRMPLVQQKVAEFFGKEARKDVNPDEAVAIGAAVQGGVLKGDVKDVLLLDVTPLSLGIETMGGVMTTLIEKNTTIPTKKSQVFSTAEDNQSAVTIHVLQGERKRAADNKSLGQFNLEGINPAPRGMPQIEVTFDIDANGVINVSAKDKNTGKEQQIRIQASSGLSDEEIQQMVRDAEANADADRKFEEVVQARNQADGIAHATRKQIAEAGDALSVADKEKIEAAVAELETAAKGEDKAEIEAKIEAVIKASEPLMQAVQAKAQQAGGEQPQQSSAKDDGVVDAEFEEVKDNK

SEQ ID NO: 13802 - protein, 539 aa, Lophopyrum elongatum
MGYQVVAAQLARLSGALGTSDHASVVSINLFVALLCACIVLGHLLEENRWLNESITALIIGLCTGVVILMTTKGKSSHVLVFSEDLFFIYLLPPIIFNAGFQVKKKQFFRNFMTITLFGAVGTMMSFFTISLAAIAIFSKMNIGTLDVSDFLAIGAIFSATDSVCTLQVLNQDETPFLYSLVFGEGVVNDATSVVLFNALQNFDPNSKIDAIVILKFLGNLCYLFVSSTFLGVFTGLLSAYVIKKLYIGRHSTDREVALVMLMAYLSYMLAEPLDLSGILTVFFCGIVMSHYTWHNVTESSRVTTKHAFATLSFIAETFLFLYVGMDALDIEKWKFASDSPGKSIGISSILLGLVLVGRAAFVFPLSFLSNLTKKTELEKISWRQQIVIWWAGLMRGAVSIALAYNKFTRSGHTQLHGNAIMITSTITVVLFSTMLFGILTKPLIRFLLPASSNGAASDPASPKSLHSPLLTSQLGSDLEAPLPIVRPSSLRMLITKPTHTIHYYWRKFDDALMRPMFGGRGFVPYSPGSPTDPNVLVE

SEQ ID NO: 13803 - protein, 208 aa, Oryza sativa Indica Group; identical to SEQ ID NO: 1177

SEQ ID NO: 13804 - protein, 288 aa, Escherichia coli O157:H7 EDL933
MAEKKQWHETLHDQFGQYFAVDNVLYHEKTDHQDLIIFENAAFGRVMALDGVVQTTERDEFIYHEMMTHVPLLAHGHAKHVLIIGGGDGAMLREVTRHKNVESITMVEIDAGVVSFCRQYLPNHNAGSYDDPRFKLVIDDGVNFVNQTSQTFDVIISDCTDPIGPGESLFTSAFYEGCKRCLNPGGIFVAQNGVCFLQQEEAIDSHRKLSHYFSDVGFYQAAIPTYYGGIMTFAWATDNDALRHLSTEIIQARFLASGLKCRYYNPAVHTAAFALPQYLQDALASQPS

SEQ ID NO: 13805 - protein, 301 aa, Physcomitrella patens subsp. patens
MTITNLRTISNLPFVAKITEDEWEQTFISIYRHDFHEIREIGHGNFSRVFKVLKRIDGCMYAIKRSRHSLRSTVERRQALTEVQALAAVGFHENVVRYYTAWFEDEYCYIQTELCESNLTQLRDADPNVSKETSLLEIMRQMASALSAIHSKGLVHLDVKPDNIYVLNGVYKLGDFGRAVRADGSMEIEEGDARYMPLEILNDDHSQLTKVDMFSLGATIYELARGLPLPTSGAQFQSLREGKLSLLPGYSLTLQNIFKALLNPDASARPSAAELLNHSVFHRGLARVSSLDALEVTEKSL

SEQ ID NO: 13806 - protein, 514 aa, Arabidopsis thaliana
MSGVVRSSPGSSQPPPPPPHHPPSSPVPVTSTPVIPPIRRHLAFASTKPPFHPSDDYHRFNPSSLSNNNDRSFVHGCGVVDREEDAVVVRSPIFPSEIGLEIRGCFGDFDCYLLLLSLIQKLRSVRLSSIRVNFCRLFSFAMSRKRKATMDMVVAPSNNGFTSSGFTNIPSSPCQTPRKGGRVNIKSKAKGNKSTPQTPISTNAVRSFYEISFMSRVTSLLTKKFVNLIKQAKDGMLDLNKAAETLEVQKRRIYDITNVLEGIDLIEKPFKNRILWKGVDACPGDEDADVSVLQLQAEIENLALEEQALDNQIRWLFVTEEDIKSLPGFQNQTLIAVKAPHGTTLEVPDPDEAADHPQRRYRIILRSTMGPIDVYLVSEFEGKFEDTNGSGAAPPACLPIASSSGSTGHHDIEALTVDNPETAIVSHDHPHPQPGDTSDLNYLQEQVGGMLKITPSDVENDESDYWLLSNAEISMTDIWKTDSGIDWDYGIADVSTPPPGMGEIAPTAVDSTPR

SEQ ID NO: 13807 - protein, 181 aa, Brassica napus
MASSMLSSATVVSSPAQAAMVAPFTGLKSSAAFPVTRKTNTDITSIASNGGRVNCMKVWPPVGKKKFETLSYLPDLTDVELAKEVDYLLRNKWIPCVEFELEHGFVYREHGNTPGYNDGRYWTMWKLPLFGCTDSAQVLKEVQECKTEYPNAFIRIIGFDNNRQVQCISFIAYKPPSFTGA

SEQ ID NO: 13808 - protein, 392 aa, Oryza sativa
  misc_feature (150)..(150): Xaa can be any naturally occurring amino acid
MAGKKGVHFGGGNIGRGFVAEFLHNSGFEVVFVDVMDNLIETLQKTPSYEVTEIGDDGEKKFTIDNYRALNSKYSMDEVVHEIATADVVTCAVGPNILKFIAEPIAKGIEARKESNPLAVIACENAIGDTDTLRGLIEGKLSDETKANIXSQARFANSAIDRIVPVQPEGSGMNVLIEKFYEWCVEEKPFDGNPPAIQGVHFVEDLQPYIERKLFTVNTGHATAAYYGHNRGFKYVHEVLADKELHDIVQNTLKETAHLICTKHSHISKEEQAEYVQAIVKRISNPTLKDVVDRVGRDPLRKIGRKERFIGPAALLAEAGEKYDNLLGGIEMLLRFQNVEGDEASVELAKKLKELDATTATKELTGLEEDHPLFAAVAEKVKKVQGEKGESS

SEQ ID NO: 13809 - protein, 485 aa, Arabidopsis thaliana; identical to SEQ ID NO: 12549

SEQ ID NO: 13810 - protein, 392 aa, Burdachia sphaerocarpa; identical to SEQ ID NO: 6919

SEQ ID NO: 13811 - protein, 412 aa, Thermosynechococcus elongatus BP-1
MGIRWLQRLIGCLVVLVGIWGIFPPDSAIALTEEQKLFNEAWRIVNQAYVDPTFNGQNWWRVREKALKRPLPDREATYAAIEAMLATLEDPFTRFLRPEQFRSLQTTTAGELIGVGLQISTDPKTGVLEVIAPIDGSPAAEAGIQPRDRILAIDGISTNQLSLDEAAERMRGTAGSAVHLLLQRGNDTPQELILHRGHIEINPVTAEVRQVQGHTVGYIRLSQFSAMAPTEMRKAIQILEQQGAEEYILDLRNNPGGLLQAGVEIAQLWLDSGAIVYTVDRQGIVDSLNASGGALTHDPLVVLVNGGTASASEILAGALQDHGRARLVGDRTFGKGSIQSLFHLSDGSGLAVTIAHYETPNHHNINKVGIEPDRRVLDAPESLMAMGTAADPQYLAALELLHSPIQVATSAG

SEQ ID NO: 13812 - protein, 620 aa, Helicobacter pylori J99
MGKVIGIDLGTTNSAMAVYEGNEAKIIANKEGKNTTPSIVAFTDKGEILVGESAKRQAVTNPEKTIYSIKRIMGLMFNEDKAKEAEKRLPYKIVDRNGACAIEISGKIYTPQEISAKILMKLKEDAESYLGESVTEAVITVPAYFNDSQRKATKEAGTIAGLNVLRIINEPTSAALAYGLDKKESEKIMVYDLGGGTFDVTVLETGDNVVEVLATGGDAFLGGDDFDNRVIDFLAAEFKNETGIEIKNDVMALQRLKEAAENAKKELSSAMETEINLPFITADATGPKHLVKKLTRAKFESLTEDLVEETISKIESVIKDAGLTKNEISEVVMVGGSTRIPKVQERVKAFINKELNKSVNPDEVVAVGASIQGGVLKGDVKDVLLLDVTPLSLGIETLGGVMTKVIDRGTTIPAKKSQVFSTAEDNQPAVSIMVLQGERELARDNKSLGKFDLQGIAPAPRGMPQIEVTFDIDANGILTVSAQDKNTGKSQEIKISGSSGLSDSEIEKMVKDAELHKEEDARKKEVIEARNHADSLAHQTQKSLDEHKTNLNENDANEIQNAINALKDCIKNDNATKAELEDKTKALTQAAQKLGEAMANKNNAEQPKKKDDDVIDAEVE

SEQ ID NO: 13813 - protein, 392 aa, Glandonia macrocarpa; identical to SEQ ID NO: 6922

SEQ ID NO: 13814 - protein, 159 aa, Streptococcus pyogenes M1 GAS
MPNLYDFTVKAQDGSDISLVDYKEKVVLVVNTATKCGLTPQYQALQALYDTYHDKGFEVLDFPCNQFLNQAPGDAEEINHFCSLTYHTTFPRFAKIKVNGKDADPLFTWLKEEKSGPLGKRIEWNFTKFLIDQNGQVIKRYSSKTDPKLIEEDLKALLG

SEQ ID NO: 13815 - protein, 958 aa, Thalassiosira pseudonana CCMP1335
MLQFVRDKQLTLQFGCLTVNGGTWEQLTASRHAEQPVAQTVLGTTPRCLHIDPPAILKQNDNVAIGSLLFPLPLQHKLFSATSHRQLSIRQKKMMILAGILVASSSYHRAFAFQPPISPRTHTNHVASTSASLAFETAAKTILPSTLYDNLSVVKSRRMSATSLYFFGMNNNEDKSYENIKSKQQAKGKKDATTNEKDTDDDDQSFLSKYVKPSLSILKIALPSAVAGAAVTLSVLFLPLLSDYYDAFNGVSSKDFYGVPSSTGSQSSSSSSTGKAVNSVNNINQPVILFETILNDLNDAYVDDVDIQKLFETGVKAMTSSLDPYTEFESRQEAQDLEESVSGKYGGVGLVIRGSTIVADASDDEDIVLEQSDNTPSSVNEKIETPTAPVAVKDSKSGNKVTDDDDDDKIELAERKRRRQKSMEDGIRVVSAFEGYAYDAGLRVGDKLLAIDDFEIKPTTAVDEVRNHLRGEPGTPVSITFLRDGVGGEKSEPQTISMQRTVVRIPDVKYFGYIGDPKDGIGYVDLSGFANDAGREVRYAIRVLQHGSEMLARSVEGAPVDDGGKVNVDDIDTTKLKGLILDLRSNPGGKPSECGYSSYHGLLTSAVDVSTLFVPSGSDIVSAKGRGFPETLYRSKTEPVLNPSTRLAVLVNEQTASAAEIVTGAIQDLDVGVVVGKGRTFGKGLVQNVQDLPYQTALKYTVAKYYTPSGRCIQSTVYEDGGRSDNAEASSSEIKYKSTKVADKDRTTFLTAHGREVRDGGGVEVDFKVEPRKASPLEIILLNSGMYSNYAAEWSKHHELTDNFKVDDATYKDFQRYVEKRQKDGDIKLEVLYESQLKELQKKLKASKFASASRELEKLRADIIAETKKDFTTYRNEVVEDLEQNILARYLPESMLIERGLKSDVQVEETAKMLKNGKQFDTLLSRDGSSREKTGTQRASDGYETAKTQFEPNLRSRW

SEQ ID NO: 13816 - protein, 392 aa, Barnebya dispar; identical to SEQ ID NO: 6926

SEQ ID NO: 13817 - protein, 999 aa, Thermosynechococcus elongatus BP-1
MAIFHGTWLPEPAPQFFIWAEEWRSLAQAITPWAPPAIPVYPYATQRKTPLRKTARPSATYVALPAQIQGHQLLPPPLAEVQGELLFLWQVPGWSIPASEVLEQLHQLSLHGQDSGSIGDDLRYWLHVSRWLLDLIVRGQYLPTPEGWRILLTHGGDRDRLRHFSQLMPDLCRCYQADGTALQLPPHAADLLADFLQHTLQGYLHTALADLELPKVGLAKEHGHWLAFLKTGQTPELPPPLIERLHRWQEPYREQLHLRPQWRLALQLVPPDTADGDWHLAFGLQTEGETDTMLRAAEIWQCTQEALLYQGQVLWQPQETLLRGLGLASRIYRPLDRSLQERSPVALTLHTTEVYAFLQSAIAPLEQQGVAIILPPSLRRNSAQHRLGLKIIATLPPPATNGLTIDSLMQFQWQLQLGQHPLSEADFDQLRRQGTPLVYLNGEWVLLRPQEVKAAQEFLQSPPKTQLSLAETLRIATGDTVTVAKLPILGLDTNDALQTLLDGLTGKQSLDPVPTPQEFCGELRPYQARGVAWLSFLERWRLGACLADDMGLGKTIQLLAFLLHLKETGRAYRPTLLICPTSVLGNWLRECQKFAPTLRAYVHHGSDRPKGKAFLKKVETHDLILTSYALLQRDRTTLQQVLWQHLVLDEAQNIKNANTQQSQAARELSAQFRIALTGTPLENRLLELWSIMDFLHPGYLGHRTYFQHRYVRPIERYGDTTSLNALRTYVQPFILRRLKTDRSIIQDLPEKQEMLVYCGLTLEQMQLYTAVVEDSLAAIENSQGIQRRGNILATLTKLKQICNHPAQYLKQEDYAPDRSGKLQRLIEMLQALQEVGDRALVFTQFAEFGTHLKTYLEKALQQEVFFLSGRTPKAQRELMVERFQHDPEAPRVFILSLKAGGVGLNLTRANHVFHYDRWWNPAVENQASDRVFRIGQARNVQIHKFICTGTLEEKIHEQIEQKKALAEMIVGSGEHWLTELNLDQLRQLLTLDKERLITL

SEQ ID NO: 13818 - protein, 392 aa, Spachea correae; identical to SEQ ID NO: 6930

SEQ ID NO: 13819 - protein, 647 aa, Acinetobacter sp. ADP1
MAKIIGIDLGTTNSCVAVLEGDKVKVIENAEGTRTTPSIVAYKDSEILVGQSAKRQAVTNPKNTLFAIKRLIGRRYEDQAVQKDIGLVPYKIIKADNGDAWVEVNDKKLAPQQVSAEILKKMKKTAEDYLGETVTEAVITVPAYFNDAQRQATKDAGRIAGLDVKRIINEPTAAALAFGMDKKEGDRKVAVYDLGGGTFDVSIIEIADLDGDQQIEVLSTNGDTFLGGEDFDTALIDYLVEEFKKEQSVNLKNDPLALQRLKEAAEKAKIELSSSSSTEINLPYITADATGPKHLVINVTRAKLEGLVADLVARTIEPCRIALKDAGLSTSDISDVILVGGQSRMPMVQQKVQEFFGKEPRKDVNPDEAVAIGAAIQGAVLSGDKTDVLLLDVTPLTLGIETMGGVLTPIIEKNTTIPAKKSQVFSTAADNQPAVDISVYQGERKMAQQNKLLGNFQLGDIPPAPRGVPQIEVSFDINADGILKVSAKDKSTGKEQSIQIKANSGLSDAEIEAMIKDAEANAEEDRKFEELAKARNEADALVSSSNKAVKDLGDKVTEDEKTAITTAVSELEAATKENDVEDIKAKTEALQNILMPITQRAYEQAQGAGGAQGFDPNAFQGGDAGQQQKADDGVVDAEFTEVKDDKK

SEQ ID NO: 13820 - protein, 182 aa, Arabidopsis thaliana
  misc_feature (52)..(52): Xaa can be any naturally occurring amino acid
  misc_feature (123)..(123): Xaa can be any naturally occurring amino acid
  misc_feature (131)..(131): Xaa can be any naturally occurring amino acid
  misc_feature (152)..(152): Xaa can be any naturally occurring amino acid
QWLSSMLSSATMVASPAHATMAAPFNGLKSSAAFPVTRKAINDITSITSNGXRDNCMQVWPPIVKNKIETLSYLPDLTDSKLAKEDDYLIRNKGIPCVAFQLEHRFENREPRNSPLYYDGPDXHMRKLPLXGCPHSDSPLNHEQNGNKEYPXAFIRIIEFHIHPSKSQGIGFLVYKPQDSPA

SEQ ID NO: 13821 - protein, 392 aa, Tricomaria usillo; identical to SEQ ID NO: 6932

SEQ ID NO: 13822 - protein, 761 aa, Yarrowia lipolytica CLIB122
MPFSEAPPLPQGAGYGILVGVGALFAVFIVFTLRVSLNYLGEKANKSEMFMVANRAVGVGLTASAVFSSWMWANETLYGAVVGYNFGMSGPFWFAAGLSFHIALMTVVGIQVKLKVPNGHTLLEIIKFRYGVPGHIVYMVFCLINNILSCSTMILAAAGAISAITGMHSAAASMLIPVGVILYTAAGGLKATFLTDYVHTTVALVLLMYFCIGILTNEHIGGVYGLYEKVLAYSDNADHYIKGNYQGSLLTFKSQGGALFSICHNIANLGLVIMDTAFWQKSMAADLKATVPGYMIGSVLIFCVPWALGTISGLGARVLEQSGIIDPISAHALDVGNVFPIVTHALLGKGASVGIVLMLFMSVTSTVSAEMIAVSSIISFDIFRTYIKPNASDRVLIFVSHAGVVFFGLLSGAIAVAFYFGGIDLNWMSYFLGIAITPGVFPVILTILWKRQSRLAALVSPILGLATGLGVWLGTAQVYFGEISVKSTGAPLPNVWGNIATLMSSLLFSVIITLIRPEDFDWLIFHNISKVNEDDEKPEDLEAIHENPTDPFFISDSDAPSTSKTNEVSEVIINHEIASSENDSENESDHGDPTKQTHDSSTHSLSSGSYHVAVVREAATSNGLFQPRLVIPQNISTWRKFLYYIGWDTAHTDYSNHPLGADSIPIMLYWYKVAKIFAVVICLITWIIWPYSLYRHYIFSKSFFSGWVIVAIIWVFLAFIFVVIFPLYDGRKSLYRVYDGLRTDWKKWRHRKDGQAEEEKE

SEQ ID NO: 13823 - protein, 228 aa, Arabidopsis thaliana; identical to SEQ ID NO: 12957

SEQ ID NO: 13824 - protein, 190 aa, Arabidopsis thaliana; identical to SEQ ID NO: 258

SEQ ID NO: 13825 - protein, 1161 aa, Debaryomyces hansenii
MASDEPSQNIINLSSDDDEEVDENVSLKDIQINGHEIHERGNNQDWRQANSNSNTTHINQPPKRQRLDSLYSNNGPFRSPSKQGNDLSHIGNSNHIQQRQLYPKTLPNAVLDRTVFGPRSVSSNTTIQNHPRQSEPQSIPKNNLIQNQYMQADPQSIPNNNTIQYQSRQADPQEDVIILSSEDEDMDSDGDIMILDAEEASRIGKFKTSSFERNANRSSRDMGNYEAPANTGPYYSVPAVNPNEMHVTYNNPAPVPHFTKDDGPEVEKLNFQRAQETLEENVRRKDELLYKHEQLTSDFTKSSRQANELLQHLTLLQSHLKREEIQENRDENTILSLKNEISFKGAEYHNFRRSKDATATSLSGIASKLSWLTVSIRDAKSRIHNYGKHRNGVNIIDNPFVLNNNSGRNNSDYENESIMNNPFGNIPGFSANVYSDNDQQHLQNLLNNIRPDEELDEEGLSLTPSELAITLLKHQRMGLAWLLRMEESKSKGGILADDMGLGKTVQTIALIMAHKSDDDNRKTNLVIAPVSLLRQWAAEIESKIKPNAQIKIAIYHGSVKKNLRTFNSLKKYDVVLTSYGTLSSEWKKHYQGPLEEARLSRNQNVIPDLDAGGTSYTSPFFATDAVFYRIILDEAQNIKNKSAIASKASYCIKGIHRFCLSGTPIQNNVEELYPILRFLRIKPYNDESKFRSDIVLPIRSKSSGYDDFDKKKSMQKLRALLRAILLRRSKNSLIDGKPILSLPDKLVTEDTVQMEDEELTYYRELEQGIQKKAKTLLASEKLGSTSSILTLLLRLRQACCHSFLVEMGRMKAAESEATKTLITRDWKSMYVNIQKFDEDTINRIRNEVHQGNLLKGENEGESNTNSDEDLFTCPICYDVLGYESIVLFSGCGHMICNNCIENFFERFETGDGSEGNRLASCFSCSKSIKENELIDYNMFHMIHQEGYDRDKIAEFYNINYSSNGKTTNMQKIRQLIQENKGFTPSAKMEKCMHLIKDVLENYPDEKIIIFSQFLSLFDLMKLVLANEKIPFLRYDGSMSLDEKNSTIKQFYQGSTKVLLISLRAGNVGLTLTCASHVIIMDPFWNPYVEEQAMDRAHRIGQQRDVRVHRILTEGSVEGRIMTLQNEKKEIISGALDEKGMKSVSKLGRQELGFLFGLNELR

SEQ ID NO: 13826 - protein, 648 aa, Ostreococcus tauri
MRARWVQYRTYGDSRPPHGAMPSASSLAHANAPLCNHEYASTARARTRAACASRTVGRPLIPIARAVDSNASARGGVVGPCLQNTRVSPTKHPRVTPTKHPRVSPTKHPRVRVHDPPGPPPFPPRDGRNGGPTSTHPPPNARGRRNVRARWCSPEDGKRTRRRAATQVMEPHTAKNLKESKSNKLKDFVQVSGPLGISHFVMLSSSDANKYLKIAKTPRGPTLTFKIHSFSLAREVAATQKNPRNPAKAFLSPPLVVLNNFGDEAHQKLATITFQNMFPPINVRKVKLSTCQRAVLVDYDAKAKRFQFRHYSINAVPVGANKKLKKLLQSRNAPDLGELQDVSEFFDKRVGDASDSEGSDDESRRVHLTQDFNRIAHADSTSKIVLSEIGPRMELELVKVEEGMCDGRVLYHAYVKKTADEIKTLEQKKVDREKLRKKRRLEQEANVKRKNREKEARADAERERQGKPGKKKSPLDEKRTTPSGPPHSRRKSASGARATSTTRRQNPSSPPARVDLSDRDAATTSSFAPIDDTGDRWRHRPHVGRAPPSTTSRARRSIVLTRVLCAQAVKAFSRGYDSSKTKGTRCVRSRDASARGGTDEDAEADSHWMVKTPVRTQRSSDVRTLTRACGRTRASRAVNGSRVIYSCF

SEQ ID NO: 13827 - protein, 466 aa, Debaryomyces hansenii
MVSNSPRYSEESARPEHHAMYDPTVFQINRRFRIKLSQLKYFTFTIIGIALLWPWNCFLSASAFYSERFEHSPQLVRIYSSTMMSVSTITSALYNYYLSQVQVGVNYNHRVNVGFSMTIGVFIIMAFSCVLNVFITMDDYLFFTGLMIMVFISAAATCLAQNGTMATVNVMGSLYANGVMVGQAIAGVLPSSALIISILIVGDKKADADKENQYMDKNYGVFIYYITASLIAVLSISLLYFTNHYKIESTYKTLNHMVEEQQPLNSSDDDSEGEPEVTQKKYVPFMVLWSKLKLIVSTIFLTFGITLIFPVFASTVESVHKDSDHTLLQRKIFIPFIYLVWNLGDFLGRVCCGKPRLAVLIKNPKVLLMYSIARLIFIPLFLTCNVNSASSGKSNAIINSDTWYIMLQFLFGLSNGQLCTSCFMIVGNNCDTDDEKEAAGGFTTVFLSVGLAFGSVFSYLLVLMIN

SEQ ID NO: 13828 - protein, 693 aa, Blastopirellula marina DSM 3645
MHPTTVTRNSWRRPGALRVLTFASFLFSAIFVCLPDQSSAQLAPKVSERRVAFAVTQLMKKDHLSNHPIDDEMSQRAFDQFLKTLDPLKLYFYQSDVDEFAANRDKLDDMVNAGDVSFSRTVFDRFLKRVNERVAMVDRVLAADLDFEKKEMFITDADKVQYPKNEAEAYDRWRQRVKYDILSEKADDKTPEEAQEKIHRRYESFARRMSQTSGDELLEMFLTSMTSSFDPHTTYMSPSTLENFNISMRLQLDGIGAALLSEDGVVKVTKVIPGGAADKHGKLHPEDTIVTVGQGENGEMVDVVDMKLNDVVNLIRGKAGTVVRLGVKAKGTGETTIYNVTRAKIELKDSEARGEVIDHKTDDGRTLRVGWIDLPSFYMDMDAARRGLGDFKSTTRDVRKLLDDFNDQEVQAVVLDLRRNGGGSLTEAINLTGLFIDQGPVVQVKDSSGNIQAYDDTDRGMVWKGPLVVLTSKLSASASEILAGAIQDYKRGIIVGDQATHGKGTVQSLLDLGSQLFPVPNPPNYGALKITMQQFYRPNGESTQRRGVEADVVLPWITTHMDIGEGDLDYAIAWDKIPQAQYTLYNMVDPNLLKQLQTDVNDRIGQSEDFQKVNKNIERYVVQKNRKAVNLNEAEYLAERKELDKEKTEEDTFKEDTENTDEVVKKDFYFDEVIDVTSDYVKLLEQGRVAARQ

SEQ ID NO: 13829 - protein, 170 aa, Nelumbo nucifera
MASQSKKEKGSIHDFTVKDARGNDVDLSIYKGKVLLVVNVASQCGLTNSNYTELSTLYEKYKDQGLEILAFPCNQFGHQEPGTNEQILEFSCTRFKAEFPIFDKVDVNGQNAAPIYKFLKSSKGGIFGDSIKWNFSKFLVDKEGHVIDRYAPATSPLSIEKDIKKLLGIS

SEQ ID NO: 13830 - protein, 448 aa, Rhodobacter sphaeroides 2.4.1
MRKYMMAALGGTVAGVLLATQVAGPLIAQEQQRSKSVYEQLDLFGDIFERIRAQYVEEVETDKLIEAAINGMLTSLDPHSSYLPPDDFDDMQVQTRGEFGGLGIEVTQEEGFVKVVSPMDGTPADAAGIQSGDFITHVNGESVLGLTLDQAVDMMRGPVGSEILITVVREGTPEPFDVSIVRDTIKLVAARSRVVGNTVVVRLTTFNDQTFSGLKEGLEKEIKALGGEDKINGVVLDLRNNPGGLLTQAIQVSDAFLDKGEIVSTRGRAAGDGERFNATPGDLIDGKPMVVLINGGSASASEIVAGALQDHRRAIVVGTKSFGKGSVQTVIPLRGEGAMRLTTARYYTPSGRSIQALGVAPDIVVNQPPAKPAVPEEEESPATSAARNRSEADLRGVLSNDSMTEDEKKQLEADRARAEESAKLRDEDYQLAYAVDILKGLSAIEVKP

SEQ ID NO: 13831 - protein, 150 aa, Chamaecrista fasciculata
MGFSEQQEALVVKSWSVLKSNSEELGAKFFLKIFQLAPAAQNLFSFIKDSNVPVEQNPKLKPHAAAVFVLIGESATQLGKAGKVTVDEAILKKIGATHAKSGVQNEHFPVAKSAFFETIKEAAPELWSAELESAWGEAFDQLAAAIKAHT

SEQ ID NO: 13832 - protein, 155 aa, Zea mays
MDRATDMDEKHAPSPSPVQRSLSAVTYCCGACGYDLRLRSSDRNTAGIVGAGGAAYGRAARRGVVAFDAIDDARFGHADEFRCVDLRARRLFVRRTRLLCRKCGAGLGFGYDDRGQDGARPPRYDIKIRALQPLAADDDPPPPPGDAAAPPTLDA

SEQ ID NO: 13833 - protein, 1086 aa, Coprinopsis cinerea okayama7#130
MAESKEGSSGPRGQRKSKGYDHLIKLVTGNSVGIAAPAGTLRLALLFLKALELKSMECVELSDFDMDEDELSQVMQESTTKGNKGKGAASASRKDVLGTSGKRFKSKSKANKRLFGNVEANPLDKFFGKVALAAQYKEEGEEEAPALKRKSASASPRPNKRQKLSQEASSQAAEDSVTESESEEDVPIPAQNEMSVTEEESVTEEESVTEEESVTEDDDDDEPWEYNKDGTPRLKPGFELGPGQERLGPMVLDQVQGIQVPGAINTYLREYQREGVQFFWDMYKQGRGGLLGDDMGLGKTIQVISFLSAIMKKTGSQDDRNRRRKHVSRLQDGEMWKKHRKLPKANEKWPTCLIIAPSTVVQNWLREFETWGYFEVGSYAGDSKPADREAIRHDFKLGRLDVPRKDIEYLDTLDWSCVIVDEVHRVKNEDAAVTQALHQFACPIRFGLTGTAIQNSYKELWTILDWTNPGRIGTVKEWNEYVAKPLTEGQSTTASAETRKKALIVAKILKQKFLPQYFLRRTKDIISHQLPKKTDQVVFCPLSKFQSSVYKKILKSRDVQNLLRREEECSCGSKKKRKNCCHPFVAANVFKYMSILIKLSNHLGLILPGSPRDSAEQQERNRELAQLAFPDGNVPMYGKVIIDPRYCGKWQWRADPTNKVLIFTKSVRLLEMLEYHLQTQNYGFCKLDGSTKQSERMPMIDRFHANPDIFIFLISTMAGGTGLNLTGANKVVIFDPNWNPAHDLQAMDRSYRFGQTRDVSVYRLLGAGSVEELIYARQIYKQQLMAIGYEASVQTRYFQGVQGDVTKRGELFGLENIFKLHEDKLATKMAIEKANLAEFNWAMANLGGKSKSRKSKTGDELLAEVQGVKISDSDKDLQGLGALLFSDDAPTALSEDSEQNAIQKALSTIGVSYIHHNDHILKPSRIEEERTNLTLKRKQMKEKKASEKAEAKESKPKRKEKEKEPDAKTPAVWPPIRGKAKRAQMASAAANPKTPEPPSSPPRTSPVRSPSPEKESVAEVKKKFSPEEQLRARHEALVELGFINGPEELPKFVQLFVKNTPEMQEEILGELDAFIKSQEEEGASDS

SEQ ID NO: 13834 - protein, 900 aa, Oryza sativa
MVPPPRRRGRLETGSAPAATNVASSPVLALPPADRFPPPLPSNAMSLHSLKETLQSSSFSQPQSESQPRSPPPLLARRPPKTSLSQQLLRLDASSSSSSFSVSPPPPPRTSPTSDAAADDAPPLPEEEDEVPCIRPRASLPPAASLDSRGPYEPLALSPPGERPVVQVPSSINCRLLVHQRDGVRFLYNLYRNNHGGVLGDDMGLGKTIQTIAFLSAVIGKDNDHGDQLVEGRKIAPILILCPTSVIRNWENEFAEWARCSVAVYHGPNRDLVLQKVETQRLEIVITSFDTFRIHGKILCGISWDLVVVDEAHRLKNEKSKLYTACLEITTRKRFGLTGTIMQNKIMELFNLFDWIVPGCLGDREHFRVYYDEPLKHGQRFSAPERFVQVADKRKKHLVSVLSKFLLRRTKEETIGHLMLGKEDNIVFCRMSDVQKRVYRRMLQQPDVQILINKDLPCSCGSPLTQVECCKRTEPHGIIWSYLHRDNPEGCSLCPFCLVLPCLGKLQQISNHLELIKPNLKDEIEKQKKDAELAAAVFDTDIELVGGGAKSENFMGLSDAEHCGKMRALERLLSLWTLQGDKILLFSYSVRMLDILEKFLIRKGYCFSRFDGTTPMNARQLLIDEFNRCPSKQVFLISTRAGNLGVNLVSANRVVIFDPSWNPAQDLQAQDRSFRFGQRRHVTVFRLLGAGSLEELIYSRQIYKQQLSNIAVSGKIEKRYFEGVQDDKKFQGELFGICNLFRDLSDKLFTSEIIEMHGEHGKGNTAETIGIREIVDTNIFGTQDQMKSSMTAIHNENKNLYHCGIVYAHRNEDVVNTRTNEASNCAEDKTVPRHLEELQSKKNETMHTIKAKSYSLVQKKKEFSRIASFMGMNDLEFSKWLLSVSPLQRHEVLDRYRNAK

SEQ ID NO: 13835 - protein, 164 aa, Zea mays
MADDGGSHEGSGGGGGVREQDRFLPIANISRIMKKAVPANGKIAKDAKETLQECVSEFISFVTSEASDKCQKEKRKTINGDDLLWAMATLGFEEYVEPLKIYLQKYKEMEGDSKLSTKAGEGSVKKDAISPHGGTSSSSNQLVQHGVYNQGMGYMQPQYHNGET

SEQ ID NO: 13836 - protein, 898 aa, Saccharomyces cerevisiae YJM789
MARRRLPDRPPNGIGAGERPRLVPRPINVQDSVNRLTKPFRVPYKNTHIPPAAGRIATGSDNIVGGRSLRKRSATVCYSGLDINADEAEYNSQDISFSQLTKRRKDALSAQRLAKDPTRLSHIQYTLRRSFTVPIKGYVQRHSLPLTLGMKKKITPEPRPLHDPTDEFAIVLYDPSVDGEMIVHDTSMDNKEEESKKMIKSTQEKDNINKEKNSQEERPTQRIGRHPALMTNGVRNKSLRELLGDSENSAENKKKFASVPVVIDPKLAKILRPHQVEGVRFLYRCVTGLVMKDYLEAEAFNTSSEDPLKSDEKALTESQKTEQNNRGAYGCIMADEMGLGKTLQCIALMWTLLRQGPQGKRLIDKCIIVCPSSLVNNWANELIKWLGPNTLTPLAVDGKKSSMGGGNTTVSQAIHAWAQAQGRNIVKPVLIISYETLRRNVDQLKNCNVGLMLADEGHRLKNGDSLTFTALDSISCPRRVILSGTPIQNDLSEYFALLSFSNPGLLGSRAEFRKNFENPILRGRDADATDKEITKGEAQLQKLSTVVSKFIIRRTNDILAKYLPCKYEHVIFVNLKPLQNELYNKLIKSREVKKVVKGVGGSQPLRAIGILKKLCNHPNLLNFEDEFDDEDDLELPDDYNMPGSKARDVQTKYSAKFSILERFLHKIKTESDDKIVLISNYTQTLDLIEKMCRYKHYSAVRLDGTMSINKRQKLVDRFNDPEGQEFIFLLSSKAGGCGINLIGANRLILMDPDWNPAADQQALARVWRDGQKKDCFIYRFISTGTIEEKIFQRQSMKMSLSSCVVDAKEDVERLFSSDNLRQLFQKNENTICETHETYHCKRCNAQGKQLKRAPAMLYGDATTWNHLNHDALEKTNDHLLKNEHHYNDISFAFQYISH

SEQ ID NO: 13837 - protein, 283 aa, Zea mays
  misc_feature (59)..(59): Xaa can be any naturally occurring amino acid
MDAQQQLDLVMRHQSMATVCESEDALGSSESDPARPARPRGKRSRAAEVHNLSEKVGAXRRRSRINEKMKALQTLIPNSSKTDKASMLDDAIEYLKHLQLQVQMLSMRNGLYLPPGNLSGAPETLAPLEMCAALNQSGAKASNSGVVVLPGNKIPVARLLLDPPNHDQRHENPLVLQSVPSSSTAVEPRFLQQPAQPNLQSFQLAVPPEMIFDEADMMLKHRLASGRETTSLPGHEAKPGRQEACMVNSDISNRGSLGKEVFMPYLHSLQSGDTEGGLRAGSN

SEQ ID NO: 13838 - protein, 472 aa, Chromobacterium violaceum ATCC 12472
MAVADVVKLIQENDVKFVDLRFTDTRGKEQHVSIPAHVLLEDADAWFERGHAFDGSSIAGWKGIQASDMLLIADPATARIDPFFDEPTVFMHCDVIDPADGKGYDRDPRSIAKRAEAYLKASGHGDTAYFGPEPEFFIFDGVTWGTDMSGCFVKIKAEEAAWASAEEFEGGNMGHRPGIKGGYFPVPPVDSSQDIRSAMVLLLEELGVPVEVHHHEVATAGQNEIGTKFSTLTQRADWTQILKYVVHNVAHSYGKTATFMPKPIVGDNGSGMHVHQSIWKDGKNLFAGEGYAGLSDTALYYIGGIIKHAKALNAITNPGTNSYKRLVPHYEAPVKLAYSAKNRSASIRIPHVASPKARRIEARFPDPLANPYLCFSALLMAGLDGIQNKIHPGDAADKNLYDLPPEEDKLIPTVCASLDEALAALDKDREFLTRGGVFSNEWIDAYIELKMQEVNLTRMTTHPVEFAMYYSL

SEQ ID NO: 13839 - protein, 392 aa, Tetrapterys discolor; identical to SEQ ID NO: 6946

SEQ ID NO: 13840 - protein, 540 aa, Amorpha fruticosa
MAFETEEPKEFIFRSKLPEIPISKHLPLHSYCFENLSEFGSRPCLISAPTGDVYTYYDVELTARRVASGLNKLGVQQGDVIMLLLPNSPEFVFSFLGASYRGAMITAANPFFTSAEIAKQAKASNTKLLITQASYYDKVKDLDVKLVFVDSPPDGHMHYSELREADESDMPEVKTNPDDVVALPYSSGTTGLPKGVMLSHKGLATSIAQQVDGENPNLYFHNEDVILCVLPLFHIYSLNSVLLCGLRAKAAILLMPKFEINALLGLIQKHRVTIAPIVPPIVLAIAKSPDLEKYDLSSIRVLKSGGASLGKELEDTVRAKFPKAKLGQGYGMTEAGPVLTMCLAFAKEPIDVKPGACGTVVRNAEMKIVDPETGNSLPRNQSGEICIRGDQIMKGYLNDQEATQRTIDKEGWLHTGDIGYIDDDDELFIVDRLKELIKYKGFQVAPAELEALLLSHPKITDAAVVPMKDEAAGEVPVAFVVRSNGHTDTTEDEIKQFISKQVVFYKRISRVFFIDAIPKSPSGKILRKDLRAKLAAGVPN

SEQ ID NO: 13841 - protein, 359 aa, Arabidopsis thaliana
MEGDVGIGLVCQNTMDGKASNGNGLEKTVPSCCLKAMACVPEDDAKCHSTVVSGWFSEPHPRSGKKGGKAVYFNNPMWPGEAHSLKVEKVLFKDKSDFQEVLVFESATYGKVLVLDGIVQLTEKDECAYQEMIAHLPLCSISSPKNVLVVGGGDGGVLREISRHSSVEVIDICEIDKMVIDVSKKFFPELAVGFDDPRVQLHIGDAAEFLRKSPEGKYDAIIVDSSDPVGPALALVEKPFFETLARALKPGGVLCNMAESMWLHTHLIEDMISICRQTFKSVHYAWSSVPTYPSGVIGFVLCSTEGPAVDFKNPINPIEKLDGAMTHKRELKFYNSDMHRAAFALPTFLRREVASLLAS

SEQ ID NO: 13842 - protein, 333 aa, Medicago truncatula
MAMQPVYLKEHEGNVHNSVGQFSSVTSAPWWSNAYGSQPVYGGDSCGQMKPFSLELSNYIDQLAPSKNLVRGVEQLFDKGHTNQFTIFPADDCKMSVDTPNHQATLSLQSPFAAEPLNRFELGFNQSMICAKYPYMDQFYGLFSTYGPQISGRIMLPLSMTSDDGPTYVNAKQYHGIIRRRHSRAKAVLQNKLIKRNKPYMHESRHLHAMRRPRGCGGRFLNTKVSANGNGKSGSEENGNIGGLQLQSSGSQSSEVLQSEVGTLNSSKETNGGSPNVSGSEVTSMYTQGVLDSFTVNHIGSTVHSLGDMIDTGHGIVMPTKWFAAAGRQLLEP

SEQ ID NO: 13843 - protein, 857 aa, Bordetella parapertussis 12822
MEVSRIRALRGPNLWSRNTAIEAIAACSDAECAINGMPDFEARLRARFPQLGVLQPEGQRDAISMAHVLQATALGLQAHAGCPVTFGRTSPTIEPGVFQVVVEYSEEDVGRLAFELAEALIRSAQDDTPFDLPQALQRLRDLDEDTRLGPSTGSIVNAAVARSIPYHRLTQGSMVQFGWGSKQRRIQAAETDMTSAISESIAQDKDLTKMLLDAAGVPVPMGSSVDSAAAAWQAAQALSGPVVVKPRDGSQGRGVAVNIETRDRIESAFEAAAEISSEVIVERYIPGHDFRLLVVGNTLVAAARRDPPQVTGDGTHTIAELVAQVNADPLRGDGHATSLTKIRFDDIAIATLRKQGYEADSVAAAGALVVLRNNANLSTGGAATDVTDEVHPELAARAVTAARMIGLDICGVDVVAETVHLPLEDQHGGVVEVNAAPGLRMHLNPSFGKGRAVGEAIISHMFAERDDGRIPVVAVAGTNGKTTTVRLTAHILDCAGHRVGMTNSDGVYVGKQRIDTGDCSGPRSARRLLLHPDVDAAVLETARGGVLREGLAFDRCNVAIVTNIGMGDHLGLGYISTVEDLAVVKRVIVQYVQPDGMAVLNAADPMVAEMASACPGSITYFAEDRNHPVMATHRAQGHRVVYRDGDSLVAAQGGAEVAFALADIPLTRGGAIAFQVENTMAALAAAWALGIDWDTIRHALAIFVNDAQTAPGRFNVFDFRGATLIADYGHNPDAIQALVRAIDTMPARRRSVVISGAGDRRDEDLRQQTEILGGAFDDVILYQDQCQRGRADGEVVALLRQGLQQAPRTRHIDEIQGEFVAIDAALQRLAPGDLCLILVDQVEEALAHIASRVAGQP

SEQ ID NO: 13844 - protein, 392 aa, Stigmaphyllon sagraeanum; identical to SEQ ID NO: 6948

SEQ ID NO: 13845 - protein, 255 aa, Silene latifolia
EAHSLKVEKILFQGKSKYQDVMVFQSSTYGKVLILDGVIQLTERDECAYQEMISHLPLCSIPNPKKVLVIGGGDGGVLREVARHSSVEHIDICEIDEMVVTVSKEFFPEVAVGYDDPRVNLHIGDGVAFLKAATEGSYDAVIVDSSDPIGPAKELFEKPFFESVAKALRPGGVVCTQAESIWLHMHIIEDIVSNCREIFKGSVNYAWTTVPTYPSGVIGFMVCSTEGPAVDFKNPVNPIDKTEDEKRPLKFYNAE

SEQ ID NO: 13846 - protein, 189 aa, Pseudomonas syringae pv. phaseolicola 1448A
MACAARRCRLTSVLTFRSSHRLVLRPLLMSENLLSIPVTTIKGEQKTLADYAGKAVLVVNTASKCGFTPQYKGLEKLWLDYKDKGLVVLGFPCNQFGKQEPGDEGAISGFCELNYGVSFPLFKKIDVNGAQAHPLFVQLKQQAPGLLGTERIKWNFTKFLIGRNGALVKRFAPLTKPEELTGEIEALLR

SEQ ID NO: 13847 - protein, 392 aa, Lophopterys floribunda; identical to SEQ ID NO: 6950

SEQ ID NO: 13848 - protein, 100 aa, Vitis vinifera
MKKNVGELGLKFFLKIFEIAPSYQKWFSFLKNSKRRTQSSSPMPWLFLIMVDRISNKVTARDSTLKKLGVVHYKSGVLDEHYQATKFALLEIIKEAVPEM

SEQ ID NO: 13849 - protein, 392 aa, Mionandra camareoides; identical to SEQ ID NO: 6953

SEQ ID NO: 13850 - protein, 392 aa, Aspicarpa brevipes; identical to SEQ ID NO: 6955

SEQ ID NO: 13851 - protein, 255 aa, Silene latifolia
EAHSLKVEKILFRGKSKYQDVMVFQSSTYGKVLILDGVIQLTERDECAYQEMISHLPLCSIPNPKKVLVIGGGDGGVLREVARHSSVEHIDICEIDEMVVTVSKEFFPEVAVGYDDPRVNLHIGDGVAFLKAATEGSYDAVIVDSSDPIGPAKELFEKPFFESVAKALRPGGVVCTQAESIWLHMHIIEDIVSNCREIFKGSVNYAWTTVPTYPSGVIGFMVCSTEGPAVDFKNPVNPIDKTEDEKRPLKFYNAE

SEQ ID NO: 13852 - protein, 645 aa, Chlamydophila pneumoniae TW-183
MKKLVRLCVVLLSLLPNVLFSSDLLREEGIKKMMDKLIEYHVDAQEVSTDILSRSLSSYIQSFDPHKSYLSNQEVAVFLQSPETKKRLLKNYKAGNFAIYRNINQLIHESILRARQWRNEWVKNPKELVLEASSYQISKQPMQWSKSLDEVKQRQRALLLSYLSLHLAGASSSRYEGKEEQLAALCLRQIENHENVYLGINDHGVAMDRDEEAYQFHIRVVKALAHSLDAHTAYFSKDEALAMRIQLEKGMCGIGVVLKEDIDGVVVREIIPGGPAAKSGDLQLGDIIYRVDGKDIEHLSFRGVLDCLRGGHGSTVVLDIHRGESDHTITLRREKILLEDRRVDVSYEPYGDGVIGKVTLHSFYEGENQVSSEQDLRRAIQGLKEKNLLGLVLDIRENTGGFLSQAIKVSGLFMTNGVVVVSRYADGTMKCYRTVSPKKFYDGPLAILVSKSSASAAEIVAQTLQDYGVALVVGDEQTYGKGTIQHQTITGDASQDDCFKVTVGKYYSPSGKSTQLQGVKSDILIPSLYAEDRLGERFLEHPLPADCCDNVLHDPLTDLDTQTRPWFQKYYLPNLQKQETLWREMLPQLTKNSEQRLSENSNFQAFLSQIKSSEKTDLSYGSNDLQLEESINILKDMILLQQCRK

SEQ ID NO: 13853 - protein, 647 aa, Saussurea medusa
MAGKGEGPAIGIDLGTTYSCVGVWQHDRVEIIANDQGNRTTPSYVAFTDSERLIGDAAKNQVAMNPTNTVFDAKRLIGRRFSDASVQSDIKLWPFKVTPGPAEKPMIAVMYKGEEKTFAAEEISSMVLIKMKEIAEAFLGSTVKNAVVTVPAYFNDSQRQATKDAGVISGLNVTRIINEPTAAAIAYGLDKKATSVGEKNVLIFDLGGGTFDVSLLTIEEGIFEVKATAGDTHLGGEDFDNRMVNHFVQEFKRKHKKDITGNPRALRRLRTSCERAKRTLSSTAQTTIEIDSLYEGVDFYSTITRARFEELNMDLFRKCMEPVEKCLRDAKMDKSSIHDVVLVGGSTRIPKVQQLLQDFFNGKELCKSINPDEAVAYGAAVQAAILSGEGNEKVQDLLLLDVTPLSLGLETAGGVMTVLIPRNTTIPTKKEQVFSTYSDNQPGVLIQVYEGERTRTRDNNLLGKFELSGIPPAPRGVPQITVCYDIDANGILNVSAEDKTTGQKNKITITNDKGRLSKEEIEKMVQEAEKYKSEDEEHKKKVEAKNALENYAYNMRNTVKDEKIGEKLTPGDKKKIEDAIDEAISWLDSNQLAEADEFEDKMKELENVCNPIIAKMYQGGAGDAAGGMDEDAAPSGGGAGPKIEEVD

SEQ ID NO: 13854 - protein, 617 aa, Robiginitalea biformata HTCC2501
MEGNEPVVIPNAEGKRTTPSVIAFVEGGEIKVGDPAKRQAVTNPNKTIYSIKRFMGNKYSESQKEAERVPYKVVKGDNNTPRVDVDGRLYTPQELSAMILQKMKKTAEDYLGQSVSRAVITVPAYFNDSQRQATKEAGEIAGLKVERIINEPTAASLAYGLDKKDQDQKIVVFDFGGGTHDVSILELGDGVFEVLATDGDTHLGGDDVDQKIIDWLADEFKQEEEMDLREDAMALQRLREAAEKAKIELSSSSQTEINLPYITATSSGPKHLVRTLSRSKFEQLIEDLVKRTIAPCESALKTAGLSKSDIDEIILVGGSTRIPAVQEAVEKFFGKKPSKGVNPDEVVAIGAAIQGGVLTGDVKDVLLLDVTPLSLGIETMGGVNTKLIEANTTIPTKKSQVFSTAADNQPSVEIHVLQGERPMAKDNKTIGRFHLDGIPPAPRGTPQIEVTFDIDANGIIKVSATDKATGKSQDIRIEASSGLTEEEIERMKSEAEANAEADKKAKEKVDKLNEADQMIFQTEKQLGEFGDKLSADKKQEIESALEELKKAYESKDTDVIQPALDKINEAWKNASEEMYKAQAEAQQPGADGAGQTTDSGDAAEGDNVEDVDFEEVK

SEQ ID NO: 13855 - protein, 445 aa, Lactobacillus johnsonii NCC 533
MSKTITAEDIKKSVKDNDVRFLRLAFTDINGTSKAVEVPTSQLDKVLTNDIRFDGSSIDGFVRLEESDMVLYPDFSTWAVLPWGDEKGGKIGRLVCSVHKTNGEPFEGDPRNNLKRVLKEMKEKGFTDFDIGFEAEFHLFKLGEDGNWTTEVPDHASYFDMTSDDAGARCRRDIVETLESIGFEVEAAHHEVGDGQQEIDFRFDDALTTADRVQTFKMVVREVARKHGLYATFMAKPVEGQAGNGMHTNMSLFKDGKNVFYDKDGEFHLSDTALYFLNGILEHARAITAIGNPTVNSYKRLIPGFEAPVYISWASKNRSPLVRIPDAEEINTRLEMRSADPTANPYLLLAACLTAGLNGIKEAKKPMAPITSNVFEMSEEERAKRGIKPLPSTLHNAVKAFKADPLIQEALGEHLTQSFIDSKNLEWSKYTQSVSDWERDRYMGY

SEQ ID NO: 13856 - protein, 223 aa, Zea mays
MLILVCDIVEPSTGELYARDPRSTAKRAEAYLKTTGIGDTVYIGPEAEFFMFDNVQFENSYSTSYYKIDDIELPTNTGTSYEGGNLGHRPRAKGGYFPVAPVDSAVDIRGEMVSTMLEMGLPCDKHHHEVAAAQHELGLTFGTMTLTADRMQIYKYVCHNVAQAYGKTVTFMPKPIKEDNGSGMHTHLSIWDKGQPLFAGNGYAGLSDTCLYFIGGIIKHAKA

SEQ ID NO: 13857 - protein, 1041 aa, Mycoplasma penetrans HF-2
MKTINIADLKDFFYSPEVVKESSDFLVSTKLSDFLIEEKNSNIIVSCYIDSYSIKVKIEEEHVIDCDCSCDIYLMSKKICAHIVHVIDLYNQYVKHDFAQYRNASDVSFSVAPVIKELSNGKKKIEVEFYFEQSYKKFFINNVEELFSHDDKYYFFPLLFFNKNQIEYNSLLLLNELKNFLNSKDVTYKQKSILIDDNDLGEWIEFCSKFNILFFYQSNSFWNSTTYYLDKYNYDFNEQCKSSINNKRKFLLKTSRDLNIFHFTSKNDLFMFVHSKGKSDLYIYKYDLSYLNDVESFTELINKQISKNDFYKLYLSIKKLFSNYERIIQYLFIIKNNVSKIDPVLEVKVYYEKLLNVLAAKISFFYGDIEYPYKENETNYFKRERFLEQNLLEPLLNFFNYYNAEFSVFEIVDHQKYLDFLNWNRKVIKNDLYKIKISENLIFKPKVKKEFHVSASSFENDFLKIEWSIEGFSEEDVLKVLAAYKQKLKYVTLSDNKVINLDLDINFEKFDEDLKLLNTSIDFIDDRSILVNRLNSNYFLENFTLDNSDGLKEYVKKLYDTEIDVKNELPVNLKNILKKYQVAGYLWLKKLLHLNAGGILADEMGLGKTMQTISLLSDVYYNNKTKLPSLIVCPSSLVYNWKKELSQFAPFLKIGIIDGTQLERNEVLNNIHNYQIIVTSYHLLNKDIEVYRNMEFYLQVLDEAQKIKNHYTQFSKDTKSVNSKYKIALTGTPIENNLLELWSIFDYIMPGFLYDYKLFKSLFQDKIIAKDEEALKKLKTKISPFILRRTKEEVLKELPSKTYKIMTCEFEDKQKEMYYAELSKSQIAIRKGIEDKTINKQGAFIFSVLTKLRQICCSPKLSYENSDINGSKFNLCIDLIKDLIKNNDKILLFSQFTSMIDLIAQELKKLKINFLVLTGETNKKERMELVNEFNNKNNIKIFLISLKAGGTGLTLTSANAVIHYDPWWNLSLENQATDRAHRIGQEKNVFIYKLIVKDSIEEKILSLQESKREIINQIFDENSSNKNSININEILKVLDIE

SEQ ID NO: 13858 - protein, 545 aa, Thellungiella halophila
MAMLASYFDSFISKMPSLSTSDHASVVSLNLFVALLCACIVLGHLLEENRWMNESITALLIGLATGVVILLISKGKSSHLLVFSEDLFFIYLLPPIIFNAGFQVKKKQFFRNFVTIMLFGAIGTVISCTVITLGVTQFFKKLDIGTFDLGDYLAIGAIFAATDSVCTLQVLNQDETPLLYSLVFGEGVVNDATSVVVFNAIQSFDLTHLNHEAAFHLLGNFLYLFLLSTLLGVATGLISAYVIKKLYFGRHSTDREVALMMLMAYLSYMLAELFDLSGILTVFFCGIVMSHYTWHNVTESSRITTKHTFATLSFLAETFIFLYVGMDALDIDKWRSVSDSPGTSVAVSSILIGLLMLGRAAFVFPLSFLSNLAKKNESEKINFKMQVVIWWAGLMRGAVSMALAYNKFTRAGHTDLRGNAIMITSTITVCLFSTVVFGMLTKPLIRHLLPHQKATTSMLSDDNNTPKSIQIPLLDQDSFIEFAGNHNVPRPDSIRGFLTRPTRTVHYYWRQFDDSFMRPVFGGRGFVPFVPGSPTERDPPDLSKA

SEQ ID NO: 13859 - protein, 374 aa, Bacillus halodurans C-125
MKAIHFGAGNIGRGFIGALLSKANYEVVFVDVNAQVIDRLNEQRSYTVLTADEDNEENVIHNVRGLNSRTQMEQVLAEIATADLVTTAVGPSVLPHLAHPIGQGLLQRNGAPIQVIACENAIGASSMLQEYTKASLSEEEWSKVDRVTGFPNATVDRIVPAQDHADPLTVSVEPFYEWVIETKSMKGEPPTIDGVTYVEDLTPYIERKLFTVNTGHAMVAYLGFQKGLMTIKEAISDQTIAEKTRQALAETKGLLVHKYNFSPEAHDEYIEKIFKRYNNPYLSDRVERVGRNPIRKLGYNERLVKPARQLLDLGHQPTALLAGIQAAFAFFVEDDQESMELQEKRQVQGLEQTVVEVTGLPAVHPLVQMIVGNN

SEQ ID NO: 13860 - protein, 582 aa, Bacteroides thetaiotaomicron VPI-5482
MSTRNSSRFTPIIIAISVVAGILIGTFYAKHFAGNRLGIINGSSNKLNALLRIVDDQYVDTVNMTDLVEKAMPQILAELDPHSTYIPAQNLEEVNSELEGSFSGIGIQFTIQNDTIHVNAVIQGGPSEKVGLMAGDRIVNVDDSLFVGKKLNNELAMRTLKGPKGSQVKLGVKRVGEPKLLDFTITRGDIPQNTVDAAYMLNDDIGYVKVSKFGRTSHVELLNALAQLNHKKCKGLIIDLRGNTGGYMEAAIRMVNEFLPEGKLIVYTQGRKYPRAEEFANGTGSCQKMPLVVLIDEGSASASEIFTGAIQDNDRGTVVGRRSFGKGLVQQPIDFSDGSAIRLTIARYYTPSGRCIQRPYESGKDKNYELDIYNRYEHGEFFSRDSIKLNENERYLTSLGRTVYGGGGIMPDVFVPQDTTGVTSYLSSVINRGLTLQFTFQYTDNNRKKLSQYETEEDLLNYLRHQGLVEQFIRFADSKGVKRRNILIQKSYKRLEANIYGNIIYNMLGLEAYLKYFNKSDATVQQGIELLEKGEAFPKAPAETEEEVTKDNKDGKKKRTAQAYGITEDPTRIFDFAEATIS

SEQ ID NO: 13861 - protein, 232 aa, Oryza sativa Japonica Group
MASTTTTTAAAAARFTCLAPATRPASASASAGRFLLPARQWGAATTHGSAAVPVVAAPSRRWAPGVAYATAATGKSVHDFTVKDIDGKDVALSKFKGRALLIVNVASQCGLTTANYTELSHLYEKYKTQGFEILAFPCNQFGAQEPGSNPQIKQFACTRFKAEFPIFDKVDVNGPNTAPIYKFLKSSAGGFLGDLVKWNFEKFLVDKTGKVVERYPPTTSPFQIEVLMVRQP

SEQ ID NO: 13862 - protein, 690 aa, Gibberella zeae PH-1
MWRPNLNFVKLHYIYIIVMGLSSFLFIYPNGKLSAIDAYFLGVSASTVTGLTTTNQSSIDVPVLRTYQQLYLYFIPLVCNTVVINIIVVVARLIWFRKYLKKAAPALLSRRRAADPDPKEDPEIGAEIPVSEQPGHRPSIARAVTDRVPRNTAEKDVLPQIEARSQTLPAPDQNSQRSVEDGTPPVKDDKVTEHGTKITFDPSTDHHPRHEHQDATLYIPGPRARDQDDTIEPISRTYSNSIRTLRHRRSGLNLSQVRSVERVATVASSLFVIGNTAQGPKERPLARAPTLAVGDFPNLSREVTIGRNSIFHNLTSEDREELGGIEYKSLKLLLKIIVGYYAFLQFLGAVCLIGWVNHAPSKYVDYIAKCGQNRFWCLSHLLFRAIFSAQTMVANLGFTLTPDSMISFNDAPAPLLIMSALALAGHTFYPILLRFIIWSASRVIPKQSSLQEPLHFLLNHPRRCYTLLFPSGPTWALLAILTLLNVADVLFIILLDLDNPTVTVLPGWQRFCAAVFQAVSSRHTGTATFNLANVNPAVQLALLVMMYVSVYPISIVVRSSNTYEERSLGIYEDEQQPDEEDGGSYFVTHLRNQLSFDLWYICLGLFCITIAEHKKIMNGNDIAFTMWPILFEGVSAYKLVICAMMIRGRHRGLPYALDRAIVLPTEKSMGDETTSTRTRSRSHESHEHHE

SEQ ID NO: 13863 - protein, 150 aa, Microcystis aeruginosa NIES-98
SIKEPRTGEWYSRDPRSIAQKAINYLSTTGLGDTVYFGPEAEFFLFDSARFDQTANSGYYYMDSVEGRWNSGKDEKDGNLAYKPAYKQGYFPVSPTDTSQDIRTEMLLTMADCGVPIEKHHHEVATGGQNELGIKFSTLVRAADYLMTYK

SEQ ID NO: 13864 - protein, 429 aa, Kluyveromyces lactis NRRL Y-1140
MELEENDETPITGTALNDPISQIQTKDLSKESTYIKLTDTNYLAFFLIGIALLWPWNSFLSASLYFQHDVFQDTSVYARIYISTMMTVSTISSVLSNIILSKIQHHYTERIVSGLFFEIIVFTSLCGVVLFHRWLSHLLSFIMIMFLVLVSSVATALSQTGVMAMANVFGPEYNHAVMVGQAVAGVLPSLVLFMVSIFNQKQEQTATGINLYFLSTSVMSFASIVAYKKSDIPIIGGDMAQRTADEPKVYVPFKVLFLKLRYLVLSIFTIFCVTLIFPVFASNTYVVRFPLRNSEFIPFIFMLWNIGDLVGRIIAEHTFNSKMLTPRKIFIYSQLRILMVAVFFLFNVRNIRKNSHLGVFLDLSYSFWQFMFGLTNGLLASCSFMNVGRSLDTEDERKAAGGITNVFLSIGLASGSVISYLFAYIISQM

SEQ ID NO: 13865 - protein, 277 aa, Vitis vinifera
MSCQSQLPPQYPRQSSSTSSSAMDGSYGVVNSNNMEAKQGSSLVRQSSSPAGLFSHLSGQNGYAIMRGVGNFRPGNVGNGEISPSTSRLKPQVSFSSGLPSSLGLLPQISEIGSDPGFPYGSWNDSAHFENFSGMKRDQDNDGKLYSGSNTSGIRVSFCIVDVFWTSTILHTSAEMAAMEKFLQFQDSVPCKIRAKRGCATHPRSIAERVRRTRISERMRKLQELVPNMDKQTNTADMLDLAVEYIKDLQKQYNTLTDNRAHCKCLGKQKPVPNQTV

SEQ ID NO: 13866 - protein, 690 aa, Bifidobacterium longum NCC2705
MAVFELILCIIAAVVVSSFVSRFVPKVSTPLVQIVLGVLVTYLPFFPDATLDPELFMVLFIAPLLYLEAHEIDKSALLKTLDLSLSLAIGLAIVTMAAVGFTLHAVWPSITLASALALGAALGPTDAVAVSSLGKEASLTQRQRSVLKGESLFNDASGIVGFQFALAAAFTGEFAVGQAAGEFVISFFGGTLFGLVIAAAANWLFETVRSLGWETTTTRILMELFLPFLLYLGAEEFNVSGILSVVAAGLFIRFDRTGVGPNVARTNIVSTSVWGVLSFSLNGAVFILLGMQLPRAMMASWSDPYISNIALIGIILLVTLVVIALRFFWIAAMLRVARDTISGQRRKMTPERWRSAAVMTFGGPKGTITLSLMFTIPYYIAGGAPFPMRDELIFIASGVIIVTLLLANFLLPLLAPNRGKDPSAEMIPVTIDVLRATVEELTGRITPENRRAILMVIDQYTKRIGRLQQRIGDTDPQGFEQLQIEALHWEKEFVRDRLADTKAHPAADTATQELNVEACERMLDQIMNTLRHTSTDPTSGHAVSQIRGRLRMFQRQMSNYAKRTVSKIRHTTPLVSEDQIFARTRELQVEAIHHVIGRLIDEMGQDTYNTEHCSALLLDYRRAEASLQARPTMSGTTETITQVEDVKRESYGIELGMIQDMYEAGDINRAQARSLRRNIYVMQVDADSGI

SEQ ID NO: 13867 - protein, 472 aa, Gloeobacter violaceus PCC 7421
MAKTPDDVLKMIQDEDVKIVDLKFIDLPGTWQHCSFATNQIDADAFAEGIPFDGSSIRGWKAINESDMLMVPDPSTAFIDPFFKETTLSLTCSIREPRTGEPYGRDPRTIAAKALEYLKGTGIADTAYFGPEAEFFIFDDVRFDQTQNAGYYYLDSVEGNWNTGRNEGPNLGYKPRNKEGYFPVAPTDSMQDIRTEMLLTMGSLGVPIEKHHHEVASGGQAELGVRFLSMVEAADALQIYKYVIKNVARKHGKVATFMPKPIFNDNGTGMHTHQSLWKDGQPLFAGDKYADLSEMALYYIGGLLKHAPAILAFSNPTTNSYKRLVPGFEAPVNLAYSQGNRSASIRIPLSGKSPKAKRLEFRCPDASSNAYIAFAAMLMAGLDGIKNKIDPGEPLDVDIYELSAEELAKVPSTPGSLSEALKALEEDHAFLTEGGVFSEELINVWIEYKLEKEVIPMSLRPHPYEFSLYFDV

SEQ ID NO: 13868 - protein, 1410 aa, Candida albicans SC5314
MVKQYIPEEAELNPELYGLRRSHRERRGPAIVESDSEEDVAPSRKKKKVQDDYEDGISMDEDENDEFGDDDDDDDDIYYDGSFGAGKKMKSKPKTSKKQKGKNTKARKTKQSPSPPQELRFSSRNNKQVNYAIDYDEDDADLLESEPEFDEEDEEGDYYYYQQAIEPENERGIDIVMDHKLNEENAEKTGDPKIDYLFKIKWTDASHLHNTWEKYQDLKSFKGFRKLDNYIKQFIIYDDEIRNDPLTTKEDLEAMDIERERKRDEQDEYTHVERIVDSERVETDDGETKLQYFVKWKRLYYDECSWEDAEEIAKIAPEQVTKYQQRLNSKILPSLSANYPLSQRPRFEKLFKQPVFIKNGELRDFQLTGLNWMAFLWSRNENGILADEMGLGKTVQTVAFLSWLIYARRQNGPHLVVVPLSTVPAWQETFEKWAPDVNCVYYLGNGEARKTIREYELYNQNRKPKFNVLLTTYEYILKDKNELGAFKWQFLAVDEAHRLKNAESSLYEALKGFKVSNRLLITGTPLQNNVKELAALCNFLMPGKFTIDQEIDFETIDSEQEQYIKDLQKKISPFILRRLKKDVEKSLPSKSERILRVELSDIQTEYYKNIITKNYAALNAGNRGSQISLLNIMSELKKASNHPYLFDGAEDKVLDKAGSPSRENTLKGIVMSSGKMVLLEQLLSRLRKEGHRVLIFSQMVRMLDILGDYMFIKGYQFQRLDGTVPSSKRKIAIDHFNAPGSKDFAFLLSTRAGGLGINLMTADTVIIFDSDWNPQADLQAMARAHRIGQKNHVSVYRFVSKDTVEEQILERARKKMVLEYAIISLGITDPSAKNGSKTEPSTNELSQILKFGAGTMFKENNNQQKLENLNLDDVLSHAEDHVTTPELGESNLGSEEFLKQFEVTDYKADVEWDDIIPQEELTKLKDEEKRKADEQYLQDQIAMYSRRKAAVRKFENGSSVPSDVEDSGEDSRPLRRRNAGDHQLSEKEIRGIYRSILKWGDLSGKWEQLVEEGSITNKNPVLVKHAYNEIISTSKQLVKEEEARRAVVLAELERKAEEQKRRPPVPGEPNQTALWIAKKKEKKAVLFEYQGVKNINAEIVLNRPVDMKLLEKIVTKTDSTNFVLPRHPKSVQAWSCEWTAKDDAMLLVGVYKFGYGSWVQIRDDPLLGLQNKLFLENPAAGKDATANQDGKESVKKVPGSVHLGRRVDYLFTLLRDEESDSSVGGSTPVGSVRKRIRKSTPVPHNSGSSNGSHNTLSGNSNGGTANNTGKHRKPVKLESSEKLAKQKRMNQQRSSASASPALGHAKFKEEKRDLEYESMDEGSCKSIMQPVTSSLHKLHKGSKGLDKHEWAKILKSELLNIGDFIESEVSKVQNKDKLRKHLWSFTGLYWPSKVPSNKIGAMYNRLKQSN

SEQ ID NO: 13869 - protein, 392 aa, Diplopterys cabrerana; identical to SEQ ID NO: 6972

SEQ ID NO: 13870 - protein, 255 aa, Silene latifolia
EAHSLKVEKILFRGKSKYQDVMVFQSSTYGKVLILDGVIQLTERDECAYQEMISHLPLCSIPNPKKVLVIGGGDGGVLREVARHSSVEHIDICEIDEMVVTVSKEFFPEVAVGYDDPRVNLHIGDGVAFLKAATEGSYDAVIVDSSDPIGPAKELFEKPFFESVAKALRPGGVVCTQAESIWLHMHIIEDIVSNCREIFKGSVNYAWTTVPTYPSGVIGFMVCSTEGPAVDFKNPVNPIDKMEDEKRPLKFYNAE

SEQ ID NO: 13871 - protein, 165 aa, Zea mays
MALAEADDGAVVFGEEQEALVLKSWAVMKKDAANLGLRFFLKVFEIAPSAKQMFSFLRDSDVPLEKNPKLKTHAMSVFVMTCEAAAQLRKAGKVTVRETTLKRLGATHLRYGVADGHFEVTGFALLETIKEALPADMWSLEMKKAWAEAYSQLVAAIKREMKPDA

SEQ ID NO: 13872 - protein, 340 aa, Capsicum annuum
MSTFSSYQLQQHNTPSLLDSVFLPSSPLKMSGFFEEPNNSCVVQNCFSQFYQPEFPTNNVNVNENSYCLDQNTNVTNKSSSSISLDMDSSSVTDKMESGNNKPNVTSPMDKKRKSREGSSSMTSANSKNVTQGDNGKKNKSNSKLVAKDEKKANEEAPTGYIHVRARRGQATDSHSLAERVRREKISERMKMLQSLVPGCDKVTGKALMLDEIINYVQSLQNQVEFLSMKLASLNPMYYDFGMDLDALMVRPDDQNLSGLETQLPNIQQASTTTSQAAEVIPNTNSGYPFLDNSASLMFQQAHFPNSIHQGIGQLLWGAEDQRQKIINQSGFSNNFCSFH

SEQ ID NO: 13873 - protein, 666 aa, Vibrio vulnificus YJ016
MKCRSKVTLIAASLWLAASAQALEAKLSEKDLPLLAPEVQHETASKRVTSRFTRSHYKHFNFNDDFSRAMFNRYIEMLDYNKNIFTQADIDSFEKWSTELDDQLKEGNNQIAFDVYNLSMKKRFERFSYALKLLDQEITFDTDDEIELDRTDAAWPKDQTELNELWRQRVKYDALNLKLTGKDWPEIKEILEKRYNNAMKRITQTRNEDVFQLYMNAFAREVDPHTSYLSPRNAEQFQSEMNLSLEGIGAVLQMTDDYTVIRSLVAGGPASKSKQLGEGDRIIGVGQDKKDIVDVIGWRLDDVVQLIKGPKGTKVHLQVLPEGKDSKSYVVTIVRDKIRLEDRAVKAEVIEKDGKKIGVLEVPSFYVGLSADTDKLLTDLKGKGIDGIIVDLRNNGGGALTEATALTGLFIEKGPVVQVRDSYGRVKVNADTDGQISYSGPMTVLVNRYSASASEIFAAALQDYGRAIILGENSFGKGTVQQHRSLNHIYDLFDKEIGYVQYTIQKFYRIDGGSTQNKGVVPDIPFPTAIDPEETGESVEDNALPWDSIEKADYQVLQRNDSLIEQLRVKHDERIANELEFKFIAEDIAKYKAEKDDNTLSLNEKVRKQESEQADKQRLDRINQRQALAGKEAFKTLDDVPKDYETPDAYLDESVAIMVDMLKKPS

SEQ ID NO: 13874 - protein, 230 aa, Arabidopsis thaliana
MAFSYASFSTPFNGFAANPSPITSAFLGPSLRFSTRTSKTRNPSNGVSVKSSNSHRFLVKSKNFSVYARAAAEKSVHDFTVKDIDGNDVSLDKFKGKPLLIVNVASRCGLTSSNYSELSQLYEKYKNQGFEILAFPCNQFGGQEPGSNPEIKQFACTRFKAEFPIFDKVDVNGPSTAPIYKFLKSNAGGFLGDIIKWNFEKFLVDKKGKVVERYPPTTSPFQIEVPNSKL

SEQ ID NO: 13875 - protein, 494 aa, Bacillus anthracis str. A2012
MPFATPPVCFGKGNSALKRRVAIIGMVVAFLIGAGGMFAGMSLFGVNPAEVTQTISSGNASTAQGNLAKINEAYALIDSRYVEDVKDEKLVEGAIQGMLSTLKDPYSTYMDKETAKQFSESLDPELEGIGAEVNKTDGKLIIVSPIKGSPAEKIGIKPNDQILSVDGNSVKDLSREEAVLKIRGKKGTTVAIEIKRAGVADPIVFKIKREKIPIFTVFSSVKQESGKDIGYMQITSFAENTAKEFKDQLKELEKKNIKGLVIDVRGNPGGYLNSVEEILGEIMTDKKPMLQVEQRNGEKKKFSTELKERKPYPISVLIDNGSASASEILAGALKEGEGYDLIGEKTFGKGTVQQAVPFKDGSNIKLTMFKWLTPDGNWIHKKGIKPTVEVKQPDYYHATPIQIEKTLSYNANDVQVKHAQEMLKSLGYVPGREDGYFSKETESALKAFQNANKMEATGQLDKKTAEAIQTKIIEKIRSGENDLQLQSALKLMAK

SEQ ID NO: 13876 - protein, 1905 aa, Coccidioides immitis RS
MGSRLDRLVILLETGSTPVIRNTAAQQLADVQKQHPEELFNLLGRILPYLRSRSWDTRTAAAKAIGGIVGYAPKFDPNADDSSPSKEEEAENAKVKTESEAADELLSLETLDIVSILKHGQKLLGSAGKEYEISLAGLDPAARLQKQKRTLTARLGLAGEYIEESLINDHDINDGTVPKGSSGTGCVPKLDTSVSTLARQHSITNIPPQSATSPNDPQTPMNGEEHGLSKRQLNQLKRKNKQSARMGGSKVRVVDLSVRKGSDIVATPSVTTPHPIKKESGEENEDEKVDYFSLKREGPDDDSKLVTEFKGAVVPERSFIQTDAEEQNLEWPYERMCEILMVDLFDHAWEIRHGAAMGLREVIRVQGAGAGRLWGKTRAENDELNHCWLNNLACRLLCVFMLDRFGDYISDNVVAPIRETVGQTLGALLSHLPSKSVVLVYHILYRIIMQKDLDTIKPVWEVCHGGMIGLKYLVAVRNDILFEDSAVLDGVIEAVMKGLGDFDDDVRAVSAATLIPIADDFVKLRPGALDSLIDIVWNCLSNLQDDLSASTGSVMDLLARLCIFPQVLEAMKVNAAHDPESSFGNLVPRLFPFLRHTISSVRSAVLRALLTFLKLENEGQDSWVDGKALRLVFQNLLVERHESVLKLSLQVWSEMLRVLGSQGIFSTDQLVTPVQPLISATMNPFGVPRYPIPMDLSLFIRPSGSAFTSAPSIPRKPSVHTPTEPAPRGRRRKTEKKEAPVVMVHNVDGHMLQGDIDLVGTDTMVRSKIYAAIALGEFLATWDSANEFNLWDRVLPALNWPGSTSQLVAAMVVEEYTKRQGPASRHASLLSQWLNPLIENERPSWYGDISCYLHIARAQCHSLLNAFRDHAHVSQSRLPTLAVVVQGDPEAGPNAFSIHDAENVVGSDFERLKRDLTPTQRITALQVLNDSRASAQAAVKEAKEVKEQRDMRIRAAIAGSLVALKDIPKKPSHIIKAMMDSVKKEENIELQQRSASAIASLVEYYTTAAKRGPVDKVIANLVKFCCVDTSETPEFHHNAHLEKAILSLRKEEDKKDPVDAAKFERESREARIMRRGAKESLEQLATRFGAQLLEKVPNLAILIQNALKQALSGDLPKNIRDPFNELGQETVDGLSILRALSPKFHPGLYPWVTELMPVIVKALQCELSVIRYAAAKCFATLCSVMPVEGMTMLVEKVLPSISNALDVNCRQGAIECIYHLIHVMEDKILPYVIFLIVPVLGRMSDSDNDVRLLATTAFATLVKLVPLEAGIPDPPGLSEELLQGRDRERKFMAQMLDVRKVEPFEIPVGIKAELRSYQQEGVNWLAFLNRYNLHGILCDDMGLGKTLQTLCIVASDHHLRAEEFSRTQAPEVRRLPSLIICPPSVSGHWQQEIQQYAPFLTCVSYMGPPAERARHRPRLTEVDIVITSYDICRNDNDIFAPMAWNYCVLDEGHLIKNPRAKITLAVKRIQSNHRLILSGTPIQNNVLELWSLFDFLMPGFLGTEKVFLDRFAKPIAASRFSKSSSKEQEAGALAIEALHKQVLPFLLRRLKEEVLNDLPPKILQNYYCDPSELQRKLFEDFTKKEQKELAKKLGSTEKEAKEHIFQALQYMRRLCNSPALVVKEGHRQYQEVQRYLANKNSNIRDISHAPKLTALRDLLIDCGIGVDLSVEGELNTAASYVSPHRALIFCQMKEMLDIVQNDVLKKLLPSIQYLRLDGSVEATKRQNIVNQFNTDPSYDVLLLTTSVGGLGLNLTGADTVIFVEHDWNPQKDIQAMDRAHRIGQKKVVNVYRLITRGTLEEKILNLQRFKIDVASTVVNQQNAGLSTMDTDQLLDLFNLGETAETAEKPSQDAGLNGNEVDMVDIDGEVKEKGKKGWLDDLGELWDNRQYEEEYNLDSFLASMKG

SEQ ID NO: 13877 - protein, 389 aa, Glycine max
  misc_feature (100)..(100): Xaa can be any naturally occurring amino acid
  misc_feature (289)..(289): Xaa can be any naturally occurring amino acid
  misc_feature (304)..(304): Xaa can be any naturally occurring amino acid
  misc_feature (310)..(310): Xaa can be any naturally occurring amino acid
APPPPLAHRRKKGVGSRNRDSWKEYSIGLVPRISSISYPHCGYFPSSGGFIAKRRKRNSLLRLNDCSDNIRQHASILFVRLVSGVMLVMSVSLASTEPSXNLLFLEAWRTIDRAYIDKSFNGQSWFRYREDALRNEPMNNREETYKVIRKMLATLDDPFTRFLEPEKFRSLRSGTEGALTGVGLSIGYPTKAEMQPGGLVVISASPGGPAYRVGVLSGDVILAIDCTSTENMGLYDAAERLQREKVSLDPVKSRLCKLPASGNDSPTVGYIKLTSFNQKASSNFREPTXEKSKLLLFQLKPTKXIYVVFXYELYTCWKIQSVFELSDGSGIVVTVARYETAAHTDIDKVGVIPDHPLPTPFPKDEDAFCNCLQDPASSCYVNRIKLFSK

SEQ ID NO: 13878 - protein, 468 aa, Neisseria meningitidis
MSIKNVVKLIEESEARFVDLRFTDTKGKQHHFTVPARIVLEDPEEWFENGQAFDGSSIGGWKGIQASDMQLRPDASTAFVDPFYDDVTVVITCDVIDPADGQGYDRDPRSIARRAEAYLKSSGIGDTAYFGPEPEFFVFDGVEFETDMHKTRYEITSESGAWASGLHMDGQNTGHRPAVKGGYAPVAPIDCGQDLRSAMVNILEELGIEVEVHHSEVGTGSQMEIGTRFATLVKRADQTQDMKYVIQNVAHNFGKTATFMPKPIMGDNGSGMHVHQSIWKDGQNLFAGDGYAGLSDTALYYIGGIIKHAKALNAITNPSTNSYKRLVPHFEAPTKLAYSAKNRSASIRIPSVNSSKARRIEARFPDPTANPYLAFAALLMAGLDGIQNKIHPGDPADKNLYDLPPEEDALVPTVCASLEEALAALKADHEFLLRGGVFSKDWIDSYIAFKEEDVRRIRMAPHPLEFEM

SEQ ID NO: 13879 - protein, 163 aa, Arabidopsis thaliana
MDPMDIVGKSKEDASLPKATMTKIIKEMLPADVRVARDAQDLLIECCVEFINLISSESNEVCNKEDKRTIAPEHVLKALQVLGFGEYVEEVYAAYEQHKYETMQDSQRSVKMNSGAEMTEEEAAAEQQRMFAEARARMNGGVTVPQPEQLEEPQQQQQTSLQS

SEQ ID NO: 13880 - protein, 468 aa, Neisseria meningitidis
MSIKDAVKLIEESEARFVDLRFTDTKGKQHHFTVPARIVLEDPEEWFENGQAFDGSSIGGWKGIQASDMQLRPDASTAFVDPFYDDATVVLTCDVIDPADGQGYDRDPRSIARRAEAYLKSSGIGDTAYFGPEPEFFVFDGVEFETDMHKTRYEITSESGAWASGLHMDGQNTGHRPAVKGGYAPVAPIDCGQDLRSAMVNILEGLGIEVEVHHSEVGTGSQMEIGTKFSTLVKRADQTQDMKYVIQNVAHNFGKTATFMPKPIMGDNGSGMHVHQSIWKDGQNLFAGDGYAGLSDTALYYIGGIIKHAKALNAITNPSTNSYKRLVPHFEAPTKLAYSAKNRSASIRIPSVNSSKARRIEARFPDPTANPYLAFAALLMAGLDGIQNKIHPGDPADKNLYDLPPEEDALVPTVCASLEEALAALKADHEFLLRGGVFSKDWIDSYIAFKEEDVRRIRMAPHPLEFEM

SEQ ID NO: 13881 - protein, 664 aa, Vibrio campbellii AND4
MNCRSKVTLIAASFWLVASAQALEAKLNKDDLPVLAPEVQHETASKRVTSRFTRSHYKHFNLNDDFSKAIFERYVEMLDYNRNIFTQSDIDSFKDWSISLDDQLKAGNNQIAFDVYNLSIKKRFDRFAYALTLLDKEIKFDTDEFIELDRSEAAWPKDKAELNELWRKRVKYDALNLKMTGKKWPEIKEVLEKRYNNAMKRITQTRNEDAFQLYMNAFSREVDPHTSYLSPRNAEQFQSEMNLSLEGIGAVLQMTDDYTVIRSLVAGGPASKSKQLGEGDRIIGVGQDGEEVVDVIGWRLDDVVQLIKGPKGSKVNLQVLPEGKDTKSYVVTIVRDKVRLEDRAVKSEIIETDGKKIGVLEVPSFYVGLSKDTDKLLTELKSKNVDGVIVDLRNNGGGALTEATALTGLFIKEGPVVQVRDSYGRIKVNADTDGKISYDGPLTVLINRYSASASEIFAAAMQDYNRAIILGENSFGKGTVQQHRSLNHIYDLFDKELGYVQYTIQKFYRIDGGSTQNRGVAPDIAYPTPVEPSETGESVEGNALPWDSIDKAKYQTLPSNAALVTKLTKLHTKRIADEMEFRFINEDIEKYRKEKDDNLLSLNEKVREDESDKADALRLERINKRQSHLDKKAFKKLDDVPKDYEAPDVYLDESVAIMVDMLKK

SEQ ID NO: 13882 - protein, 468 aa, Neisseria meningitidis
MSIKNAVKLIEESEARFVDLRFTDTKGKQHHFTVPARIVLEDPEEWFENGQAFDGSSIGGWKGIQASDMQLRPDASTAFVDPFYDDVTVVITCDVIDPADGQGYDRDPRSIARRAEAYLKSSGIGDTAYFGPEPEFFVFDGVEFETDMHKTRYEITSESGAWASGLHMDGQNTGHRPAVKGGYAPVAPIDAGQDLRSAMVNILEELGIEVEVHHSEVGTGSQMEIGTRFATLVKRADQTQDMKYVIQNVAHNFGKTATFMPKPIMGDNGSGMHVHQSIWKDGQNLFAGDGYAGLSDTALYYIGGIIKHAKALNAITNPSTNSYKRLVPHFEAPTKLAYSAKNRSASIRIPSVNSSKARRIEARFPDPTANPYLAFAALLMAGLDGIQNKIHPGDPADKNLYDLPPEEDALVPTVCASLEEALAALKADHEFLLRGGVFSKDWIDSYIAFKEEDVRRIRMAPHPLEFEM

SEQ ID NO: 13883 - protein, 638 aa, Pseudomonas syringae pv. tomato str. DC3000
MGRIIGIDLGTTNSCVSILENGNVKVIDNAEGTRTTPSIIAYANDGEILVGQSAKRQAVTNPHNTLYAVKRLIGRKFDEQVVQKDIQMVPYKIVKADNGDAWVEVNGQKMAPPQISAEILKKMKKTAEDYLGEAVTEAVITVPAYFNDSQRQATKDAGRIAGLDVKRIINEPTAAALAYGMDKAKGDHTVIVYDLGGGTFDVSVIEIAEVDGEHQFEVLATNGDTFLGGEDFDIRLIDYFVDEFKKESGMSLKGDPLAMQRLKEAAEKAKIELSSSTQTEVNLPYITADATGPKHLVVKISRSKLESLVEDLVQRTIEPCRIALKDAGIDIGKINDVILVGGQTRMPLVQKLVTEFFGKEARKDVNPDEAVAMGAAIQGAVLAGDVKDVLLLDVSPLTLGIETMGGVMTALIEKNTTIPTKKSQVFSTADDNQNAVTIHVLQGERKQAGQNKSLGKFDLAEIPPAPRGVPQIEVTFDIDANGILHVGAKDKATGKQQSIVIKANSGLSEEEIQQMVRDAEVNSEEDRKFEELASARNQGDALVHSTRKMIADAGDKVTAEEKTAVEAALVALEAAIKGDDKAVIEAKVEELSKVSAPIAQKMYAEQAENPEAAAKPAEETAKADDVVDAEFEEVKDHK

SEQ ID NO: 13884 - protein, 884 aa, Debaryomyces hansenii
MYKSGLRAAFKPPRRIDSSQSSLDAKSSSPAPINQCVDAKVSQDKEASPYRAASSESSRQAYKRPKIGSNVMKAEDSPSVLAPGPKDEESVRMYMVQWRKFTNKKNKTWDGDGLIVVSSSGITFKCDVKGNGNYKQMGKTSKTKTEGIIALGSYELEIDYEIADKTTLNNSQDVGQENKVPSHHIPAPPRNQFKKVVPLGISNAQSTARVSTSNRNPLYDPDAEHSLIMTRPPNKTREETIDVVVDPVLSRLLRPHQREAVSFVYECLMGFKNFKGNGALLADEMGLGKTLTTITLIWTLLKQTPYSEDISPICKKVLITCPVTLIGNWKKEFKKWLNINRIGVLTVNNKQNASKDKQEIKSFGKTRIYQVLIMSYEKVLSCQNELSTIDFDMLVCDEGHRLKNSSNKVLKVLNDMNISKKVLLTGTPIQNDLVEFYNIINFINPSVLGSFQSFQKDFIKPILRSREVNCINKDTIKRGEIKSNELIELTKEFTLRRTSSILSGYLTEKTDIILFCPPTELQIALFKFVLDSKKFNALLREDNNSLTLITLFKKICNSPSLLFQDKLFNSLIENEHDSTIDLTTLSKKTASSKVNILIPLLIEINQIGDKTVLISNYTQTLDLLETILHKLNISFSRLDGSTPNKLRDKLVNDFNKQPVSTNSVFLLSAKSGGVGLNLIGASRLILFDNDWNPSIDLQAMARIHRDGQTKPVFIYRIMTTGCIDEKIFQRQMMKNNLSDKFLDNKTDSKSNLFDMNDLKDLFTVNEETLSNTHDLLQCDCSGIGEDINPLSIDIDSDDADEETNNPGGWITALDYKQEDQKPKRQQASMINALIDYKHYNPVNVSEQLDCGDMVTKNIIQKSKERSMPIPITYMLTKVTNCTSV

SEQ ID NO: 13885 - protein, 470 aa, Opitutaceae bacterium TAV2
MSVTAPAPPPPPALARRRKAAQNSGDACDEKDADVDIYKDAWMPRVRRMLNRFLTLVTGLTLGLVLSLSLAKFGASWKWWPSRDLNRATDTVAEVMRAINTYYIDEKSVAPTDLQAAALNGLFGKLDPHSQYMPPGDYQLLQEEIDGEFGGIGVQVEVQDGHVVVVAPIPGTPGDRAGILRGDRIVGIGGVKIDSPLMDNVVRGLRGKPGTTVSIDFFRPSQERELTLSIKRERIHVDSVRDVQLLPSPPSAPDAPRIGYIQITQFGDQTGREFDAALERLRKDGARALVLDLRNNPGGLLEAAVAVVEPFFKGGELIVSTRGRTGDDQQELRARKRREPPLTLPLAVLINGGSASASEIVTGALKDTRRAVVVGEKSFGKGSVQTIFNMRGGAGLRLTTARYYTPSGATIHGVGIAPDIEVKMSLEEEKAVRLAKFNPPPPGEERVEDRQLAAAVKALETSEALGQKTE

SEQ ID NO: 13886 - protein, 304 aa, Triticum aestivum
FFGVFDDDLSYSLPLTAAAVVPTTEWQIDVCRYVCPLELDTEYVIDGVKVTFLEANHCPGAALIHFRLSDGKTYLHTGDFRASKSMQLHPLLQTGRISLLYLDTTYCNPKYKFPPQEDVIDFVVRTAQRYLKKQPKTLIVVGAYSIGKENVYLAISQALEVPIYTDASRRRILHSFGWPDLSKRISSCNQSSPLHVLPLASLQHENLKKYLETLDQRFLAVLAFRPTGWTFSEAAGKELDLIKPSSRGRVTIYGVPYSEHSSFSELRDFLKFLRPQKVIPTVNVGNAANRDKMQAYFREWLKST

SEQ ID NO: 13887 - protein, 468 aa, Neisseria meningitidis
MSIKNAVKLIEESEARFVDLRFTDTKGKQHHFTVPARIVLEDPEEWFENGQAFDGSSIGGWKGIQASDMQLRPDASTAFVDPFYDDATVVLTCDVIDPADGQGYDRDPRSIARRAEAYLKSSGIGETAYFGPEPEFFVFDGIEFETDMHKTRYEITSESGAWASGLHMDGQNTGHRPTVKGGYAPVAPIDCGQDLRSAMVNILEELGIEVEVHHSEVGTGSQMEIGTRFATLVKRADQTQDMKYVIQNVAHNFGKTATFMPKPIMGDNGSGMHVHQSIWKDGQNLFAGDGYAGLSDTALYYIGGIIKHAKALNAITNPSTNSYKRLVPHFEAPTKLAYSAKNRSASIRIPSVNSSKARRIEARFPDPTANPYLAFAALLMAGLDGIQNKIHPGDPADKNLYDLPPEEDALVPTVCASLEEALAALKADHEFLLRGGVFSKDWIDSYIAFKEEDVRRIRMAPHPLEFEM

SEQ ID NO: 13888 - protein, 580 aa, Solanum lycopersicum
MKYLFSKNGGLLEDENSGLYTRDGSVDIKGNPVLKSETGNWRACPFILGNECCERLAYYGIAANLVTYLTKKLHEGNVSAARNVTTWQGTCYITPLIGAVLADAYWGRYWTIATFSTIYFIGMCTLTLSASVPAFKPPQCVGSVCPSASPAQYAIFFFGLYLIALGTGGIKPCVSSFGADQFDDTDPKERVKKGSFFNWFYFSINIGALISSSLIVWIQENAGWGLGFGIPAVFMGIAIASFFFGTPLYRFQKPGGSPLTRMCQVLVAVFHKWNLSVPDDSTLLYETPDKSSAIEGSRKLLHTDELRCLDKAAVVSDNELTTGDYSNAWRLCTVTQVEELKILIRMFPIWATGIVFSAVYAQMSTMFVEQGMVMDTAVGSFKIPAASLSTFDTISVIVWVPVYDKILVPIARRFTGIERGFSELQRMGIGLFLSMLCMSAAAIVEIRRLQLARDLGLVDEAVSVPLSIFWQIPQYFILGAAEIFTFIGQLEFFYDQSPDAMRSLCSALSLLTTALGNYLSSFILTVVTSITTRGGKPGWIPNNLNGGHLDYFFWLLAALSFFNLVIYVFLCQMYKSKKAS

SEQ ID NO: 13889 - protein, 455 aa, Bacillus halodurans C-125
MKMTTVSVPTRESLIEEIKETIKTKNVELLHLQFVDIEGILKHVTVTAEQIDSVVDGKIMFDGSSITGFTPINQSDLYLQPDLTTFAVLPWTEEEGYSEGRFLCSVKKPDGSDFEGDPRNILKKTVERAKEKGYSISVGPELEFFLFETDEYGLPTKQTQDIGGYFEPSPKDNGEKVRLEIYRTLKAMGFTIEASHHEVAEGQHEINFKYADALGSADAATTYKWVVKTVAKQFGLHATFMPKPLGGANGSGMHTNISLFDDEKQENAFYDESDKLGLSKTAYQFIAGLIENVKDFVAVTNPLVNSYKRLVPGYEAPCYIAWSASNRSALIRIPATRGAGTRVEIRCPDPAANPYLAFAVVASAGLDGVEQELTAPASVDADIFHMSAEEIAERGIENLPTSLEEAINRFEEGEIGKKTFGEHAFGEYVALKRGEWDEFRTTVHDWEVAAYQGKF

SEQ ID NO: 13890 - protein, 468 aa, Neisseria meningitidis
MSIKNAVKLIEESEARFVDLRFTDTKGKQHHFTVPARIVLEDPEEWFENGQAFDGSSIGGWKGIQASDMQLRPDASTAFVDPFYDDVTVVITCDVIDPADGQGYDRDPRSIARRAEAYLKSSGIGDTAYFGPEPEFFVFDGVEFETDMHKTRYEITSESGAWASGLHMDGQNTGHRPAVKGGYAPVAPIDCGQDLRSAMVNILEGLGIEVEVHHSEVGTGSQMEIGTRFATLVKRADQTQDMKYVIQNVAHNFGKTATFMPKPIMGDNGSGMHVHQSIWKDGQNLFAGDGYAGLSDTALYYIGGIIKHAKALNAITNPSTNSYKRLVPHFEAPTKLAYSAKNRSASIRIPSVNSSKARRIEARFPDPTANPYLAFAALLMAGLDGIQNKIHPGDPADKNLYDLPPEEDALVPTVCASLEEALAALKADHEFLLRGGVFSKDWIDSYIAFKEEDVRRIRMAPHPLEFEM

SEQ ID NO: 13891 - protein, 348 aa, Glycine max
MRKKKQGFRRPVVIKKPKQPQEQPSVDPITGKKIPKSFVFSRGKLPAPLKQLQMDLRKLMLPYTALSLREKKRNNLRDFLNVAGPMGVTHFFILSKTATSSYLRVATTPQGPTLTFKIHEYSLAADIARSQLHPRCPKDLFKNSALIVLSGFVSGDPPLQLTTNMFQNIFPTIDVKTVKLSTCQRIVLLNYNKDTKLIDFRHYSIRLQPVGVSRRIRKLVQSHQVPDLRNLQDVSDFVTKAGYGSESEADEEAATVTLSSDIGRVNRASTKSAVKLQEVGPRMTLQLVKIEKGLCSGEVLFSEYGKAGGKGKSDDEMQGEEDSDGDEDEEDQDGDHPEDSEDKDQDLD

SEQ ID NO: 13892 - protein, 344 aa, Vitis vinifera
MADLYGTNVSSSATALALESEDISAFLHHFLHNQSSSSTTTSTIKAKHAHSFSPALLHPETASAAEVLSPQKDRRRFSRSAILSDSDCRVRSGLSTAGSSAVVESSTGINFSDHGAYCPAGMKETAGNTFSSIAAVDSEAITVSRKRRMFSMENSVDDFGCDSEKGPEASDVPSNPAPSRSSSKRSRAAEVHNLSEKRRRSRINEKMKALQNLIPNSNKTDKASMLDEAIEYLKQLQLQVQMLTMRNGLSLHPIYLPGALQPTQLPQTGAGFAEGNLLLSNSGTGTLPANQEISMQTTFDLTSQPIAIPTMTNMNNSDTSFGFEHSDQPHYGPFNLTGSSKVTF

SEQ ID NO: 13893 - protein, 517 aa, Arabidopsis thaliana
MISPVEHDPQGQVKQQQAAGVGILLQIMMLVLSFVLGHVLRRHRFHYLPEASGSLLIGLIVGILANISDTETSIRTWFNFHEEFFFLFLLPPIIFQSGFSLQPKPFFSNFGAIVTFAIIGTFVASVVTGGLVYLGGSMYLMYKLPFVECLMFGALISATDPVTVLSIFQDVGTDVNLYALVFGESVLNDAMAISLYRTMSLVNRQSSSGEHFFMVVIRFFETFAGSMSAGVGVGFTSALLFKYAGLDTENLQNLECCLFVLFPYFSYMLAEGVGLSGIVSILFTGIVMKRYTFSNLSEASQSFVSSFFHLISSLAETFTFIYMGFDIAMEQHSWSHVGFILFSILFIGVARAVNVFGCAYLVNLFRQENQKIPMKHQKALWYSGLRGAMAFALALQSLHDLPEGHGQIIFTATTTIVVVTVLLIGGSTGKMLEALEVVGDDLDDSMSEGFEESDHQYVPPPFSIGASSDEDTSSSGSRFKMKLKEFHKTTTSFTALDKNFLTPFFTTNSGDGDGDGE

SEQ ID NO: 13894 - protein, 634 aa, Vibrio fischeri ES114
MGKIIGIDLGTTNSCVAVLDGDTPRVLENAEGERTTASVIAYTDGETLVGQPAKRQAVTNPQNTLFAIKRLIGRRFEDEEVQRDIEIMPFKIVKADNGDAWVEAKGQKMAAPQVSAEVLKKMKKTAEDFLGEEVTGAVVTVPAYFNDAQRQATKDAGRIAGLDVKRIINEPTAAALAYGLDKKGGDRTIAVYDLGGGTFDISIIEIDNVDGEQTFEVLATNGDTHLGGEDFDNRLINYLVSEFEKEQGINLKNDPLAMQRVKEAAEKAKIELSSAQQTDVNLPYVTADATGPKHMNVKVTRAKLESLVEDLVLRSLEPLKVALADADLSVDEITDVILVGGQTRMPMVQAKVAEFFGKEARRDVNPDEAVAMGAAVQGGVLAGDVKDVLLLDVTPLSFGIETMGGVMTKLIEKNTTIPTKADQTFSTAEDNQSAVTIHVLQGERKQATYNKSLGQFNLEGIQPAPRGMPQIEVTFDLDADGILNVSAKDKATGKEQKITIQASGGLTDEEIEAMVQEAEANKDADKKFEELVTARNQADQMIHGTQKQIEEAGDALPADEKEKIEAAIKALEEVKSGNDKEAIDAKTQELMQAAQKLMEIAQQKAQAQQGADAGEQPKQDDDVVDAEFEEVKDK

SEQ ID NO: 13895 - protein, 1124 aa, Mougeotia scalaris; identical to SEQ ID NO: 6994

SEQ ID NO: 13896 - protein, 469 aa, Rhizobium leguminosarum bv. viciae 3841
MATASEILKQIKENDVKFVDLRFTDPKGKLQHVTMDVVCVDEDMFADGVMFDGSSIGGWKAINESDMVLMPDTETVHMDPFFAQSTMVIVCDILDPVSGEAYNRDPRGTAKKAEAYLKASGIGDTVFVGPEAEFFVFDDVKYKADPYNTGFKLDSTELPSNDDTDYETGNLGHRPRVKGGYFPVPPVDSAQDMRSEMLTVLSEMGVVVEKHHHEVAAAQHELGIKFDTLVRNADKMQIYKYVVHQVANAYGKTATFMPKPIFGDNGSGMHVHQSIWKGGKPTFAGDEYAGLSESCLFYIGGIIKHAKAINAFTNPSTNSYKRLVPGYEAPVLLAYSARNRSASCRIPFGSNPKAKRVEVRFPDPTANPYLAFAAMLMAGLDGIKNKIHPGKAMDKDLYDLPPKELKKIPTVCGSLREALESLDKDRKFLTAGGVFDDDQIDAFIELKMAEVMRFEMTPHPVEYDMYYSA

SEQ ID NO: 13897 - protein, 672 aa, Hypocrea jecorina
MGPAVGIDLGTTYSCVGIFREDRCDIIANDQGNRTTPSFVAFTDTERLIGDAAKNQVAMNPQNTVFDAKRLIGRKFADPEVQADMKHFPFKVIDKNSKPVIEVEFKGEKKTFTPEEISSMVLTKMREAAEAYLGTTVNNAVITVPAYFNDSQRQATKDAGLIAGLNVLRIINEPTAAAIAYGLDKKVEGERNVLIFDLGGGTFDVSLLTIEEGIFEVKSTAGDTHLGGEDFDNRLVNHFVNEFKRKHKKVSSSTHVAPHSLDARHMLTPDRDLSTNARALRRLRTACERAKRTLSSSAQTSIEIDSLYEGIDYYTSITRARFEELCQDLFRSTIQPVDRVLADAKIDKSQVHEIVLVGGSTRIPRIQKPITDYFNGKEPNKSINPDEAVAYGAAVQAAILSGDTTSKSTNEILLLDVAPLSLGIETAGGMMTKLIPRNTTIPTKKSEVFSTFSDNQPGVLIQVYEGERQRTKDNNLLGKFELTGIPPAPRGVPQIEVTFDVDANGIMNVSAVEKGTGKSNKIVITNDKGRLSKEEIERMLSDAEKYKEEDEAEAKRVSAKNGLESYAYSLRNTLNDPKVDEKIEAADKETLKSEIDKIVQWLDDNQQASTEEYESHQKELEGVANPIMMKFYGAGGEGGMPGGMPGGAGGFPGAGGAPHQGGDDGPTVEEVD

SEQ ID NO: 13898 - protein, 296 aa, Kluyveromyces lactis NRRL Y-1140
MSSKHPCIKDGWFNEVSDKSFPGQAFSLKVNKILFHEKTQFQDILIFESSNYGNVLVLDGIIQVSEKDEFAYQELISHVPLYSHENPKKILVIGGGDGGVLREVVKHSCVEEATLVEIDAKVIELSKKYLPNMACSFKHPKVNVKLCDGFQFLRDVAESGTKYDVIITDSSDPEGPAEAFFQKEYFELLYKALTENGVVIAQASENVWLNLEYLKTLLNTSRSVFPVAEYCYTMLPTYTSGQLGLIACCKNPNTNLIDPCRAPTEDEQSQMRYYNNKMHSAAFVLPTWARKVLNPL

SEQ ID NO: 13899 - protein, 468 aa, Neisseria meningitidis
MSIKNAVKLIEESEARFVDLRFTDTKGKQHHFTVPARIVLEDPEEWFENGQAFDGSSIGGWKGIQASDMQLRPDASTAFVDPFYDDVTVVITCDVIDPADGQGYDRDPRSIARRAEAYLKSSGIGDTAYFGPEPEFFVFDGVEFETDMHKTRYEITSESGAWASGLHMDGQNTGHRPAVKGGYAPVAPIDCGQDLRSAMVNILEELGIEVEVHHSEVGTGSQMEIGTRFATLVKRADQTQDMKYVIQNVAHNFGKTATFMPKPIMGDNGSGMHVHQSIWKDGQNLFAGDGYAGLSDTALYYIGGIIKHAKALNAITNPSTNSYKRLVPHFEAPTKLAYSAKNRSASIRIPSVNSSKARRIEARFPDPTANPYLAFAALLMAGLDGIQNKIHPGDPADKNLYDLPPEEDALVPTVCASLEEALSALKADHEFLLRGGVFSKDWIDSYIAFKEEDVRRIRMAPHPLEFEM

SEQ ID NO: 13900 - protein, 618 aa, Clostridium perfringens
MSKIIGIDLGTTNSCVAVMEGGEPVVITNSEGARTTPSVVSFQANGERLVGQVAKRQAITNPDKTIMSIKRHMGTDYKVNIDGKDLSPQEISAMILQKLKADAEAYLGEKVTEAVITVPAYFNDAERQATKDAGRIAGLDVKTIINEPTAASLAYGLDKMDSAHKILVYDLGGGTFDVSILDLGDGVFEVVSTNGDARLGGDDFDQRIIDYIAEDFKGENGIDLRQDKMALQRLKEGRQKAKIELSSSTQTLINLPFITADATGPKHIDMTLTRAKFNELTHDLVERTINIMKEALKSGNVSLNDIDKVILVGGSTRIPAVQEAVKNFTGKEPSKGVNPDECVAMGAAIQAGVLTGDVKDVLLLDVTPLTLGIETLGGVATPLIERNTTIPARKSQILSTAADNQTSVEIHVVQGERQMAADNKTLGRFTLSGIAPAPRGIPQIEVAFDIDANGIVKVSATDKATGKEANITITASTNLSDAEIDKAVKEAEQFAEEDKKRKEAIEVKNNAEQTVYQTEKTLNELGDKVSAEEKSEIEAKIEVKKVKDGDDIQAIKKAMEDLTQAFYKVSEKLYQQNGGAQGQGFDPIIMGGANAGAGATNNNDDNVVDADFEVQDDK

SEQ ID NO: 13901 - protein, 160 aa, Bacillus pumilus SAFR-032
MSIYDIQVKTINGQEKSMADYKGKVLIIVNTASKCGLTPQFKQLQELYDQYHEKGLEILGFPCNQFMNQEPEGEEAIQEFCSLNYGVTFPMFAKVDVNGDNAHPLFKHLTSHAKGVLGTKTVKWNFTKFIVDQNGEVTERFSPKTSPKELESSIIALLDK

SEQ ID NO: 13902 - protein, 574 aa, Lotus japonicus; identical to SEQ ID NO: 1226

SEQ ID NO: 13903 - protein, 468 aa, Neisseria meningitidis
MSIKNAVKLIEESEARFVDLRFTDTKGKQHHFTVPARIVLEDPEEWFENGQAFDGSSIGGWKGIQASDMQLRPDASTAFVDPFYDDATVVLTCDVIDPADGQGYDRDPRSIARRAEAYLKSSGIGDTAYFGPEPEFFVFDGIEFETDMHKTRYEITSESGAWASGLHMDGQNTGHRPAVKGGYAPVAPIDAGQDLRSAMVNILEELGIEVEVHHSEVGTGSQMEIGTRFATLVKRADQTQDMKYVIQNVAHNFGKTATFMPKPIMGDNGSGMHVHQSIWKDGQNLFAGDGYAGLSDTALYYIGGIIKHAKALNAITNPSTNSYKRLVPHFEAPTKLAYSAKNRSASIRIPSVNSSKARRIEARFPDPTANPYLAFAALLMAGLDGIQNKIHPGDPADKNLYDLPPEEDALVPTVCASLEEALAALKADHEFLLRGGVFSKDWIDSYIAFKEEDVRRIRMAPHPLEFEM

SEQ ID NO: 13904 - protein, 632 aa, Cytophaga hutchinsonii ATCC 33406
MGKIIGIDLGTTNSCVAVMEGSEAVVIPNSEGKRTTPSIVAFLENGERKVGDPAKRQAITNPTNTISSIKRFMGKKFSESKSEADRATYKLEAGSNDTPRVRIADRQYTPQELSAMILQKMKTTAEEYLGHEVKEAVITVPAYFNDAERQATKEAGQIAGLEVKRIINEPTAAALAYGMDKKGKDMTVAVFDLGGGTFDVSVLELGDGVFEVKSTNGDVHLGGDNFDEVIIDWLAGEFKSEEGLDLRQDPMALQRLKEAAEKAKIELSSSASTEINLPYIMPVNGMPKHLVKTLTRAKFEQLADSLIKRTLDPCKQALKDAGLSIGQIDEVILVGGSTRIPRIQEEVEKFFGKKPSKGVNPDEVVALGAAIQGGVLTGEVTDVLLLDVIPLSLGIETMGGVFTKLIEANTTIPSKKSEVFSTASDNQPSVEIHVLQGERAFAKDNRSIGRFHLGDIPPAPRNVPQIEVTFDIDANGILNVSAKDKGTGKEQKIRIEASSGLSADEIERMRNEAKANEGKDREEKEKIEKINQADSMIFQTEKQLKEFGDKLSAGNKSAIEASLEDLKKAFEAKDISAIDTAMAAINTAWQAASQEMYSAEQGAGQPGADAGQSGPSDSVTDVEFEEVDGDKK

SEQ ID NO: 13905 - protein, 360 aa, Zea mays
HASDALEVGQDVSCKLSFIMSLLRNLVGEGHHVLIFSQTRKMLNLIQEAIILEGYAFLRIDGTTKVSDRERIVKDFQEGCGAPVFLLTTQVGGLGLTLTKATRVIVVDPAWNPSTDNQSVDRAYRIGQTKNVIVYRLMTSATIEEKIYKLQVLKGALFRTATEQKEQTRYFSKSEIQELFSLPQQGFDVSLTHKQLQEEHGQQVVLDESLRKHIQFLEQQGITGVSHHSLLFSKTATLPTLSENDALDSKPGGMPMMPQQYYKGSSSDYVANGASFALKPKDESFTVRNYIPSNRSAESPEEIKARINRLSQTLSNAVLLSKLPDGGEKIRRQINELDEKLTSAEKGLKEGGTEVISLDD

SEQ ID NO: 13906 - protein, 543 aa, Pseudomonas fluorescens PfO-1
MQTAYTVLILLMLVSVSRLVGRVIPLPLPLVQIAAGALLAWPTLGLHVALDPELFLFLFLPPLLFSDGWRMPKRELWRLRGPVLTLAVGLVLFTVVGAGYFIHWLLPTIPLPVAFALAAVLSPTDAVAVSAISQNRLPTPLMHMLQGEALMNDASGLVTFKFALVAAVTGAFSLANASLTFVLVAVGGLAVGVALSWLVGRLRAWMIARGWDDPATHVVFMLLLPFAAYVLAERLGASGILSAVAAGMMQSWLDLLPRQTSTRLLNRSVWSLLEFAFNGLIFLLLGLQLPDIVKAVVSHETSLWPTLFYRCLDVVAIFLALVLLRFIWVQSIWRLSVLLRRLRGKGDLTQVPTARSCWLLTVGGVRGAVTLAGVMSVPMLMGSEAFPERDLLIFIAAGVILLSLVAACIALPLLLRGIEKSPDDKRRQEVRDAWRKTAEAAIHALETEEVNPQDAAQAALAAELKARIMSEYRHQLEVFNDSAEAQALAFQMDLLERRLRLKALRAQRLELYSLSRQHQIGDDVLREVLGELDLSEANLGSVK

SEQ ID NO: 13907 - protein, 468 aa, Neisseria gonorrhoeae
MSIKNVVKLIEESEARFVDLRFTDTKGKQHHFTVPARIVLEDPEEWFENGPAFDGSSIGGWKGIEASDMQLRPDPATAFVDPFYDDATVVLTCDVIDPADGQGYDRDPRSIARRAEAYLKSSGIGDTAYFGPEPEFFVFDGVEFETDMHKTRYEITSESGAWASGLHMDGQNTGHRPAVKGGYAPVAPIDCGQDLRSAMVNILEGLGIEVEVHHSEVGTGSQMEIGTRFATLVKRADQTQDMKYVIQNVAHNFGKTATFMPKPIMGDNGSGMHVHQSIWKDGQNLFAGDGYAGLSDTALYYIGGIIKHAKALNAITNPSTNSYKRLVPHFEAPTKLAYSAKNRSASIRIPSVNSSKARRIEARFPDPTANPYLAFAALLMAGLDGIQNKIHPGDPADKNLYDLPPEEDALVPTVCASLEEALAALKADHEFLRRGGVFSKDWIDSYIAFKEEDVRRIRMAPHPLEFEM

SEQ ID NO: 13908 - protein, 419 aa, Neisseria lactamica
FTVPARIVLEDPEEWFENGQAFDGSSIGGWKGIQASDMQLRPDPATAFVDPFYDDVTVVITCDVIDPADGQGYDRDPRSIARRAEAYLKSSGIGDTAYFGPEPEFFVFDGVEFETDMHKTRYEITSESGAWASGLHMDGQNTGHRPAVKGGYAPVAPIDCGQDLRSAMVNILEELGIEVEVHHSEVGTGSQMEIGTRFATLVKRADQTQDMKYVIQNVAHNFGKTATFMPKPIMGDNGSGMHVHQSIWKDGQNLFAGDGYAGLSDTALYYIGGIIKHAKALNAITNPSTNSYKRLVPHFEAPTKLAYSAKNRSASIRIPSVNSSKARRIEARFPDPTANPYLAFAALLMAGLDGIQNKIHPGDPADKNLYDLPPEEDALVPTVCASLEEALAALKADHEFLLRGGVFSKDWIDSYIAFK

SEQ ID NO: 13909 - protein, 645 aa, marine gamma proteobacterium HTCC2080
MGKIIGIDLGTTNSCVSVLEGGKARVIENAEGGRTTPSIVAYADDDEILVGQAAKRQAVTNPTNTLYAVKRLIGRRFEDKVVQKDIKMVPYNIVKADNGDAWVEAKGNSMAPPQVSAEVLRKMKKTAEEFLGETVSEAVITVPAYFNDSQRQATKDAGKIAGLEVKRIINEPTAAALAYGMDKSQGDRTIAVYDLGGGTFDISVIEIAEVDGEHQFEVLATNGDTFLGGEDFDLRLIEYLADEFKRENGIDLHGDPLALQRLKEAAEKAKIELSSAQQTEVNLPYITADATGPKHLVVKLSRSKLESLVEDLVTRSLDPVKTALADAGLSPSEIQDVILVGGQTRMPLVQTTVTDFFGKEPRKDVNPDEAVAMGASIQGAVLAGDVKDVLLLDVTPLTLGIETMGSVATPLIEKNTTIPTKKSQVFSTAEDNQTAVTIHVVQGERKQAAQNKSLGRFDLADIPPAPRGVPQVEVTFDLDANGILNVSAKDKATGKEQSIRITASGGLSEDEIEQMVQDAEANAEADKKFEEMITVRNSCDGMVHAARKTLEEAGEHSTVDERAAIEAAIAEAEEAMQGDDKEAIEAATTKITEATGPVAQKMYAAQEAEGAAEAAGAEAGASTGSADDGDVVDAEFEEVKEDDKP

SEQ ID NO: 13910 - protein, 545 aa, Xanthomonas campestris pv. vesicatoria str. 85-10
MHSIDVVLAMLLAVAASGYLIRILPFSLPLPLVQIALGAVVSGVFDAGHELEPELFFLLFLPPLLFLDGWRIPKQGLFRDKAAILELALGLVIFTVIGAGFFIHWLIPAMPLAVAFALAAIISPTDPVAVSSIASKVPIPKRLMHILEGESLLNDASGLVCFQFAVAAVLTGTFSVAAASLTFLWVALAGLALGVATTFGLSRIQAWIWRHFGEEPGSAILVNLLTPFAAYLLAEAFHASGILAAVAAGITMSYVEMAGNAPGNMRLQRSAVWDTVQFTFNGIIFVLLGEQLPGILDGAVRSVQEAGHLNPWWLAVYVATISLSLMALRFVWVFLSLRWNIFKAQRRGEAHVSPPWRIVVAVSLAGVRGAITLAGVLTLPLMLEDGSPFPARQLAIFLAASVILVSLLVASVALPRLLRGLELPEEEDEQLKEDLAVKAASQAALDAVEKLRQRLVEDSKHAERYNAAANQVSQRYQRKLGAVDMAETDPEEAVAYEKALRQFRHAALVAERNELFKLARRREISDDLSRRLVRNLDLIESRKRA

SEQ ID NO: 13911 - protein, 94 aa, Brassica napus
  misc_feature (92)..(92): Xaa can be any naturally occurring amino acid
MGFSEAQEELVLRSWKAMKSDSESTALKFFLRIFEIAPGAKQMFSFLRDAGDAPLEKHPKLKAHAVTVFVMACESATQLRSTGDVKVREATXKR

SEQ ID NO: 13912 - protein, 845 aa, Oryza sativa
MSEVRSVPGMKVEASPAAAAAATVDSPTSVLEDDEISECKNGDVLDTTEAIKQEEDHLDVLIEEKVDGFVDASSSLNVEPAANNSDLSPLTVPVKEEGQLLEPVKEEKADDFVDAVPSLPIDLEAKNGDASLITDAMKEEEEKLHDARVKAEEEEVARKREEAARLAFDPNARFNKLDELLSQTQLYSEFLLEKMETIADVEGVQTHAEEEPVEEKKNGRGRKRKATSAPKYNDKKAKKAVAVMLTRSHEDCSPEDCTLTEEERWEKEQARLVPLMTGGKLKSYQIKGVKWLISLWQNGLNGILADQMGLGKTIQTIGFLAHLKGKGLDGPYLIIAPLSTLSNWVNEISRFVPSMTGLIYHGDKAARAEIRRKFMPKTTGPDFPLIVTSYEMAMSDAKHLAHYKWKYVIVDEGHRLKNSKCLLLRELKRLPMDNKLLLTGTPLQNNLAELWSLLNFILPDIFSSRLTCESWFDFSAKGGEEEQEDSEEKRKVDVVSKLHAILRPFLLRRMKEDVEHMLPRKKEIIIYANMTDHQKQIQNHLVEQTFDQYLHEKSEIVLRKPGIKAKLNNLLIQLRKNCNHPDLLESAYDSSGLYPPVEKLLEQCGKFQLLNRLLSLLLARKHKVLIFSQWTKVLDIIEYYLETKGLQVCRIDGSVKLEERRRQIAEFNDLNSSMNIFILSTRAGGLGINLTSADTCILYDSDWNPQMDLQAMDRCHRIGQTRPVHVYRLATSHSVEGRIIKKAFGKLRLEHVVIGKGQFEQDRAKPNALDEAELLALLRDEQGDEDRMIQTDISDEDLLKVMDRSDLTGPPANADAAPLVPLKGPGWEVVVPTKSGGGMLTSLTS

SEQ ID NO: 13913 - protein, 473 aa, Microcoleus chthonoplastes PCC 7420
MPETPQEVLKMIQDQDIKIIDLKFIDMPGIWQHCSFYYDQIDESAFEDGVAFDGSSIRGWKAINESDMSMVPDPKTAWIDPFMKEKTLSMICSIKEPRTGEWYSRDPRTIAQKALDFLKSTGIGDITFFGPEAEFFIFEDVRFDQTESKGFYYVDSVEGRWNSGREEAGGNLGYKPRYKEGYFPVSPTDTMQDMRTEMLLTMAQCGVPIEKHHHEVASGGQNELGVRFAPIVEAGDFLMVYKYVVKNVAKKYGKTATFMPKPIFNDNGSGMHTHQSIWKNGKPLFFGDGYAGLSKMALHYIGGLLRHAPALLALTNPTTNSYKRLVPGFEAPVNLAYSQGNRSASIRIPLSGDNPKAKRMEFRCPDATCNPYIAFAAMLCAGLDGIKNEIDPGEPLDVDIYDLSPEELSKIPSTPGSLEAALEHLEQDHTFLTSTGVFTEDFIDNWIAYKLDNEINPMRLRPHPYEFSLYYDV

SEQ ID NO: 13914 - protein, 187 aa, Triticum aestivum
  misc_feature (101)..(101): Xaa can be any naturally occurring amino acid
MGASESVPETSVHEFTVKDCNGKEVCLDTYKGKVLLIVNVASKCGFTETNYTQLTELYQKYREKDFEILAFPCNQFLRQEPGSDQQIQDFACTRFKAEYPXFQKVRVNGPDAAPLYKFLKASKPGLFGSRIKWNFTKFLVDKNGKVINRYATATTPFSFEKDIQKALEEEPSESQTKKEEESSDSQK

SEQ ID NO: 13915 - protein, 421 aa, Nicotiana tabacum
MATSNGIIYYSAKSPQHPKVHTHSQGIELSKHKGYSPLPRLKFSNKGFWEVCGKLSNRVIFRGSPVLCRSTETHDTETKDFSRNSGDYSNISSVQEDDHAITVGKVIPSSQAIAEACKFAYNDAKFVNERAKNDIVLLSREIMRMDARARQDVAFLGSEFLKLDARAREDTEKVDHDVKKRAERIHHVATILKNKAQSGLKKAADRHWSDGALEADLRRADFVAKQRAMEDSLMALEFVKNIHDRMVGKMYKLKRSSVDSEKTRHITLEKNGKTLEFLPGEVSADRITAIQEAYWDIASALSEADGIDYTDPEELELLVATLIDLDAMDGKSSVSLLAECSSSPDVNTRKALANALSAAPSMWTLGNAGMGALQRLAEDDNPAIAAAASKTILELKRQWEIGEGDSWRLMVEEESPDDVGS

SEQ ID NO: 13916 - protein, 1121 aa, Solanum lycopersicum; identical to SEQ ID NO: 7011

SEQ ID NO: 13917 - protein, 607 aa, Streptococcus suis 89/1591
MSKIIGIDLGTTNSAVAVLEGTESKIIANPEGNRTTPSVVSFKNGEIIVGDAAKRQAVTNPDTIISIKSKMGTSEKVSANGKEYTPQEISAMILQYLKGYAEEYLGEKVTKAVITVPAYFNDAQRQATKDAGKIAGLEVERIVNEPTAAALAYGLDKTDKDEKILVFDLGGGTFDVSILELGDGVFDVLATAGDNKLGGDDFDQKIIDHMVAEFKKENGIDLSADKMALQRLKDAAEKAKKDLSGVTSTQISLPFITAGAAGPLHLEMTLTRAKFDELTYDLVERTKIPVRQALSDAGLSLSEIDEVILVGGSTRIPAVVEAVKAETGKEPNKSVNPDEVVAMGAAIQGGVITGDVKDVVLLDVTPLSLGIETMGGVFTKLIDRNTTIPTSKSQVFSTAADNQPAVDIHVLQGERPMAADNKTLGRFQLTDIPAAPRGIPQIEVTFDIDKNGIVSVKAKDLGTQKEQTIVIQSNSGLTDEEIDRMMKDAEANAEADKKRKEEVDLRNDVDQAIFATEKTLKETEGKGFDAERDQAQVALDELKAAQEANNLDDMKAKLENLNEKAQALAVKLYEQAAAAQQAAAGQEGAQTANNAGDDVVDGEFTEK

SEQ ID NO: 13918 - protein, 530 aa, Zea mays
MAAAAWWETLVVAAAADGTGGSSTTVVSICMFTTVLCLCLVAGHLLEENKWVNESITALVIGCIIGVIVFLLTKGKHSHILRFDEQLFFIYVLPPIIFNAGFQVKKKQFFHNFMTIMSFGVFGVFISGAIVSAGCYWLFPKVGFGELGAVDYLALGAIFSSTDTVCTLQVINQDETPRLYSLVFGEGVVNDATAVVLFNAIKDLDISQLKGGVVLKVIFDFLYLFATSTVLGISIGLVTAYVLKALYFGRHSTDREVALMALMAYLSYMLAELLELSGILTVFFCGIVMSHYAWHNVTESSRITTKHIFATLSFIAETFIFLYVGMDALDIDKWRTSKESFKTSIGIFGILILLILLGRVAFVFPISILSNIMSGSSERTPITFKHQVVIWWAGLMRGAVSIALAYNQFTFSGVTSDPVHATIITSTIIVVFFTTLVFGFLTRPLISGMLPHQSRALSRGHSTGSNSPKDDFTLPFLSGDEGASGSGIVLEQAKRSLSMMLERPVHTVHIYWRKFDDRFMRPIFGGPRSH

SEQ ID NO: 13919 - protein, 474 aa, Anabaena sp.
MTTPQEVLKRIQDEKIELIDLKFIDTVGTWQHLTLYQNQIDESSFSDGVPFDGSSIRGWKAINESDMTMVLDPNTAWIDPFMEVPTLSIVCSIKEPRTGEWYNRCPRVIAQKAIDYLVSTGIGDTAFFGPEAEFFIFDSARFAQNANEGYYFLDSVEGAWNSGKEGTADKPNLAYKPRFKEGYFPVSPTDSFQDIRTEMLLTMAKLGVPIEKHHHEVATGGQCELGFRFGKLIEAADWLMIYKYVIKNVAKKYGKTVTFMPKPIFGDNGSGMHCHQSIWKDGKPLFAGDQYAGLSEMGLYYIGGLLKHAPALLAITNPSTNSYKRLVPGYEAPVNLAYSQGNRSASIRIPLSGTNPKAKRLEFRCPDATSNPYLAFAAMLCAGIDGIKNLIHPGEPLDKNIYELSPEELAKVPSTPGSLELALEALENDHAFLTDTGVFTEDFIQNWIDYKLANEVKQMQLRPHPYEFSIYYDV

SEQ ID NO: 13920 - protein, 210 aa, Vitis vinifera; identical to SEQ ID NO: 350

SEQ ID NO: 13921 - protein, 138 aa, Glycine max
  misc_feature (50)..(52): Xaa can be any naturally occurring amino acid
  misc_feature (66)..(69): Xaa can be any naturally occurring amino acid
  misc_feature (99)..(99): Xaa can be any naturally occurring amino acid
GGFRENDSKPFGLNAAETQNETGQTHAPLAHQLSLPNTSAEIAAIEKFLXXXDSVPCKIRAKRGCXXXXRSLAERVRRTKISERMRKLQDLVPNMDKQXANTADMLDLAVDYIKDLQKQVQTLSDCHAKCTCSHEKQQ

SEQ ID NO: 13922 - protein, 290 aa, Nicotiana tabacum; identical to SEQ ID NO: 358

SEQ ID NO: 13923 - protein, 424 aa, Photobacterium sp. SKA34
MAAIAVFISIFNHKFGRFQTTIAITGWSIAISLILLALTQFGFISVEKENALIELIQHIKFEDFLLKGVLGFLLFAGALNIDLDHLKDQKFEITFLALVGTLFSTFFIGITIWFIFSLIGIELNFIYCCLFGALISPTDPIAVLAIVKKLKAPQRISTQIEGESLFNDGIGLVIFVTIFEIAFSKTAPTVSETAMLFIREALGGLAFGAVLGSIFHYLIKGSNDNMLRLILTMLIPTCGYVIGEHLEVSAPLAMVVSGILIGNITRKYISEQSADQMAHLWELVDEILNAVLFLLIGFVMITFSFHSIDIIAVIIAVPLVLLSRYLSIRLSYVGFKRYRQYNPESVKILTWGGLRGGLALAMAMAMAMAMAIPTHIYLPSHPDVSIKEIIVLMTYAIVIFSILIQGSTITSMIMKAKAVDNKPF

SEQ ID NO: 13924 - protein, 239 aa, Oryza sativa
MESRKPPPSALVDNHVVPGDVVLDLAEMTNQTIKLGAGLRQDCDTIQATSAGRLRLSKPSKYWVESSQKRYIPSVEDTVLGVVVDTKPDNFLVDIKGPNLAFLPVLAFEGGTRRNIPKFEIGTLIYARVVKANSIMNPELSCMDATGKAAEFGQLKDGYMFDTSTGLSRMLLSSPTCPVLEALGKKLSFEIAVGLNGRVWVNAPSPSNVIVVSNAIIKSESLSGIGQRSMVESLLERLS

SEQ ID NO: 13925 - protein, 473 aa, Prochlorococcus marinus str. MIT 9303
MGKSPQDVLRQIKDEGIELIDLKFTDLHGKWQHLTVCSDLIDEEAFTNGLAFDGSSIRGWKAINESDMDMVPDASTAWIDPFYRHKTLSLICSIREPRSGEPYARCPRALAQKALGYLAGTGLADTAYFGPEPEFFIFDDVRYNSGEGGCFYSVDTIEAPWNSGRIEEGGNLAYKIQLKEGYFPVPPNDTAQDIRSEMLLLMGQLGIPMEKHHHEVAGAGQHELGMKYAELIEAADNVMIYKYIVRNVARKYGKTATFMPKPVFNDNGTGMHVHQSLFKGGQPLFFGEGTYANLSQTARWYIGGILKHAPSFLAFTNPTTNSYKRLVPGFEAPVNLVYSQGNRSAAVRIPLTGPNPKAKRLEFRPGDALANPYLAFSAMMMAGVDGIKNQIDPGDGFDEDLFELPAERLASIPTVPASLNGSLEALNADKNYLMEGGVFTEDFINNWIDIKYEEVQQLRQRPHPHEFTMYYDA

SEQ ID NO: 13926 - protein, 641 aa, Alcanivorax sp. DG881
MGKIIGIDLGTTNSCVAVLEGDKTKVIENAEGARTTPSIIAYTDDKETLVGQSAKRQAVTNPENTLYAVKRLIGRRFDDKVVQKDIKMVPYKITKADNGDAWVEVKGEKMAPPQISAQVLKKMKKTAEDYLGETVTEAVITVPAYFNDSQRQATKDAGRIAGLDVKRIINEPTAAALAYGLDKKGGDRTIAVYDLGGGTFDISIIEIAEVDGEHQFEVLATNGDTFLGGEDFDLALINFLADQFKADSGIDLGGDPLAMQRLKEAAEKAKIELSSAEQTEVNLPYITADSTGPKHLVVKVTRAKLESLVGDLVSRSLEPCKTALADAGVKTADITDVILVGGQTRMPMVQKSVTEFFGKEPRKDVNPDEAVAMGAAIQGAVLSGDVTDVLLLDVTPLTLGIETMGGVMTPLIEKNTTIPTNASQVFSTADDNQTAVTVHVLQGERKQAAQNKSLGQFNLEDIPPAPRGMPQIEVTFDIDANGILHVGAKDKATGKEQTIQIKASSGLSDEEVEQMVQDAEAHADEDKKFEELVQTRNQADHLVHATRKTLEEAGDKATDEEKESITKAVDELEEAAKGSDKDDIEAKIKALSEVSAPLAEKMYAEQAQQAEGAAGAEGGEQQKGDDVVDAEFEEVDDDKKK

SEQ ID NO: 13927 - protein, 537 aa, Oryza sativa
  misc_feature (207)..(207): Xaa can be any naturally occurring amino acid
MALELSLVSASPPGGLAASPPPPAAIPGKEQQVAGVGILLQISMLVLSFVLGHVLRRHRFYYLPEASASLLIGLVVGGLANISNTETNTRMWFNFHDEFFFLFLLPPIIFQSGFSLSPKPFFANFGAIVTFAILGTFIASVVTGVLVYLGGLTFLMYKLPFVECLMFGALISATDPVTVLSIFQELGTDVNLYALVFGESVLNDACXMAISLYRTMSLVRSQAAAGENFFMMVFQFLETFVGSLSSGVGVGFISALLFKYAGLDIDNLQNLECCLFVLFPYFSYMLAEGLGLSGIVSILFTGMVMKHYTFSNLSNNSQRFVSAFFHLLSSLAETFVFIYMGFDIAMEEHSWSHVGFIFFSIIFIIIARAVNVFSCAYLVNMSRPEHRRIPLKHQKALWFSGLRGAMAFALALQSANELPGGHGKTIFTTTTAIVVLTVLLIGGSTGTMLEALDVIGDENRSIENYDDNNGYIPPTYEEGSSSGGGLRMKLKEFHKSTTSFTALDRNYLTPFFTSQTDEDDDVFGEQPQNQRRGFYDQ

SEQ ID NO: 13928 - protein, 419 aa, Neisseria polysaccharea
FTVPARIVLEDPEEWFENGQAFDGSSIGGWKGIQASDMQLRPDASTAFVDPFYDDVTVVITCDVIDPADGQGYDRDPRSIARRAEAYLKSSGIGDTAYFGPEPEFFVFDGVEFETDMHKTRYEITSESGAWASGLHMDGQNTGHRPAVKGGYAPVAPIDCGQDLRSAMVNILEELGIEVEVHHSEVGTGSQMEIGTRFATLVKRADQTQDMKYVIQNVAHNFGKTATFMPKPIMGDNGSGMHVHQSIWKDGQNLFAGDGYAGLSDTALYYIGGIIKHAKALNAITNPSTNSYKRLVPHFEAPTKVAYSAKNRSASIRIPSVNSSKARRIEARFPDPTANPYLAFAALLMAGLDGIQNKIHPGDPADKNLYDLPPEEDALVPTVCASLEEALAALKADHEFLLRGGVFSKDWIDSYIAFK

SEQ ID NO: 13929 - protein, 165 aa, Zea mays; identical to SEQ ID NO: 13871

SEQ ID NO: 13930 - protein, 419 aa, Neisseria mucosa
FTIPARIVLDDPEEWFENGQAFDGSSIGGWKGIQASDMQLRPDPATAFIDPFYDDTTVVLTCDVIDPADGQGYDRDPRSIARRAEAYLKSTGIGDTAYFGPEPEFFVFDGVEFETDMHKTRYEITSESGAWASGLHMDGQNTGHRPTVKGGYAPVAPIDAGQDLRSAMVNILEELGIEVEVHHAEVGTGSQMEIGTRFATLVKRADQTQDMKYVIQNVAHNFGKTATFMPKPIMGDNGSGMHVHQSIWKDGQNLFAGDGYAGLSDTALYYIGGIIKHAKALNAITNPSTNSYKRLVPHFEAPTKLAYSAKNRSASIRIPSVNSSKARRIEARFPDPTANPYLAFAALLMAGLDGIQNKIHPGDPADKNLYDLPPEEDALVPTVCASLEEALAALKADHEFLLRGGVFSKDWIDSYIAFK

SEQ ID NO: 13931 - protein, 514 aa, Borrelia hermsii DAH
MFFVEFMSMNRKMLNNILSKLDKNMIKEVRGSCEVEILGLTYDSRCVLSRFVFFALPGLHFDGQKFIESAIQQGSNVIVHTNDIDSYDPNVTYIKIDACNIKRFMSNFSHIFYDEPSKKLKIIGVTGTDGKSSVCFYIYTLLKSMGVKVGFISTVFFEDGSGTLVKNPYRQSTPESTEIHLVLSKMVENNVEYAIVESTSHGLDARTSRLIDISYSVAVLTNISHEHLEFHGTMQHYLNAKLNLFSSADANGGFGIVNMDDNNFSVFLNAINRVYTYSLENKNADFFVSKINEQMGFIEFEFYHKDVKYDARVNLTGSFNVENVMAALIVVSQVMNIHISELIEKLVNVEGLCGRMQGVDFGQDFSLIIDYAHTPGAFLKIFPMFKRLAKNRLISVFGSAGERDTFKRKLQGEIADRYSDIIILCDEDPRSEDSMQIIRDIAEGISGKTLNKDLFFIPDRRSAIEKAVDIAYAGDLVVTLGKGHESSIIYEDRSIFWDEQAVIKDIILNLRDRG

SEQ ID NO: 13932 - protein, 419 aa, Neisseria cinerea
FTVPARIVLKDPEEWFENGQAFDGSSIGGWKGIQASDMQLRPDASTAFVDPFYDDVTVVITCDVIDPADGQGYDRDPRSIARRAEAYLKSSGIGDTAYFGPEPEFFVFDGVEFETDMHKTRYEITSESGAWASGLHMDGQNTGHRPAVKGGYAPVAPIDAGQDLRSAMVNILEELGIEVEVHHSEVGTGSQMEIGTRFATLVKRADQTQDMKYVIQNVAHNFGKTATFMPKPIMGDNGSGMHVHQSIWKDGQNLFAGDGYAGLSDTALYYIGGIIKHAKALNAITNPSTNSYKRLVPHFEAPTKLAYSAKNRSASIRIPSVNSSKARRIEARFPDPTANPYLAFAALLMAGLDGIQNKIHPGDPADKNLYDLPPEEDALVPTVCASLEEALAALKADHEFLLRGGVFSKDWIDSYIAFK

SEQ ID NO: 13933 - protein, 150 aa, Zea mays
  misc_feature (21)..(21): Xaa can be any naturally occurring amino acid
SVPRTLRPPQVQGFYFLVKNXVGDMPGGCILVHAPGSGKTFVLISFIQSFTARYPSARPFTALPIGILGIWQTEFHRWQLHFIPLYYFYSVQAEIRVQQLRILKCVKDKMPVLFLGYKQFCTILTDGRVRFATASCPDKLLKVPNLLILD

SEQ ID NO: 13934 - protein, 297 aa, Nepenthes alata; identical to SEQ ID NO: 1244

SEQ ID NO: 13935 - protein, 140 aa, Glycine max
NFSRLITENCCYHHQEADFSFQNLGLTHHLSLPSSSTKMSSIEKFLQIQGSVPCKIRAKRGFATHPRSIAERVRRTRISERIKKLQDLFPKSEKQTSTADMLDLAVEYIKDLQQKVKILSDCKAKCKCTSNEKHYTRTCA

SEQ ID NO: 13936 - protein, 419 aa, Neisseria pharyngis subsp. flava
FTIPTRIVLDDPEEWFENGQAFDGSSIGGWKGIQASDMQLRPDPATAFIDPFFDDTTVVLTCDVIDPADGQGYDRDPRSIARRAEAYLKSSGIGDTAYFGPEPEFFVFDGVEFETDMHKTRYEITSESGAWASGLHMDGQNTGHRPTVKGGYAPVAPIDAGQDLRSAMVNILEELGIEVEVHHSEVGTGSQMEIGTRFATLVKRADQTQDMKYVIQNVAHNFGKTATFMPKPIMGDNGSGMHVHQSIWKDGQNLFAGDGYAGLSDTALYYIGGIIKHAKALNAITNPSTNSYKRLVPHFEAPTKLAYSAKNRSASIRIPSVNSSKARRIEARFPDPTANPYLAFAALLMAGLDGIQNKIHPGDPADKNLYDLPPEEDALVPTVCASLEEALAALKADHEFLLRGGVFSKDWIDSYIAFK

SEQ ID NO: 13937 - protein, 522 aa, Phaseolus vulgaris
MAQVNRMINGVKIAFLSSNLSNTSQGNSPFSLTLITPSHKATQPSSSSWGLKKDSMILSGAELSPFKVMSAVATAEKPSTSPEIEVEPIKDFSGWIKLPGTKSLSNRILLLAALSEGTTVVDNLLNSDDIHYMLGALKWLGLRVETDKEINGAVVEGCGGIFPASIDSKSDIELYLGNAGTAMRPLTAAVTAAGGNAWYVLDGVPRMRERPIGDLVVGLKQLGADVDCFLGTNCPPVRVNAGGGLPGGKVKLFGSISSQYLTALLMSAPLALGDVEIEIIDKLISVPYVEVTLKLMERFGVSVEHWDSWDRFLVHGGQKYKSPGNAYVEGDASSASYLLAGAAITGGTVTVEGCGTKSLQGDVKFAEVLEKMGCKVWWTENSVTVTGPPRDLFGRRVLRAIDVNMNKMPDVAMTLAVVALFADGPTTIRDVASWRVKETEEMIAICTELRKLGATVEEGPDYCVITPPKKLKVAEIDTYDDHRIPMAFSLAACADVPVTINDPCTRKTFPDYFEVLERLTKH

SEQ ID NO: 13938 - protein, 419 aa, Neisseria flavescens
FTIPTRIVLDDPEEWFENGQAFDGSSIGGWKGIQASDMQLRPDASTAFVDPFYDDTTVVFTCDVIDPADGQGYDRDPRSIARRAEAYLKSSGIGDTAYFGPEPEFFVFDGVEFETDMHKTRYEITSESGAWASGLHMDGQNTGHRPTVKGGYAPVAPIDCGQDLRSAMVNILEELGIEVEVHHSEVGTGSQMEIGTRFATLVKRADQTQDMKYVIQNVAHNFGKTATFMPKPIMGDNGSGMHVHQSIWKDGQNLFAGDGYAGLSDTALYYIGGIIKHAKALNAITNPSTNSYKRLVPHFEAPTKLAYSAKNRSASIRIPSVNSSKARRIEARFPDPTANPYLAFAALLMAGLDGIQNKIHPGDPADKNLYDLPPEEDALVPTVCASLEEALAALKADHEFLLRGGVFSKDWIDSYIAFK

SEQ ID NO: 13939 - protein, 544 aa, Arabidopsis thaliana; identical to SEQ ID NO: 11027

SEQ ID NO: 13940 - protein, 669 aa, Oryza sativa; identical to SEQ ID NO: 13153

SEQ ID NO: 13941 - protein, 1146 aa, Populus tremula; identical to SEQ ID NO: 7027

SEQ ID NO: 13942 - protein, 541 aa, Vitis vinifera
  misc_feature (122)..(122): Xaa can be any naturally occurring amino acid
  misc_feature (144)..(144): Xaa can be any naturally occurring amino acid
  misc_feature (149)..(149): Xaa can be any naturally occurring amino acid
  misc_feature (154)..(154): Xaa can be any naturally occurring amino acid
MGFELGSVVMKLGMVSTSDHSSVVSMNLFVALLCACIVVDHWLEEYRWMNESITALALGLCTGIIILLTTRGKSSHILVFSEDLFFIYLLPPIIFNAGFQVKKKQFFRTFMTIMLFGAIGTXISFGIISLGAIHFFKKMKIGSXDIEDXLALGXIFSATDSVCTLQVLNQDETPLLYSLVFGEGVVNDATSVVLFNAIQSFDLSHIDSSIALQFIGNFLYLFITSTMLGVFAGLLSAYIIKKLYFGRHSTDREVAIMILMAYLSYMLAELFYLSAILTVFFCGIVMSHYTWHNVTESSRVTTKHAFATLSFVAEIFIFLYVGMDALDIEKWRFVSDSPGKSIGVSSILLGLVLVERAAFVFPLSFLSNLTKKSSSEKIHIEQQVTIWWAGLMRGAVSMALAYNQFTRAGHTQLRGNAIMITSTISVVLFSTVVFGLMTKPLVRLLLPSPKPFSSMISSEPSSPKYLVVPLIGNGEETETDQASQNVPRPTSLRMLLSTPSHTVHHYWRKFDDSFMRPVFGGRGFTPFIPGSPTEPNLGQWR

SEQ ID NO: 13943 - protein, 650 aa, Dunaliella salina
MPREAPAIGIDLGTTYSCVGVWQNDRVEIIANDQGNRTTPSYVAFTDAERLIGDAAKNQVAMNPFNTVFDAKRLIGRKFADQNVQNDAKLWPFQVRSGPGDIPEIVVSYKGEKKVFKAEEISSMVLIKMKETAQAYLGSDREVKKAVVTVPAYFNDSQRQATKDAGAIAGLEVLRIINEPTAAAIAYGLDKKASNVGERNVCIFDLGGGTFDVSLLTIEEGIFEVKSTAGDTHLGGEDFDERPVNHFANEFQRKFKKDLRTSARALRRLRTACERAKRTLSSAAQASIELDSLFEGADFATSITRARFEELCMDLFRKCMDPVEKCLRDAKMDKGQVHDVVLVGGSTRIPKVQSLLQDFFNGKELNKSINPDEAVAYGAAVQAAILTGEGGEKVQDLLLLDVTPLSLGLETAGGVMTTLINRNTTIPTKKEQVFSTYSDNQPGVLIQVYEGERARTKDNNLLGKFELSGIPPAPRGVPQICVIFDIDANGILNVSAEDKSTGTKNKITITNDKGRLTKDDIKRMVQEAEKYKADDEALKKKVEAKNNFENYAYNMRNTIREEKVAQAIGGEDKEKIEKALHEAMEWLDANQQAEVEEYEHKLKALEDLCNPIITRMYQGAGGGAPPPGAGGGAAPEGAGGPGGPKIEEVD

SEQ ID NO: 13944 - protein, 1146 aa, Populus tremula; identical to SEQ ID NO: 7028

SEQ ID NO: 13945 - protein, 541 aa, Physcomitrella patens subsp. patens
MAFARAAARRLLGGRAKFTARSATSASRDLTGSAVHHQDLQPPVHGHSRNSRLENGVVRLDKMERSTPSRHMCTMPELPSEKSSTVTGMITVAELKELARTKTIDTVVVGLTDCYGRLVGKRYTADFFLESAVDDGTHACSYLLATDMDMEPVPGYKFASWEAGYGDIHLVPDMKTLRVASWLEKTALVLCDVVQDDHELAPHAPRSILRNQIKAAQAVGKFTPMAASELEYFLYKDTYEESKNRGYHNLKPAGWVREDYHIFQGTRGEYFHGPARRHLEASGVPVENSKGEFGLGQHELNVKYAEVLEMADRHSVYKQCLKELADSMGVSVTFMAKPDAAQPGSSCHIHLSLWENGRNIFAGNQTLGSTKCSDEFRWFLGGWMHYTPELMCFYAPNVNSYKRYVSGSWAPTQIAWSRDNRTAPFRVLGSGKSLRIECRLPGADCNVYLAFAAALASGMDGIRNKIEPPPQLEGNVYFAKDLLTIPQSLGAATAAFKDSKFAKEMLGEDVHHHYHHFFDNELLAYQQAVTDWEKARYFEQI

SEQ ID NO: 13946 - protein, 546 aa, Triticum aestivum
MGLDLGALALKYTGLAVSDHDSIVAINIFIALLCGCIVFGHLLEGNRWVNESTTALVLGLITGGVILICTKGVNSRILIFSEDIFFIYLLPPIIFNAGFQVKKKQFFRNFATIILFGAAGTLISFVIITFGAMGLFSKLDVGPLELGDYLAIGAIFSATDSVCTLQVLNQDEAPLLYSLVFGEGVVNDATSVVLFNAIQNIDINHFDVFVLLQFIGKFLYLFFTSTVLGVAAGLLSAYIIKKLCFARHSTDREVAIMILMAYLSYMLSMLLDLSGILTVFFCGIVMSHYTWHNVTESSRVTTKHTFATLSFIAEIFLFLYVGMDALDIDKWKLASSSPKKPIALSAVILGLVMVGRAAFVFPLSFLSNLSKKESHPKISFNQQVIIWWAGLMRGAVSIALAYNKFTTSGHTAVRVNAVMITSTIIVVLFSTMVFGLLTKPLINLLIPPRPGTAADISSQSFLDPLTASLLGSDFDVGQLTPQTNLQYLLTMPTRSVHRVWRKFDDKFMRPMFGGRGFVPFVPGSPIERSVHGPGLLGTVTEAEDRS

SEQ ID NO: 13947 - protein, 1146 aa, Populus tremula; identical to SEQ ID NO: 7030

SEQ ID NO: 13948 - protein, 674 aa, Alteromonadales bacterium TW-7
MSKKFTLIPVVAALFSGSLFAAVEPVTIDDLPLLKQESQHGTASKRVASLFTRSHYIPVRFNDELSSKVYDRYIESLDFNKSVFLASDIASFEQYRDSFDNALTTGKLGFTFDIFNLSLKRRFERYEYSLSLLENEMTFEKQDEYFFDREDATWPTSQAELDEIWRERVKYDALRLKMTGKDWEGIKEVLTKRYKNAEKRLVQSNSEDAFQIVLNSLARTIEAHTSYLSPRRAEQFKMDMDLELEGIGAVLTPDEDYTVIRSLVPGGPADKTEQIKADDRIIGVAQDGEDFTDVIGWRLDDVVDLIKGPKGTKVRLQYLKGADAHGTPKVVEITRDKIRLEDRAAKSEVFEAKYSDLSSKIGVIEIPGFYNNLSKDVKVELAKLKEAKVDGIIIDLRQNGGGSLYEATQLSGLFFDQGPVVQIHTLNNRIEEQRDRDGVTYYDGPLTVLVDRYSASASEIFAAAMQDYGRAVIIGEQTFGKGTVQQHKGLARAYDLYDNPLGSVQYTIAKFYRINGGSTQHKGVIPDISFPSAIDPAEWGESKQDNALPWDSIVKAKYKKLGNLTPVIPYLEKQHKDRIKSEPEFGYVFDDIALYNEEKDRKTISLVEATRIKEKEEGEARALVRTNERLKRLGKDPVENLDDVPDVIDELDPFLEEAALITQDYINFGRIAKK

SEQ ID NO: 13949 - protein, 668 aa, Glycine max; identical to SEQ ID NO: 12561

SEQ ID NO: 13950 - protein, 1146 aa, Populus tremula; identical to SEQ ID NO: 7033

SEQ ID NO: 13951 - protein, 1146 aa, Populus tremula; identical to SEQ ID NO: 7035

SEQ ID NO: 13952 - protein, 636 aa, Nostoc punctiforme PCC 73102
MVLQKSSDLVRINARRTDVFDIFNFKHYVGPNPYLDAGALVFDFALVDSREPLPIDDYIASIGDRYPNLGSQSYESHAYLFAQVVSEVGKLDMDLHLKHWSVKPYPDFVRISVQSLHERTTREVVYFVWDWFEAITQDEDFNFEEQLVRLQNRFRASVYGGPTVYALLRTAYEKGIPAFYLWEEGLMQYGFGKKHVRGVATTFNCDSHLDSEFTTRKDDCKAFLKTLGFPVPEGDIVFSEKEALAAAREIGYPVAVKPVVGHKGIGVTADVQDSKELESAYNRALAAIPEDQVTRIIVEKSISGSDFRMLCVNGRFVAATERRPASVVGDGYLTLAELIRLENRKPARLDTPTSPMSKIQIDEAMELYLEEQRLSLDSVIEKGRTVYLRKVANLSAGGMSIDATHTVHDDNIILAQDIAQHFQLTCLGIDVITKSLSESWKSSNFAILEINAAPGVLMHLKPSEGESVDVPSHILETFFESGTDSRIPIITFNRISVEELQTTIDHILLQHPNWTIGAVCRDAVFVNRSKKVLSKNYNSNVQTLLRHPKVDLLIAEYAEDILDEEGMFYRNSNIVVLDNPTETEMMLARDVFDGSTVVIRKGNDISIRRKGLIEDYTLAEDEPFTRVYLKETGTIL

SEQ ID NO: 13953 - protein, 577 aa, Shewanella sp. MR-4
MHESQTTGSATQAVKTSRLSWFDDVLLLGIMAVLAGCGLIYEYLLSHYAGRILGALEAAIYTMIGLMIVSMGLGAFAARKIKDAFTGFVVLELTVALCGSLAILITAAVIGLGQQLPMLIASTLGLPPDQLPEGGMVGSLQKLSEYLPYIWGVSLGLMIGMEIPLIARVRQSLSDEHLLHNAGTIYGADYIGAGIGAAIWVGFMLAIDIQLAAALTASFNLLAGFVFIWRFWPKIQRAKLLLAGHFVVTGVLLLLAIQGPSWELQFNNLLYKDKVVYAKATRFQQLTFTERLRGNGLSPIYSLYINGRLQFSSIDEHIYHAFLVHPTLAASARHNKVLIIGGGDGLGLKQVLRWEPEQVTLLDLDAALVQLFKTPDTDMPKRLSQALLALNGNAFNDPRVKVIHDDAFNGVDKLIAAGDKYDAIIVDLPDPSHPDLNKLYSDYFYRKLKELMSSDGALTVQSTSPYHAQKAFISVAKTLALAGFDVKQYHHNVPSFGEWGWSIATLSGKDAQHRLGELTTLPIADDWLTLGLVKGAFEFPANFYQDAANIKPNELGSLQLYHYHQQAWSETQGLDLF

SEQ ID NO: 13954 - protein, 159 aa, Prochlorococcus marinus str. MIT 9301
MQVDVQNTTVLSADGSSIQLGEYSGEVILVVNVASYCGNTAQYEDLQKLHDLYSTKGLRILAFPCNDFGKQEPDSLSEIKDFCTTKYGIKFEIYEKVHAKGNTTEPYTTLNKVEPEGDVEWNFEKFLIGKDSKVIARFKPTVKPFDENLIAAIEVALDS

SEQ ID NO: 13955 - protein, 200 aa, Zea mays
  misc_feature (87)..(87): Xaa can be any naturally occurring amino acid
  misc_feature (99)..(99): Xaa can be any naturally occurring amino acid
  misc_feature (160)..(160): Xaa can be any naturally occurring amino acid
  misc_feature (191)..(191): Xaa can be any naturally occurring amino acid
MGSAGKPADDISTDPESGPETSLLGSTPKSPPDSFHLAYIIYFTLGVGFLLPWNAFITAVDYFSYLYPSTSVDRIFAVVYMLVGLFXLLVIIVFYAHKXLASFRINLGLLLFAVSLLVIPVLDLVYVKGRVGLYVGFDITSVAVGLSGVADALMQGGLIXGVAGEMPERYTQAVIAGTAGSGVLVSLVRIXLTRAVYPQD

SEQ ID NO: 13956 - protein, 487 aa, Exiguobacterium sibiricum 255-15
MNEGTVLLLAGILLLLAIVTTKFSVRLNVPTLILFVFVGILAGTDVSGLIDFADFEQARLFGTIALVIILFDGGLNTKWRDFKTVLPAALSLATVGVLVTTGLIAGVAHYLLDFSWPIALLIGALIGSTDAAAVFSLLNGRPIDQKVKHTLEAESGTNDPMAVFLTILFTEFALDPAAFSALHGILLLFYEMGLGLVIGLFVGWLLTSLMNRIQLQSSALYPTLLISGALLSYGVATSLHASGFLAVYVTGIWLSNHDLIYRDILVRFSGSLSHLAEVGMFIMLGLLVFPRQLFDPQTLFVSGIIVLTLILVARPLAVYLSLLPFRYNFREQSVITAAGLRGAVPIILATYPLSSGLPDAYPLFNIVFFTVMTSALLQGTALPWVVKLMKLDAKPTIDIEPLIQFMTVANPNAEIVEVSVPSYCRIDGKTLQEIEMPQDLLVVAVIRQNAIITPRGKTRLIGGDQLLILTPKQSEERIRKLIASLGI

SEQ ID NO: 13957 - protein, 332 aa, Brassica napus
MDATREASVTDLKRPREEDDNNNTAAVASMETKEPACFSSVIPGWFSEMSPMWPGEAHSLKVEKVLFQGKSDYQDVIVFQSATYGKVLVLDGVIQLTERDECAYQEMITHLPLCSIPNPKKVLVIGGGDGGVLREVARHSSVEQIDMCEIDKMVVDVSKQFFPNVAIGFEDPRVNLVIGDGVAFLKNAAEGSYDAVIVDSSDPIGPAKELFEKPFFQSVARALRPGGVVCTQAESLWLHMDIIEDIVSNCREIFKGSVNYAWTSVPTYPSGVIGFMLCSTEGPDVDFKNPVNPIDDSSSKSNAPLKFYNAEIHSAAFCLPSFAKKVIESKAN

SEQ ID NO: 13958 - protein, 465 aa, Salinibacter ruber DSM 13855
MRAGPPSFFVPTNQSFRRSMPTKTDVLEQIEAKGVDFLRLQFIDILGTVKNVSVPAHQAEKAFEEGIYFDGSSIEGFVRIQESDMRLDPDPDTFAVLPWRSQRGDDTVSARLICNIIDTSTGEPFVGDPRYVLQRAIDRAADMGFELNAGPEPEFFVFEKDENGRATTETHDAGGYFDLAPKDLAQEIRAEVIYTLEAMDFEVEASHHEVAQGQHEIDFKYDDALTTADNIATFRSVVRAIAELHDVHATFMPKPIAGINGSGMHTHLSLFEDGENVFHDGDDEFSLSDTAYDFLGGILEHAPALTAICNPTVNSYKRLVPGYEAPIYVAWSDVNRSALVRKPAARVPAASRIELRSPDPSSNPYLALATMLHAGLDGIEKGRSAPDPVRENIYEFTEADREARGIETLPSTLGQAVTALQKDDVVLDALGPHVSEKFTQAKTQEYTEFLASVSQWELDRYLETF

SEQ ID NO: 13959 - protein, 633 aa, Aggregatibacter actinomycetemcomitans
MGKIVGIDLGTTNSCVAVMEGEKPRVIENAEGDRTTPSIIAYTNDNETLVGQPAKRQAVTNPKNTLFAIKRLIGRRFEDEEVKRDIDIMPFAITKADNGDAWVEVKGEKLAPPQISAEVLKKMKKAAEDYLGEPVTEAVITVPAYFNDAQRQATKDAGRIAGLDVKRIINEPTAAALAYGLDKGTGNKTIAVYDLGGGTFDLSIIEIDEVGGEKTFEVLATNGDTHLGGEDFDNRIINYLVDEFKKEQGIDLRNDPLAMQRLKEAAEKAKIELSSAQQTDVNLPYITADATGPKHLNIKLTRAKLESLVEDLVAKSLEPVRIALKDAGKSPSEIDDVILVGGQTRMPLVQQEVEKFFGKAPRKDVNPDEAVAIGAAVQGGVLAGDVKDVLLLDVTPLSLGIETMGGVMTTLIEKNTTIPTKKSQVFSTAEDNQSAVTIHVLQGERKQASANKSLGQFNLEGINPVPRGMPQIEVTFDIDADGIIHVSAKDKGTGKEQQITIKSSSGLSDEEIQQMVRDAEANAESDRKFEELVQARNQADHLIHSTRKQLDEAGDKVPAADRGTIESALSDLEKAAKGEDKAVIEAKIKALAEVAQKLAQTAQPHGDPQQAQSNSKPNDDVVDAEFEEVKDNK

SEQ ID NO: 13960 - protein, 1013 aa, Mycobacterium tuberculosis H37Rv
MLVLHGFWSNSGGMRLWAEDSDLLVKSPSQALRSARPHPFAAPADLIAGIHPGKPATAVLLLPSLRSAPLDSPELIRLAPRPAARTDPMLLAWTVPVVDLDPTAALAAFDQPAPDVRYGASVDYLAELAVFARELVERGRVLPQLRRDTHGAAACWRPVLQGRDVVAMTSLVSAMPPVCRAEVGGHDPHELATSALDAMVDAAVRAALSPMDLLPPRRGRSKRHRAVEAWLTALTCPDGRFDAEPDELDALAEALRPWDDVGIGTVGPARATFRLSEVETENEETPAGSLWRLEFLLQSTQDPSLLVPAEQAWNDDGSLRRWLDRPQELLLTELGRASRIFPELVPALRTACPSGLELDADGAYRFLSGTAAVLDEAGFGVLLPSWWDRRRKLGLVLSAYTPVDGVVGKASKFGREQLVEFRWELAVGDDPLSEEEIAALTETKSPLIRLRGQWVALDTEQMRRGLEFLERKPTGRKTTAEILALAASHPDDVDTPLEVTAVRADGWLGDLLAGAAAASLQPLDPPDGFTATLRPYQQRGLAWLAFLSSLGLGSCLADDMGLGKTVQLLALETLESVQRHQDRGVGPTLLLCPMSLVGNWPQEAARFAPNLRVYAHHGGARLHGEALRDHLERTDLVVSTYTTATRDIDELAEYEWNRVVLDEAQAVKNSLSRAAKAVRRLRAAHRVALTGTPMENRLAELWSIMDFLNPGLLGSSERFRTRYAIPIERHGHTEPAERLRASTRPYILRRLKTDPAIIDDLPEKIEIKQYCQLTTEQASLYQAVVADMMEKIENTEGIERRGNVLAAMAKLKQVCNHPAQLLHDRSPVGRRSGKVIRLEEILEEILAEGDRVLCFTQFTEFAELLVPHLAARFGRAARDIAYLHGGTPRKRRDEMVARFQSGDGPPIFLLSLKAGGTGLNLTAANHVVHLDRWWNPAVENQATDRAFRIGQRRTVQVRKFICTGTLEEKIDEMIEEKKALADLVVTDGEGWLTELSTRDLREVFALSEGAVGE

SEQ ID NO: 13961 - protein, 163 aa, Zea mays
MERSLDSYSSIKDVTYSCGYCGYALNLSSSARDTEGIGPKYRKQIRKGVVAFVAVDESRFTLAHELTCTPYFRSARSWGLFRRRSRLLCRKCGGHIGSAYGKEEDEDASSSSLFGGDGSSDDTRPSSGSGRSSVASSQKSYVVRISALQPSSDDSAVVPFTHR

SEQ ID NO: 13962 - protein, 364 aa, Candida albicans SC5314; identical to SEQ ID NO: 408

SEQ ID NO: 13963 - protein, 134 aa, Vibrio vulnificus
MRSTGLADTVLVGPEPEFFLFDDVKFATDMSGSFFKIDDVEAAWNTGSDYENGNKGHRPGVKGGYFPVAPVDSSQDLRSAMCLVMEEMGLVVEAHHHEVATAGQNEIATRFNTLTTKADEIQIYKYVVHNVAHA

SEQ ID NO: 13964 - protein, 144 aa, Kalanchoe daigremontiana; identical to SEQ ID NO: 411

SEQ ID NO: 13965 - protein, 469 aa, Brachypodium sylvaticum
MATGAFAAAAPHQRLGPLAGGVVDEQQAAGVGILLQISMLVLSFVLGHLLRRRKFYYLPEASASLLIGMIVGAFANISNTQKSTRRWFNFREDFFLLFLLPPIILYPLRKPFFSNFGAIITFAILGTFIASIVTGLLVYYLGGLIYIIYRLPLVECMMFGALVSATDPVTVLSIFQVSAIPLSTIILTFASSIIVELGTDVNLYALVFGESVLNDAVAISLYRTMASMRTNSSGQNFLLVILRFLENFVGSMSSGIGVGLISALISSTLFFLFKYAELGVENLHNLESCLFVLFPYFSYMLAEGLGLSGIVSILFTGIVMKRYTFYNLSEDSQRFTARFFHLLSSLAEAFMAANVFSCAYILNLARPPHSQIPRQYQLALWYSGLRGAMAFALALQSVHDLPEGHGETIFTATTSIVVLTVLLIGGSTGTMLEALQVVGDSNRYRHPYEASAFAVLKSNTNNFVYKIQP

SEQ ID NO: 13966 - protein, 679 aa, Kluyveromyces lactis
MFSARKSSVGWLVSSLAVFYVLLAVIMPIALTGSQSSRVVARAAEDHEDYGTVIGIDLGTTYSCVAVMKNGKTEILANEQGNRITPSYVSFTDDERLIGDAAKNQAASNPKNTIFDIKRLIGLQYNDPTVQRDIKHLPYTVVNKGNKPYVEVTVKGEKKEFTPEEVSGMILGKMKQIAEDYLGKKVTHAVVTVPAYFNDAQRQATKDAGAIAGLNILRIVNEPTAAAIAYGLDKTEDEHQIIVYDLGGGTFDVSLLSIENGVFEVQATAGDTHLGGEDFDYKLVRHFAQLFQKKHDLDVTKNDKAMAKLKREAEKAKRSLSSQTSTRIEIDSFFNGIDFSETLTRAKFEELNLALFKKTLKPVEKVLKDSGLQKEDIDDIVLVGGSTRIPKVQQLLEKFFNGKKASKGINPDEAVAYGAAVQAGVLSGEEGVEDIVLLDVNALTLGIETTGGVMTPLIKRNTAIPTKKSQIFSTAVDNQKAVRIQVYEGERAMVKDNNLLGNFELSDIRAAPRGVPQIEVTFALDANGILTVSATDKDTGKSESITIANDKGRLSQDDIDRMVEEAEKYAAEDAKFKAKSEARNTFENFVHYVKNSVNGELAEIMDEDDKETVLDNVNESLEWLEDNSDVAEAEDFEEKMASFKESVEPILAKASASQGSTSGEGFEDEDDDDYFDDEL

SEQ ID NO: 13967 - protein, 259 aa, Oryza rufipogon
LSYFLLISILGSVLLRFLKPSNPEFRPGYIDMLFLSTSALTLSSLITIEMEVLSSSQIVVITLLMLLGGEVFVSFLGLMLRLNHKHNPEFSGDKVSSVPIELDTINSASTVISCEELQLEAAIPEVPSSTIKDLKRSKRLRWFLGFVVFSYFVVIHVAGFLLVLWYISRVSSAKAPLKKKGINIALFSFSVTVSSFANVGLVPTNENMAIFSKNPGLLLLFIGQILAGNTLYPLFLRLLIWFLGKVTKLRELKLMIKNP

SEQ ID NO: 13968 - protein, 1064 aa, Arabidopsis thaliana
MVKQLQEQEENDPVEKTKSLISALNYLSRDLLLPSHLYASVSSIYHASVSDLSPSPPLRGNSYTPNRGDLMSEFEDALLQQRLNYESGSRLAELKETRYKNRIHNRLSQLEGLPSNRGEDLQEKCLLELYGLKLQELQCRVRGEVSAEYWLRLNCADPERQLYDWGMMRLPRRMYGVGDSFVMEADDQFRNKRDAERLLRLEEEEKNLIETTQRKFFAEVLNAVREFQLQIQASHRRCKQRNDGVQAWHGKQRQRATRAEKLRIMALKSDDQEEYMKLAKESKNEKLTLFLEETNKIFVSLGAAVQRQKDAKLSENTKLLKGSESDLSDVDAPEDVLPAQDIEIIDSDNNDDSNDLLEGERQFNLAIHSIQEKVTKQPSLLQGGELRSYQLEGLQWMVSLYNNDYNGILADEMGLGKTIQTIALIAYLLESKDLHGPHLILAPKAVLPNWENEFALWAPSISAFLYDGSKEKRTEIRARIAGGKFNVLITHYDLIMRDKAFLKKIDWNYMIVDEGHRLKNHECALAKTLGTGYRIKRRLLLTGTPIQNSLQELWSLLNFLLPHIFNSIHNFEEWFNTPFAECGSASLTDEEELLIINRLHHVIRPFLLRRKKSEVEKFLPGKTQVILKCDMSAWQKLYYKQVTDVGRVGLHSGNGKSKSLQNLTMQLRKCCNHPYLFVGADYNMCKKPEIVRASGKFELLDRLLPKLKKAGHRILLFSQMTRLIDLLEIYLSLNDYMYLRLDGSTKTDQRGILLKQFNEPDSPYFMFLLSTRAGGLGLNLQTADTIIIFDSDWNPQMDQQAEDRAHRIGQKKEVRVFVLVSIGSIEEVILERAKQKMGIDAKVIQAGLFNTTSTAQDRREMLEEIMSKGTSSLGEDVPSEREINRLAARTEEEFWMFEQMDEERRKKENYKTRLMEEKEVPEWAYTSETQEDKTNAKNHFGSLTGKRKRKEAVYSDSLSDLQWMKAMESEDEDASKVSQKRKRTDTKTRMSNGSKAEAVLSESDEEKEEEEEERKEESGKESEEENEKPLHSWKTNKKKRSRYPVMTSSPNSRGKGSSKGSKRN

SEQ ID NO: 13969 - protein, 1146 aa, Populus tremula; identical to SEQ ID NO: 7044

SEQ ID NO: 13970 - protein, 280 aa, Nostoc punctiforme PCC 73102
MVESNFKRQLVIIGGAEDKEGDSQILRDFVRRAGGTKAHIVIMTAATELPREVGENYIRVFERLGAENVRIIDTETREDASSSTALEAIHKATGVFFTGGDQARITNILKDTEIDAAIHKRFAEGAVVAGTSAGAAVMPDKMIVEGDSQTHPRIETVEMGPGLGFLPGVVIDQHFSQRGRLGRLISALILEPAVLGFGIDENTAMVVTDNQIEVIGEGAVTIVDESEATYNNMGEILKDESLAICGAKLHILPHGFKFDLKTRQPILNNSSVANVSVPVG

SEQ ID NO: 13971 - protein, 213 aa, Acidovorax sp. JS42
MVQWRRVRAFCPPRHPCTMPRLTLPLLLCATLLGPAAQAADVAATPAVDAQACPALLQHTVPRLQDEAPQALCQYAGKVLLVVNTASYCGFTGQYQGLEELYARYRDQGLVVLGFPSNDFAQETGSNTEIAQFCENTFGVRFPMFAKSHVKGGEALPLYRQLAAASAGQTPRWNFHKYLVSRSGKVVGSYGSSVEPHSKALIQAIEQQLAAPR

SEQ ID NO: 13972 - protein, 1146 aa, Populus tremula; identical to SEQ ID NO: 7047

SEQ ID NO: 13973 - protein, 475 aa, Oryza sativa Japonica Group
MAGSGRPPAAQKKILQSLRPPLPFAASSRSPFAAPNDYHRFPAGGAAAAAASGSGGIGAGGAGGGGDIEEGLVIRTPQKRKAPEESDVAESSDCMITSPGFAVSPMLTPVSGKAVKTSKSKTKNNKAGPQTPTSNVGSPLNPPTPVGTCRYDSSLGLLTKKFINLLKQAPDGILDLNNAAETLEVQKRRIYDITNVLEGIGLIEKTLKNRIRWKGLDDSGVELDNGLSALQAEVENLSLKEQALDERISDMREKLRGLTEDENNQRWLYVTEDDIKGLPCFQNETLIAIKAPHGTTLEVPDPDEAGDYLQRRYRIVLRSTMGPIDVYLVSQFDEKFEDLGGGATPSGHANVPKHQPTEVFNTTNAGVGQCSNSVAVDNNIQHSQTIPQDPSASHDFGGMTRIIPSDIDTDADYWLISEGDVSITDMWKTAPDVQWDESLDTDVFLSEDVRTPSSHNQQPSAVGGPQMQVSDMHKP

SEQ ID NO: 13974 - protein, 1146 aa, Populus tremula; identical to SEQ ID NO: 7049

SEQ ID NO: 13975 - protein, 255 aa, Silene latifolia
EAHSLKVEKILFQGKSKYQDVMVFQSSTYGKVLILDGVIQLTERDECAYQEMISHLPLCSIPNPKKVLVIGGGDGGVLREVARHSSVEHIDICEIDEMVVTVSKEFFPEVAVGYDDPRVNLHIGDGVAFLKAATEGSYDAVIVDSSDPIGPAKELFEKPFFESVAKALRPGGVVCTQAESIWLHMHIIEDIVSNCREIFKGSVNYAWTTVPTYPSGVIGFMVCSTEGPAVDFKNPVNPIDKMEDEKRPLKFYNAE

SEQ ID NO: 13976 - protein, 188 aa, Oryza sativa Indica Group
MADGPGSPGGGGGSHESGSPRGGGGGGGGGGGGGGVREQDRFLPIANISRIMKKAIPANGKIAKDAKETVQECVSEFISFITSEASDKCQREKRKTINGDDLLWAMATLGFEDYIEPLKVYLQKYREMEGDSKLTAKAGDGSVKKDVLGSHGGSSSSAQGMGQQAAYNQGMGYMQPQDIFTGHVVRLV

SEQ ID NO: 13977 - protein, 529 aa, Magnetococcus sp. MC-1
MQNNLEHAPHGDAARSLDLATLVYAVFTAGLCSIIYELLIATTVVYFLGDSVRYFSLTIGLYMASMGAGAYLSKYMQGVLLHKLIVAEIILGLVGGFCVPLLYLAFTYEALFLPLYVVLTLTVGFLIGLEVPLLTRILEGYDSLRVSIAHVLSLDYLGALVATVAFPLLLLPLFGIFRSGLFFGLVNMSIAVLLLWRFGSRLGSHRIKSYRLAAWSITLAIGAGLLFAQVLLQAWNQSVYRDRILHTEHTAYQEVVLTKRRDDLRLYLNGALQFSTSDEFRYHEALVHLPMAYVQAAKARGPLSVLVLGGGDGMAVRELLRYNRIERITLVDLDERVLKLATENPYLRQANAASLSRDERVKIRVGDAMRFLQERAALFDLIVADLPDPSSTETARLYSRAFYRLARSNLAPAGVFVTQATSPFHAREAFWTTHATVADVFAQARPYHLLVPSFGDWGFVMAGGAVLQTPLEQVVKDFPPGLRHLRPAMATGMFMFGKDVEDPGQLGISTLDQPQVLERYRAGWRHWGG

SEQ ID NO: 13978 - protein, 768 aa, Musa acuminata; identical to SEQ ID NO: 7050

SEQ ID NO: 13979 - protein, 1146 aa, Populus tremula; identical to SEQ ID NO: 7051

SEQ ID NO: 13980 - protein, 1146 aa, Populus tremula; identical to SEQ ID NO: 7054

SEQ ID NO: 13981 - protein, 283 aa, Prochlorococcus marinus str. AS9601
MTDITTWIDEYHKGSRFGLNGKILFKKTSKYQEIIVIENEYYGKALMLDGCWMTSLKDEKYYHECLVHPALSSIDEKSNVLIIGGGDGGTVRECVKYSKISKIDLVEIDEEVIKISKKFLKEIAGEAWNDKRLEIHIDDGVKWVEKTKDNFYDVIFIDCSDPSEFSNLLFSHSFYKECERILAPSGILATQSESPESFKNIHINILKSLKNIFKVSETMYSFVPIYPSGIWSWTFASSEDLSLSKQNYDEVVKIEKGCEIWNLNFQNAAFKMMPNKIVKELDS

SEQ ID NO: 13982 - protein, 478 aa, Bacillus cereus ATCC 14579
MKRRVAIIGMVVAFLIGAGGMFAGMSVFGVNPSEVTQTISSGNASTAQGNLAKINEAYALIDSRYVEDVKDEKLVEGAIQGMLSTLKDPYSTYMDKETAKQFSESLDPELEGIGAEVNKTDGKLIIVSPIKGSPAEKIGIKPNDQILSVDGNSVKDLSREEAVLKIRGKKGTTVAIEIKRAGVTDPIVFKIKREKIPIFTVFSSVKQESGKDIGYMQITSFAENTAKEFKDQLKELEKKNIKGLVIDVRGNPGGYLNSVEDILGEIMTNKKPMLQVEQRNGEKKKFSTELKERKPYPISVLIDNGSASASEILAGALKEGEGYDLIGEKTFGKGTVQQAVPFKDGSNIKLTMFKWLTPDGNWIHKKGIAPTVEVKQPNYYHSTPIQIEKTLSYNSNDVQVKHAQEMLKSLGYVPGREDGYFSKETESALKAFQNANEMEATGQLDKKTAEAIQTKIIEKIRSGENDLQLQSALKLMAK

SEQ ID NO: 13983 - protein, 637 aa, Zea mays
MLKEMLNVFEQNDVLVSNGHELPCNFGDHKAGSVWNLIPGVKETMFPHQQDAFEFMWTKLAGGTTIEQLKHTIKSDAGGGCVISHAPGTGKTRLAITFVQSYLEVFPHCSPVIIAPRGMLATWEKEFRKWKVKLPFHVLNSTEINWSEDKTLQEQAAKNGTFHRRLLTDKMDQNYRRLVKLGSWMNGTSIIGLSYSLFRKLANHEGMDGDKVRKLLLEKPNLLVLDEGHTPRNKKSLIWKVLKRVHTEKRIILSGTLFQNNFEELYNTLRLVRPKDADALHLETDESKDFWSSLRLNDITKANINEVRKKLDPIVHIHSGRFLQKSLPGLRESVVILNPLLYQKEVIASMEKTVAMGLDAEYKISLASIHPSLLASAKLSMKEESILDKPKLESLRSNPSGGVKTRFVLEIVRLCEALNERVLVFSQYLEPLSLIMEQLKERFSWAEGEEILLMSGKVLVKKRQTMMEVFNNMKSKAKVMLASTKACCEGITLVGASRVVLLDVVWNPSVGRQAIGRAYRIGQRKIVYTYNLIAEGTTEKRKYDRQAKKEHMSKLLFSNELERGGCNLPPELTFNDRVLEELTAREDLKNLFVKIYVDNQTDGSRVSFIDCFSLPVATDITQCPHQRYMWVAVDSAK

SEQ ID NO: 13984 - protein, 642 aa, Coccidioides immitis RS
MEGIHSNSNMGFHGRMSFRKCSAPRRRKPTNGSGQDAEVSSLDSLAVACAAIESGDPIGSIPGVSLASSPASLPPDSNIAMPTKSLYPTVDIPNVDIWTLLFNRKDRQFPDNKIIYQDAETGRSYTYEQVRSTALEFGTGLKANWEWKKGDVLAVFSPNSIDIPPLTWGTHWAGGVVSPANPAYTADELAFQLKGTKARVLATQMSCLSTAIEAAKRVGIPDDRIILIGDERHPTSKYKHFTTIQNISRSIRYAKTKVDPAKDLAFLVYSSGTTGVPKGVMLSHKNIVTNIHQLKAGEEGNLTWNGGADGSGDRLLAFLPFYHIYGLTCLVHNALFSGLHLVVMAKFDIERWCSHVQNYRITFSYIVPPVVLLLTKHPVVDKYDLSSLRMMNSGAAPLTRELVESTYARIKCGIKQGYGLSETSPTTHTVPWSDWRRRAGSVGKLLPNMEAKYMTSPEDDSEPQEVPVGEVGELYIRGPNVFLGYLDNPAATAACVSPDGWFRTGDVGYQDSEGFFYITDRVKELIKYKGFQVAPAELEGLLTDHEAVSDAAVIGVESAEHGTEVPRAYIVPNPKIIPPGRRTAEEGERISQWLQTRVAPYKRLRGGVRFVDEIPKSASGKILRRLLKEEAKKEEAIVKAKL

SEQ ID NO: 13985 - protein, 307 aa, Oryza sativa
  misc_feature (117)..(117): Xaa can be any naturally occurring amino acid
MEGGGARNGSTTGAARTGGSGGDAAAGGGGGSAGNGKPLPPCCVKARAAAPESEAKCHATVVSGWFTEPRSRGGKTSKVQYYNNPMWPGEAHSLKVEKILYQGKSPYQEVLVFESSXVRLHVGDAVEFLRNAPEGTYDAIIVDSSDPIGPAQELVEKPFFDTIARALRPGGVLCNQAESMWLHTHLIQDMLSICRETFKGSVHYAWTSVPTYPSGVIGFLLCAKEGPPVNFLTPANPIEKLEGAMEAGRDIRFYNSEMHRAAFVLPTFARRELEAYCTTVEREQQEETTAEPLKMNIMPNSEILTAS

SEQ ID NO: 13986 - protein, 1089 aa, Methanosarcina mazei Go1
MIILHAGRVGKQFFLWGESPAENETPVVRRGRKPKTPIVKPYPYDSGFENLSSALELLLGSTDRKKAEKINVWTPTIGGNPVPSSPLVAEISDSKAEPALAPCTVHAYPLEAEEAIVLLCTCMEKKVLAPGIISGNDLLWWADALKFAGSLVAGQKYLPGVRGGEGEYRAFWEPVFSGEDAGKLAKLAKQMPPAARALAPEASSMPPEMPAALAAKQFIEDSLDWIVRSEIGEKKLAKETRKRKSFDSVHDAWVSALRSPEGLIYGDENELLQLAARTREWQRPLTILTTSPFRFCFRLEEPALEEEIEETEETEEIEENEAGKRDTKKGREGIADIEVPEGLWYVRYMLQSYEDPSLLIPVKEAWKPKKGSPLKKYDVKNIRQFLLSSLGQASSISAGIASSLEAPNPSGYSLDTKEAYRFLTESAANLSQAGFGVLLPGWWTRKGTKTHLKAQANVKGKKKLQAGYGLTLDEIVSFDWEIALGDRVLTVRELQALAKLKAPLVKFRGQWVEVNDAEIRAALEFWKKNPNGEASLREVLKLAVGVSEKADGVNVEGLNATGWIGELISRLKDKTGFEELPAPNGFSGTLRPYQFRGYSWLAFLRQWGIGACLADDMGLGKTVQTLALIQHDLEQAKEKAEEKIEEPAEEKIEEKVDGRKAPKPVLLVCPTSVINNWKKEASRFTPELSVMVHHGTSRKKEEEFKKEAMNHAIVISSYGLVQRDLKFLKEVHWAGVVLDEAQNIKNPETKQAKAARALESDYRLALTGTPVENNVGDLWSIMEFLNPGFLGSQAGFKRNFFIPIQAERDQEAARRLKEITGPFILRRLKTDTSIISDLPEKMEMKTYCTLTKEQASLYAAVLEDIREAIEGAEEGIQRKGIILSALSRLKQVCNHPAQFLKDNSTIPGRSGKLARLTEMLDVVLENGEKALVFTQFAEMGKMVKEHLQASFGCEVLFLHGGVPRKQRDRMLERFQEGKEYLPIFVLSLKAGGTGLNLTGANHVFHFDRWWNPAVENQATDRAFRIGQKKNVEVHKFICAGTLEEKIDEIIERKVQVAENVVGTGEDWLTELSNDELKDILALREEAVGE

SEQ ID NO: 13987 - protein, 645 aa, Ipomoea nil
MEKAFIPFILSLILLFPDLSYGAPRAQQVKLICETELEHNTTAFVPNFVGVMEKISDKMRTQGWGTSVLGSGPDENFGLAQCYGDLSLLDCVLCYAEARTVLPQCFPFNGGRIYLDGCFMRAENYTFFDEYLGPGDTRVCGNSTRKDPSFQQTARRAVMQAVSTAVNNNGSSRSQLSVPGRQNESAYVLADCWNTLNDSACRACLQNASASMLGCLPWSEGRALYTGCFMRYSDTNFLNPIPSNDSSSRVSVAVIVVAAVSSVIVLIVGVVIALYFLKQRRIEKKRKGPNDAEKLVKILHDSSLNFKYSTLEKATGCFDEANKLGQGGFGTVYKGVLPDGREIAVKRLFFNNKHRAADFYNEVNIISSVEHKNLVRLLGCSCSGPESLLVYEYMHNQSLDQFIFDPNKGKALNWERRFEIIIGTAEGLVYLHENSRNRIIHRDIKASNILLDSRLRAKIADFGLARSFQEDKSHISTAIAGTLGYMAPEYLAHGQLSEKADVYSFGVVLLEIVSGRQNNRSKATEYTDSLVNIAWMHFQQGTVNELFDPNLMLHNYHNINVKNEVLRVVHIGLLCTQEASSLRPSMSKALQMLVKKEELPAPTNPPFVDEKTMELNDGWDNQSFPLRGSESASVASVSHSSFYPR

SEQ ID NO: 13988 - protein, 338 aa, Microcoleus chthonoplastes PCC 7420
MGSRPFQSTSGLPCAKVIKLVAIVLMCLSLWVAPASAKVIRYFDGNSTDVNVPAGIAFDLGGGGADVDEAIQWMINQARGCTDCSAQVDVVVIRSSGSAGYNEPILAMNGVDSVETLVIGSRDDANSPDVADTIRQAEVLFFAGGDQCDYTRNFNHTAIEDAIKSVGAKGGGIGGTSAGAMIQSEFIYNACSDAVDSEYALDDPYEDILFSYDLFNWSLMKGTVIDTHFSDRDRMGRLMTFMARQLRDGITDSVLGIGIDEGTSLVVNRDGIAQVMGEGAVYFVFADHIPEECEPQTPLTFSDYKIWKRENGEEFDLKHLPSRGYRRASVQDGIVQRG

SEQ ID NO: 13989 - protein, 624 aa, Leifsonia xyli subsp. xyli str. CTCB07
MSRAVGIDLGTTNSVVSVLEGGEPTVIANAEGFRTTPSVVAFTKDGEVLVGETAKRQAVTNVDRTLSSVKRHMGTDWKTQEIDGKKYTAQEISARILQKLKRDAEQYLGDTVTDAVITVPAYFNDAERQATKEAGEIAGLNVLRIINEPTAAALAYGLDKGKEDELILVFDLGGGTFDVSLLEVGKDDDFSTIQVRATAGDNRLGGDDWDQRIVEWLIKRFKESTGVDASTDKIAKQRLKEAAEQAKKELSSSMSTSIQLPYLSLTENGPANLDETLTRAQFEQMTSDLLDRTKKPFKDVIKEAGIEVSDIAHVVLVGGSTRMPAVSELVKQETGGQEPNKGVNPDEVVAVGAALQAGVLKGERKDVLLIDVTPLSLGIETKGGIMTKLIERNTAIPTKRSETFTTADDNQPSVAIQVFQGEREFTRDNKPLGTFELTGIAPAPRGIPQVEVTFDIDANGIVHVSAKDKGTGKEQSMTITGGSSLPKDDIERMVREAEEHAAEDKKRRESAETRNQAEQLVYSIEKLIKDNEEKLPEDIKNEVQGDVDALKAALAGEDDEAVKTAYDKLNESQQKLGQAIYSAAQAAEAPAAAAGEEASAPSSSTGEEDVIDAEVVEDEEKKQQ

SEQ ID NO: 13990 - protein, 594 aa, Gluconobacter oxydans 621H
MRHAVRPMIHFMPRSREAACRPALCLAFCMFILIAPTGPAKAQTPADTAGTAGQAAPAISAASPVPQPALSVSLTREVLVAALGFLEPRTLEAHSARDFCLWGLDGLTAIDPTLSVTETRPEVSGPAPSPGGAMAAEKTSGDASAQGPTILNVLQGQTVVFSRIMPASDSNGAWADLVTAAMQAAWQHSATLREAGSDALLQGFFDELFNHLDPYSRYLGPSPASSDRTRRTGNTGTVGLSLGQSGRMIMITAVNANGPAWEAGVDTGERLVSVNGRSTRGQDVTTVQGWLEGDEHTSVTLGIAAKGHRTTTLRLERTQVPPETVFASTDGPFTVLRVTSFSTQTAEEISQYIDQVVDEPTPDTPAPSASKNKTAGIILDLRGDRGGVLQQAVTTAALLLDHGVAVTTHGRNPLANHIWAVQGGDMTNGTPVVILVDGRTASAAEILASALADHRRAVVIGSETLGKGLVQVIGQMPNGGELFVTWSRNQAPLGWPIQGLGVMPQVCTSLGAESLQAQLSALKQGNTLQGEAVQMARAARYPVPVTKILDIRKHCPAAIGSDADMDAARVLLSSPAAYRAALESVPDENSAPIH

SEQ ID NO: 13991 - protein, 156 aa, Brassica napus
IWKVLTEVKTEKRIILSGTPFQNNFKELSNVLCLTRPAYADKISSRLQDLTRLSQEGKNGRFDEEVGISELKDMIAPFVHVHKGNILRESLPGLRDCVVMLNPPFQQEKILKRIDHSQNTFELEHKLSAVSVHPSLYMCCKQTNKERLTIGPVALK

SEQ ID NO: 13992 - protein, 609 aa, Staphylococcus epidermidis ATCC 12228
MGKVIGIDLGTTNSCVSILEGDEPKVIQNPEGARTTPSVVAFKNGETQVGEVAKRQAITNPNTVQSIKRHMGTDYKVDIEGKSYTPQELSAMILQNLKSTAENYLGDTVDKAVITVPAYFNDGERQATKDAGKIAGLEVERIINEPTAAALAYGLDKTETDQKVLVFDLGGGTFDVSILELGDGVFEVLSTAGDNKLGGDDFDQVIIDYLVSEFKKENGVDLSQDKMALQRLKDAAEKAKKDLSGVSQTQISLPFISAGENGPLHLEISLTRSKFEELADSLIKKTMEPTRQALKDAGLSTSEIDEVILVGGSTRIPAVQEAVKKEIGKEPHKGVNPDEVVAMGAAIQAGVITGDVKDVVLLDVTPLSLGIEIMGGRMNTLIERNTTIPTSKSQVYSTAADNQPAVDIHVLQGERPMASDNKTLGRFQLTDIPPAPRGVPQIEVTFDIDKNGIVNVTAKDLGTNKEQNITIQSSSSLSDEEIDRMVKDAEENAEADKKRREEVDLRNEADSLVFQVEKTVKDLGENISDEDKKNAEEKKDALKTALEGEDIDDIKAKKEELEKVIQELSAKVYEQAQQAQQQAQEEQGSQDSTVEDADFKEVKDDEDKK

SEQ ID NO: 13993 - protein, 160 aa, Acinetobacter sp. ADP1
MTNLYQFEAELLEGDTKSLADYQGKVLLIVNTASKCGFTPQFAGLEKIYEKYKDRGFEVLGFPCNQFGGQDPGSNNEIGAFCQRNYGVSFPMFAKVDVKGPEAHAIFRYLTREAKGILGSENIKWNFTKFLVGRDGKVLNRYAPTTKPESLEEDIEKALA

SEQ ID NO: 13994 - protein, 545 aa, Zea mays
MSMGYQVVAAQLKVASSADHASVVIITLFVALLCACIVLGHLLEENRWLNESITALIIGLCTGGVILMTTKGKSSHVLVFSEVLFFIYLLPPIIFIAGFQVKKKQFFRNFMTITLFGAVGTMISFFTISLGAIAIFSRMNIGTLDVGDFLAIGAIFSATDSVCTLQVLHQDETPFLYSLVFGEGVVNDATSVVLFNAVQKIQITHINAEVALQVFGNFLYLFSTSTLLGIATGLITSFVLKKLYFARHSTTRELAIMMLMAYLSYMLAELFSLSGILTVFFCGVLMSHVTWHNVTESSRITSRHVFAMLSFIAETFIFLYVGTDALDFDKWKTSSLSFGGTLGVSALIMALVLLGRAAFVFPLSVLTNFSNKHENESITFKHQVIIWWAGLMRGAVSIALAFKQFTYSGVTLDPVNAAMVTNTTIVVLFTTLVFGLLTKPLIRLLMPHRHLTMLSDDSTPKSLHSPLLTSQLGSDLEEPTNIPRPSSIRGEFLTMTRTVHRYWRKFDDAFMRPMFGGRGFVPVVPGSPIERSVPQWSEEAHNKEP

SEQ ID NO: 13995 - protein, 675 aa, Chlorobium tepidum TLS
MAAVGQAAQPALLKPTPNQEEAARYIAQYLLQNHYRKVPVNDSLSQQIFKRYLDNLDNNRSYFTAPEVEKLRQEFGAHLADDFVSGNPADGFAIYNQFLKRAREKMAYMKNALEKTTFNFSSPETLELERSKTAPWPANEAELHDLWRKELKYQYLSAKYSGEKGKNIKSEVMKTLDNRLKIFNQQKPEDAFQAYMYAVTTSFDPHTDYFSPDEYENFQIDMSRSLEGIGAKLQMENEYTVVNEIIPGGPAFKSKLLKKGDKIVGVGQGDKGEIIDVIGWRINDVVKKIRGPKGTVVRLKVLPASQAGKGPAKIIRLVRAKVDLQEQAAQKKIIYDNGHKIGVIVLPSFYLDFEGERQQKHNYASTTKDVARIINELKQENVEGIIVDLRENGGGSLEEAVNVTGLFTGRGPVVQVSNALGGKMVLNDENYPMLYRGPLVVLVNRYSASASEIFAAAIQDYGRGLIVGDRTFGKGTVQSIVTIQRPFSMFMKQADLGQLKLTIAKFYRISGGSTQHIGVLPDIVLPSLIDPEVVGEDTYTSSLPWTTISRAAYTPLGFVTKEDIVLLKKEFAEQSAKDKLYQSYLADLATLNRIRQKKSVSLQEKGFQVENKTLKEIQDRWGDQNADTGKKKKTDFILQEAARILDDLVALKSRPAVPAAAPLARPAVRRAVPVK

SEQ ID NO: 13996 - protein, 1146 aa, Populus tremula; identical to SEQ ID NO: 7077

SEQ ID NO: 13997 - protein, 662 aa, Neurospora crassa
MEHRTRSWALGLSILGFFALLFSAGFVQQAHANDTEAMGTVIGIDLGTTYSCVGVMQKGKVEILVNDQGNRITPSYVAFTDEERLVGDAAKNQAAANPHRTIFDIKRLIGRKFSDKDVQNDIKHFPNKVVSKDDKPVVKVEVKGEEKTFTPEEISAMILGKMKETAEGYLGKKVTHAVVTVPAYFNDNQRQATKDAGMIAGLNVLRIVNEPTAAAIAYGLDKTGEERQIIVYDLGGGTFDVSLLSIEQGVFEVLSTAGDTHLGGEDFDQRIINHFAKLFNKKHGVDVTKDAKAMGKLKREAEKAKRTLSSQMSTRIEIEAFYDGKDFSETLTRAKFEELNNDLFKKTLKPVEQVLKDAKVSKSEIDDIVLVGGSTRIPKVQALIEEFFNGKKASKGINPDEAVAFGAAVQAGVLSGEEGTEDIVLMDVNPLTLGIETTGGVMTKLIPRNTPIPTRKSQIFSTAADNQPVVLIQVYEGERSMTKDNNLLGKFELTGIPPAPRGVPQIEVSFELDANGILKVSAHDKGNGKAESITITNEKGRLTQEEIDRMVAEAEKYAEEDKATRERIEARNGLENYAFSLKNQVNDEDGLGGKIDEEDKETILDAVKEAQDWLEENDAATASAEDFDEQKEKLSNVAYPITSKLYSQGGAGDDEPAGHDEL

SEQ ID NO: 13998 - protein, 1146 aa, Populus tremula; identical to SEQ ID NO: 7080

SEQ ID NO: 13999 - protein, 1353 aa, Yarrowia lipolytica CLIB122
MEAISLLSSDEESDGESFNKHLQNLSSGGGLKRPFEQASPVPVQAKPDNGLNAYRDSLKTMGTNTSFSASSIPGAFPQASSSQNDPKRHKVAEEITLSSDSGDDDIVETTPAPTQLSQTTGVTMSSKNAKLEELYRQAEAQFYANQQVGVRERSVGLSAIKARQTLKDRLAIAEQKSREAQERLRAINRNFDIDHDTRIAMAQKADQNARLLWSEKGARSQALRERTLLMLQFFAEPDKYVQHVMQILLQASGITVNQHNQNQQQRMQQPQPAHVLPYQRNPSSHRPRAHFDVDMVNDGIELVGGFPNGPRTAPSLFSRGAIELDSDDEEAYSASAGMDADEAESIRNLLESATSGLGTDVNDSAFDDVENMTPETMHSKLLPHQSLGVKWMLDAEKNQQKRGGLLGDGMGLGKTVQAIALWANKPTEDPEEHDHVPRHAKCTLIIAPVGLLHMWSNEFDTHMKPDHRPRTLLYHGPSTKKQYNTWEKLSEFDVVLVSFQTLVTEHKKMFFSSGLKVTENIRGPDGRMHRHRRAMRPEEFQSVSSPFYEGDAYFYRIIIDEAHSIKNRNTASAKACYKLDAVYRWCLTGTPMQNTVEDLQSLVKFLRIKPYDKEKSFNHHIASGIKKAAISGKAVRDDSMKRLQSLLAMIMLRRGKDSKINGAPILNLPPKTVETDAIDFSEDERKFYQDLETGAQRRVSKLMRQGGIGKHYQNVLVLLLRLRQACCHYQLVRAAEDGAEQQELTRDELSFVIEGCKAFAPNTVLRVATLFKQMQDADDLRRQTEGDDEEGTAGAKIEEIIPGVTRTSAKAEKVDPMVEDELNTMFGVVNDTVKDVKAKQEERDMSKFVVNDDSDLSSLDIIDEPSPDTSAASSINGRDAVKAEAVPVIPNGGSEADTASNGGINYKEEFPITNGTVTSVKGEDVEPDVSLETPEPSIQAPRRRTYNNAVESDDDKDDSPVGSRRATRSRAVKIGNAAEDSDGEGEWLDSDDATCSEEEDPRDRKGKGKARNQRVDRLKRLRERKFGFPLETCDESETPGDAYDDAQIAREEKRLAEGFECPICTDTVPQSQVRLFSTCGHSICHECSVSYFSSVVTPLCMTCREPISQSTMVPLRVFQKMHLEKKSPREVTREIQSEQARQKKHREAEKQKIEEEDEKLPPSAKALRCVELLEKIKEENPGEKTIIFSQFVSFMNLIGDELDNAGFEYLRYEGSMHADERSRAVTAFREDPSISVLLISLKAGNVGLTLTAANHVIIMDPFWNPYVEEQAMDRAHRIGQQRDVTVHKIVIEQTVEDRILELQKRKREMIESALDPSGQRQMARLSREELLFLFNMRPNPNTVAEAAAEAAAA

SEQ ID NO: 14000 - protein, 345 aa, Hypocrea jecorina; identical to SEQ ID NO: 445

SEQ ID NO: 14001 - protein, 602 aa, Zea mays
MEAGGAGSGLNGAVQAKGTGADDGSAKRLPPCCVKARAAAPESEARCHATVVSGWFTEPRSRCGKASKVQYYNNPMWPGEANSLKVEKILYQGKSPYQEVLVFESSTYGKVLVLDGIVQLTDKDECAYQEMITHLPLCSIPSPKKVLVIGGGDGGVLREVSRHSSVESIDICEIDQLVIDVCKDFFPHLSVGFQDPRVQLHVGDAVEFLRNAPEGTYDAIIVDSSDPIGPAQELVEKPFFETIARALRPGGVLCNQAEKRRISIFGRCGLIGSRLPHPSLQWQFLFFSSPLPSFSMATSDDEAAFLQQIAAMIKTAQDAEQQAAAARARVQAAAAVLEKERATAAALEEQAVTAAKQMTPPPYTGAFSSPTLEPSGSYEATVIANLHLQAAGVQNIRSLVPVTLEPSSTNFATWHGHLLLTLKRYALTDHVLADSYFPNDPTWDRMDSIVLSWIFGTVSIELQERHGTARQAWLALENHFIGNRETRALHLDATFRNFVQGDLTVGEYCRKMKGFADALRPRRPRLRPHSGAQCPSGPEPQGLCLLTLRPAPCTPPLQLHRLHHQPVLLPRELAHLPRVDPPLAPDSSTVHQLRRSPIWQHQ

SEQ ID NO: 14002 - protein, 1146 aa, Populus tremula; identical to SEQ ID NO: 7083

SEQ ID NO: 14003 - protein, 1146 aa, Populus tremula; identical to SEQ ID NO: 7085

SEQ ID NO: 14004 - protein, 682 aa, Escherichia coli str. K12 substr. W3110
MNMFFRLTALAGLLAIAGQTFAVEDITRADQIPVLKEETQHATVSERVTSRFTRSHYRQFDLDQAFSAKIFDRYLNLLDYSHNVLLASDVEQFAKKKTELGDELRSGKLDVFYDLYNLAQKRRFERYQYALSVLEKPMDFTGNDTYNLDRSKAPWPKNEAELNALWDSKVKFDELSLKLTGKTDKEIRETLTRRYKFAIRRLAQTNSEDVFSLAMTAFAREIDPHTNYLSPRNTEQFNTEMSLSLEGIGAVLQMDDDYTVINSMVAGGPAAKSKAISVGDKIVGVGQTGKPMVDVIGWRLDDVVALIKGPKGSKVRQEILPAGKGTKTRTVTLTRERIRLEDRAVKMSVKTVGKEKVGVLDIPGFYVGLTDDVKVQLQKLEKQNVSSVIIDLRSNGGGALTEAVSLSGLFIPAGPIVQVRDNNGKVREDSDTDGQVFYKGPLVVLVDRFSASASEIFAAAMQDYGRALVVGEPTFGKGTVQQYRSLNRIYDQMLRPEWPALGSVQYTIQKFYRVNGGSTQRKGVTPDIIMPTGNEETETGEKFEDNALPWDSIDAATYVKSGDLTAFEPELLKEHNARIAKDPEFQNIMKDIARFNAMKDKRNIVSLNYAVREKENNEDDATRLARLNERFKREGKPELKKLDDLPKDYQEPDPYLDETVNIALDLAKLEKARPAEQPAPVK

SEQ ID NO: 14005 - protein, 521 aa, Microcystis aeruginosa PCC 7806
MSLESTANEAIAHNLEQFLLVLTISLSVATLSRTVAFLRKIPYTLLLVIVGMGLAFLDLRLVNLSPELILEIFLPPLLFEAAWNIPWAKLKEYWVTIVLFAVIGVIISVLGVAYPLHIFANLPLSIAFLLGAALAATDPVSVIALFKELGASKKLTILMEGESLFNDGVAVVAFVLLVGIPLGVDTFSVPVTIARFCTFVGIGIGVGCVIGFGISYLTQRFDLPFVEQSLTLVSAYGTYLVTEKLGGSGVIGVVIVGIILGNLGSRIGMSPRTRLVVSEFWEFIAFFVNSIIFLLIGDQTRFESLGSHLTGILIAIAAMVVSRLFSIFGLGGISNLITGNKINFKERTVLWWGGLRGSVSIALALSVPTSIPYRQEIIDVVFGVVLFTLLVQGLSIQWLLNALNLIGDQPIRTEYSALIARQIALTRVANYLQQPERFPDIDPEFYRDKKTLVEGQLKSLEDQLQKLLQEHPQLKDVVAEQFQDTLLDIEANTYAELIRAGRLNENLVPLLVEVEEEKEMV

SEQ ID NO: 14006 - protein, 680 aa, Escherichia coli str. K12 substr. W3110
MFFRLTALAGLLAIAGQTFAVEDITRADQIPVLKEETQHATVSERVTSRFTRSHYRQFDLDQAFSAKIFDRYLNLLDYSHNVLLASDVEQFAKKKTELGDELRSGKLDVFYDLYNLAQKRRFERYQYALSVLEKPMDFTGNDTYNLDRSKAPWPKNEAELNALWDSKVKFDELSLKLTGKTDKEIRETLTRRYKFAIRRLAQTNSEDVFSLAMTAFAREIDPHTNYLSPRNTEQFNTEMSLSLEGIGAVLQMDDDYTVINSMVAGGPAAKSKAISVGDKIVGVGQTGKPMVDVIGWRLDDVVALIKGPKGSKVRQEILPAGKGTKTRTVTLTRERIRLEDRAVKMSVKTVGKEKVGVLDIPGFYVGLTDDVKVQLQKLEKQNVSSVIIDLRSNGGGALTEAVSLSGLFIPAGPIVQVRDNNGKVREDSDTDGQVFYKGPLVVLVDRFSASASEIFAAAMQDYGRALVVGEPTFGKGTVQQYRSLNRIYDQMLRPEWPALGSVQYTIQKFYRVNGGSTQRKGVTPDIIMPTGNEETETGEKFEDNALPWDSIDAATYVKSGDLTAFEPELLKEHNARIAKDPEFQNIMKDIARFNAMKDKRNIVSLNYAVREKENNEDDATRLARLNERFKREGKPELKKLDDLPKDYQEPDPYLDETVNIALDLAKLEKARPAEQPAPVK

SEQ ID NO: 14007 - protein, 471 aa, Burkholderia cenocepacia J2315
MSKTVADVMQLVKDEDVKFVDFRFTDTRGKEQHVSVPVSAFDEDKFESGHAFDGSSIAGWKGIEASDMLLMPDPNAAFIDPFYEESTLVLTCDVVEPADGKGYERDPRSLAKRAEAYLKSTGIGDTAYFGPEPEFFIFDSVQWNTDMSGCFVKINSEEAPWSAGKEFEGGNTGHRPGTKGGYFPVAPVDTFQDMRSEMCLLLEQLGIPVEVHHHEVAGQGQNEIGTKFSTLVERADWTQWSKYIIHNVAHSYGKTATFMPKPVVGDNGSGMHVHQSIWKDGQNLFAGNGYAGLSELALFYIGGIIKHARALNAITNPTTNSYKRLVPHFEAPVKLAYSARNRSASIRIPHVSNPKGRRIETRFPDPMANPYLLFSALMMAGLDGIQNKIHPGEAADKNLYDLPPEEDAKIPTVCAGLDQALEALDKDREFLTRGGVFTDSMLDAYLALKEQELAKFRMTTHPIEFEMYYSL

SEQ ID NO: 14008 - protein, 1146 aa, Populus tremula; identical to SEQ ID NO: 7088

SEQ ID NO: 14009 - protein, 590 aa, Leptospira interrogans serovar Copenhageni str. Fiocruz L1-130
MAIFILFCEPTSGKSPVKADFTLKDFDNVVSHVSRYYIDKNIDKNRAYREAAIYALLSLPHSIYLYPESYFKERDKYEEKDEIFPGKTFKISTDDSFILFDPDYAEVEKIRDRKLKEDANKSKVSDEEVKKIVEREKIRKNVLASKWERTGFNKKDFDRVLAFIETNLDKYKDSPLKDPFGESEEKSKEPFTMNDVILAAANGYLSSLDPHSNVFLRSAWEESMAKIQDGSFEGIGAILSGGGNKEVVVENPLEGRPAVNAGIRSGDVILAVDGKSIKGILLDKVVEKIKGKKGSKVALTIQRKGVPGTLHIEVVRDTIEIKNLSSKLIEGHEHIGYIKLTGFVKSEEGPSVDREIIEKYKELDKEAQAKGTRLKALILDLRNNAGGYLDLAIDIADMFIEKGLIVSTKSPNRSPEDAYAKNKDITNLPLAVLINAKSASASEIVASAIKHHGRGILLGERTFGKATVQKLMPLGNDYLIKLTQARYYSPSGNTIQVVGVKPDIDISSEEDGSFPFRFREENMWNHLSELPPEAEEKSSFDVKKLEAWVQKNGKASDFIASHKNDPIKPDYQLIRSLDYIEALLSTQKKK

SEQ ID NO: 14010 - protein, 622 aa, Mycobacterium smegmatis str. MC2 155
MARAVGIDLGTTNSVVAVLEGGDPVVVANSEGSRTTPSVVAFARNGEVLVGQPAKNQAVTNVDRTIRSVKRHVGTDWNIEIDDKKYTPQEISARVLMKLKRDAESYLGEDITDAVITVPAYFNDAQRQATKEAGQIAGLNVLRIVNEPTAAALAYGLDKGEKEQTILVFDLGGGTFDVSLLEIGDGVVEVRATSGDNHLGGDDWDDRIVTWLVDKFKGSSGIDLTKDKMAMQRLREAAEKAKIELSSSQSTSINLPYITVDADKNPLFLDEQLTRAEFQRITQDLLDRTRQPFQQVIKDAGISVSDIDHVVLVGGSTRMPAVTDLVKELTGGKEPNKGVNPDEVVAVGAALQAGVLKGEVKDVLLLDVTPLSLGIETKGGVMTKLIERNTTIPTKRSETFTTADDNQPSVQIQVYQGEREIASHNKLLGSFELTGIPPAPRGVPQIEVTFDIDANGIVHVTAKDKGTGKENTIKIQEGSGLSKEEIDRMIKDAEAHAEEDRKRREEADVRNQAESLVYQTEKFVAEQRGAASDGGGSKVPEETLAKVDSAIADAKKALEGTDISAIKSAMEKLGVESQALGQAIYEATQAEQPAGGSDNGAPGDDNVVDAEVVDDDAGKENK

SEQ ID NO: 14011 - protein, 623 aa, Mycobacterium avium 104
MARAVGIDLGTTNSVVAVLEGGDPVVVANSEGSRTTPSIVAFARNGEVLVGQPAKNQAVTNVDRTIRSVKRHMGTDWSIEIDGKKYTAQEISARVLMKLKRDAEAYLGEDITDAVITVPAYFNDAQRQATKEAGQIAGLNVLRIVNEPTAAALAYGLDKGEKEQTILVFDLGGGTFDVSLLEIGEGVVEVRATSGDNHLGGDDWDDRIVNWLVDKFKGTSGIDLTKDKMAMQRLREAAEKAKIELSSSQSTSINLPYITVDADKNPLFLDEQLTRAEFQRITQDLLDRTRQPFKSVIADAGISVSDIDHVVLVGGSTRMPAVTDLVKELTGGKEPNKGVNPDEVVAVGAALQAGVLKGEVKDVLLLDVTPLSLGIETKGGVMTKLIERNTTIPTKRSETFTTADDNQPSVQIQVYQGEREIAAHNKLLGSFELTGIPPAPRGVPQIEVTFDIDANGIVHVTAKDKGTGKENTIKIQEGSGLSKEEIDRMIKDAEAHAEEDRKRREEADVRNQAESLVYQTEKFVKDQREAEGGSKVPEETLSKVDAAIADAKTALGGTDITAIKSAMEKLGQESQALGQAIYEATQAESAQAGGPDGAAAGGGSGSADDVVDAEVVDDDRESK

SEQ ID NO: 14012 - protein, 187 aa, Cryptomeria japonica; identical to SEQ ID NO: 7093

SEQ ID NO: 14013 - protein, 668 aa, Arabidopsis thaliana
MARSFGANSTVVLAIIFFGCLFAFSTAKEEATKLGSVIGIDLGTTYSCVGVYKNGHVEIIANDQGNRITPSWVGFTDSERLIGEAAKNQAAVNPERTVFDVKRLIGRKFEDKEVQKDRKLVPYQIVNKDGKPYIQVKIKDGETKVFSPEEISAMILTKMKETAEAYLGKKIKDAVVTVPAYFNDAQRQATKDAGVIAGLNVARIINEPTAAAIAYGLDKKGGEKNILVFDLGGGTFDVSVLTIDNGVFEVLSTNGDTHLGGEDFDHRIMEYFIKLIKKKHQKDISKDNKALGKLRRECERAKRALSSQHQVRVEIESLFDGVDLSEPLTRARFEELNNDLFRKTMGPVKKAMDDAGLQKSQIDEIVLVGGSTRIPKVQQLLKDFFEGKEPNKGVNPDEAVAYGAAVQGGILSGEGGDETKDILLLDVAPLTLGIETVGGVMTKLIPRNTVIPTKKSQVFTTYQDQQTTVSIQVFEGERSLTKDCSLLGKFDLTGVPPAPRGTPQIEVTFEVDANGILNVKAEDKASGKSEKITITNEKGRLSQEEIDRMVKEAEEFAEEDKKVKEKIDARNALETYVYNMKNQVSDKDKLADKLEGDEKEKIEAATKEALEWLDENQNSEKEEYDEKLKEVEAVCNPIITAVYQRSGGAPGAGGESSTEEEDESHDEL

SEQ ID NO: 14014 - protein, 1904 aa, Vitis vinifera
  misc_feature (460)..(460): Xaa can be any naturally occurring amino acid
  misc_feature (1891)..(1891): Xaa can be any naturally occurring amino acid
  misc_feature (1900)..(1900): Xaa can be any naturally occurring amino acid
MDTCVQGSNKTSFPFASSRKRKSRSRRSGPNSVAETLARWKQYNDILDSVRKAPAKGSKKGCMKGKGGPENSICGYRGVRQRTWGKWVAEIREPNRGSRLWLGTFPTAIEAALAYDEAARAMYGSSARLNLPNYTTSLKGFFFGSNYIVCAYEDSKKPVLPSIKHESGEGESGISGGMLSAVVKAEPATPVSLVTQGGGNDPVNVGNEPVDAMKLQHEENGHSLDAMYFKNEDGGQDFLEGFPMDEMFDVDEFLRAIDSDPLASYGTRQELGHDSGQVGSFETDNMQWEKPTDLSYQLQNPDAKLLGSLNHMEQVPSDFDYCYGFLQPGKQLDPCIGLNDQGLLDLELSDMGPVSPTNSVNSCESGKNGRNDKRKRKPRFSRQFNRFLRLTHSAHSLSHFGTLTSHTSRSLSLLLFNTFREAQLHLENRFCGATVRNRTVVDDPLRHTEAFVLDFPGSGXRTNRRPALPESGFAFAVFRLCEIILGNIKPIFSELPEATSSNLKNINASVLQVYHLIPFAAVNIEEIELTLETICGRGIYVKTSIHFMHTAFYFGSWQAIELMRIEDGTVALHLAESEYVIEEKSPIPNLRIRPRKATLSDCTCFLRPGTEITVLWTLQQSESSDEENREPVWIDAKISSIERRPHEPECSCQFFVNFYITQDPLGTEKGTLSKDISVVELDQISILQKLGKYPCEDEHYRWKFSEDCSLLQRTKLFLGKFSSDLSWLVVTSVLKQAVFDVRSVQNRIVYQIVGGDHDKVSLNAVNFRVDNGISTPVIFPFVPADTIEADPLNGTNEAGPLPFCDIVDLRRSKRRNVQPDRFFSLGGFSESDIGSVRAGIHKVDYWRKEEMPLALPDEGDVHSIFSEKHIIDYEKGAHSLQIDSYEDFLVCKSKDRSREVKPILAAQNEDQHQFAIVPVPLIIEPIAHGEDHLHDETPWNESGEIGEISPKYYCTNGVPKLQRKNMSDLYMEVESRWEGKGPIRKLRRKRGFTIRTKTESYGEVRPHKKRPFSEPGYKEVIEAYMKNIESTINKEQPLVIDQWKELQVRNDLNQRRDCNSPSSVGDQEESSETEMLWREMEFSIASSYLLEENEVRVMIEKIVGIEFLLAPLNRIISFCVPWRQVFPSCLPWLVNIRLGSNVEVLKEVVQESSNISEQVCQHEYILDEEIGVLCQLCGFVSTEIKDVSPPFVHIPADSAHNFMLQLYFQPTGWITNREWRDEENSKRKQAENDGFNLFSIPASSDTPLSEGNDNVWALVPDLRKKLRLHQKKAFEFLWKNIAGSMVPALMEQEVKRRGGCVISHSPGAGKTFLVISFLVSYLKLFPGKRPLVLAPKTTLYTWYKEIIKWKVPVPVYQIHGCRTYRYEIYKHKVETSPGIPRPNQDVMHVLDCLEKIQKWHAHPSILLMGYTSFLSLMREDSKFIHRRYMGEVLRQSPGILVLDEGHNPRSTGSRLRKALMKVKTNLRILLSGTLFQNNFSEYFNTLCLARPKFVNEVLRELDPKFKRNKNRRKRRYSSTESRARKFFTDEIAKRINSNVPEEQIEGLNMLRNLTSKFIDVYEGGSSDNLPGLQVYTLLMKSTTIQQQFLSKLQKKKDEYKGYPLELELLVTLGSIHPWLITTAACADKYFSREELLELKKHKDDVKKGSKVKFVLSLVNRCIIRKEKILIFCHNISPINLFVDIFDKLYKWKKGEDVLVLQGDLELFERGRVMDQFEEPGGASKVLLASITACAEGISLTAASRVILLDTEWNPSKQKQAVARAFRPGQERVVYVYQLLETDTLEEEKNSRTNWKEWVSSMIFSEAFVEDPSCWQAEKIEDDLLREIVEEDWAKSIHMIMKNEKASNGLIREFTCVMIGLNCSAVHGLSVDLVTIISLIIILAVKALNPSXFRDGLSRLXNLQI

SEQ ID NO: 14015 - protein, 639 aa, Shewanella oneidensis MR-1
MGKIIGIDLGTTNSCVAVLDGGKARVLENAEGDRTTPSIIAYTDDETIVGQPAKRQAVTNPNNTFFAIKRLIGRRFKDDEVQRDVNIMPFKIIAADNGDAWVESRGNKMAPPQVSAEILKKMKKTAEDFLGEEVTEAVITVPAYFNDSQRQATKDAGRIAGLEVKRIINEPTAAALAYGIDKKQGDNIVAVYDLGGGTFDISIIEIDSNDGDQTFEVLATNGDTHLGGEDFDNRLINYLADEFKKEQGLDLRKDPLAMQRLKEAAEKAKIELSSTNQTEVNLPYITADATGPKHLVVKITRAKLESLVEDLIIRTLEPLKVALADADLSVSDINEVILVGGQTRMPKVQEAVTNFFGKEPRKDVNPDEAVAVGAAIQAGVLSGDVKDVLLLDVTPLSLGIETMGSVMTKLIEKNTTIPTKAQQVFSTADDNQSAVTIHVLQGERKQASANKSLGQFNLDGIEPAPRGMPQIEVMFDIDADGILHVSATDKKTGKKQNITIKASSGLSEEEVAQMVRDAEAHAEEDKKFEELVQSRNQADGLVHATKKQVEEAGDALPSEDKAKIEAAMSAVETAVKGNDKEAIEKATQALIEASAKLMEIAQAKAQTQGGAQEGAAKQSNATADDVVDAEFEEVKDDKK

SEQ ID NO: 14016 - protein, 1105 aa, Pseudomonas putida GB-1
MSDGDAQQLLRAYPGWVDFIEAGTMARGRSYAAQERARILSLHGATIEAICKGSTGETYQQNIRLVVNYGDLRVFGRCSCPVGLNCKHCVAALLQLQDGLDAAGPHEQSALSLPPDLNLWVQTLESPSQPASPQGPARKGPAIYYRIHVDHGVWRLEPIKGTRQADDTLKIGRITSMPEMLYYTPRYVTEDDARLLRLIDSRSETTTPMAQLEGKQGGELYSYALATGRLLFEDDLAPLSPGPELHAEFRWVRLDNGSYRGAWYHDDHQQLRAVPIEPMHYVDRQRHLTGKLRHDLDPFIASQLARAPIVPEHLVIPLSHRLNALNRHVPTPTAVSTEHIEDITPKGRLTLGSLEFSAYMPKTGRMQRQLQHRAALAFDYDDLRTSGNDEKPLTRLVGNTSQRIRRQPQAEQALRKVLRDLGFKAATRQSKALPDSAGEMFQLPDDEAWLRFAREGLPRLRQAGWNIDVQRDFAFNLQEVDDWYASIDEAPGHEWFDLELGIVVDGQRHSLLPIVLQLLRSSPELLRPSELARRSDDEHLLIDLNRGRLDSPALRVALPYGRVKAVMATLGELYLHEHTTGPSLRMERADAARLNEIEGLPLLWEGGEHVRDLGRRLRDARDLQVEPPTGLQASMRPYQQQGLNWLQALREMGTGGILGDDMGLGKTLQALAHLLLEKESGRLSTPALAVMPTSLIPNWLDEAQRFAPDLRVLALHGPGRSKHFATLHEYDLVLTTYALMPRDLEHLRTQAWHVLVLDEAQNIKSSTSKAALAVCELQAGQRLCLTGTPMENNLGELWSIFHFLMPGWLGDLKRFNQDYRTPIERHGDSERMAHLASRIRPFLLRRTKEQVATELPAKTEMVHWVELSDAQRDTYEAVRVAMDQKVRDEIARNGAARSQIVILDALLKLRQVCCDLRLVKGVESKGNQADKGKLGALLEMLEELLSEGRRVLLFSQFTSMLALIEQELEKRKIRYSLLTGDTRDRRTPVRQFQQGDSEVFLISLKAGGVGLNLTAADTVIHFDPWWNPASENQATDRAYRIGQDKPVFVFKLITRGTVEEKIQLLQQEKAALAASLLDGGQAGQWRLGDEEIEALFAPLPGKRGR

SEQ ID NO: 14017 - protein, 872 aa, Polaromonas sp. JS666
MEVSRIRALRGPNLWSRHTALEAIVACTAAERSIDSLPGLEPRVRSLFPGMGELRQTDHGGPVSLAHVLEAAALALQAAAGCPVTFSQTAVTVEPGTYQVVVEYSEEAVGRLALELAQALVHAALRDTAFDLDAAITQLRDLDEDERLGPSTGAIVDAAVARGIPYRRLTKGSMVQFGWGSKQRRIQAAEIDATSAVAESIAQDKDLTKKLLRAAGVPVPLGRPVSDAADAWTVAQQIGLPVAVKPQDGNQGKGVSVNISSREQLEAAYLAAAEYGEVMVEKFLPGSDFRLLVVGDKLVAASRRDPPQVVGDGLHTVRELVDIVNQDPRRGEGHATSLTKIRFDDIAVGRLEAQDLTPESIPAKGRRVILRNNANLSTGGTATDVTDDVHPAVAARAVAAAKMVGLHICGVDVVCESMLRPLESQSGGVVEVNAAPGLRMHLSPSYGKGRAVGVAMINELFPAGGNDVNNGRIPVIAVTGTNGKTTTTRLIAHLMTAHGLRTGMTNTDGVWINGRQTDSGDCSGPKSARNVLMHPDVDAAVFEIARGGVLREGLGFDRCEVAVVTNIGSGDHLGLNYITTVEDLAVLKRVIVQNVAPTGYAVLNAADPIVAEMAATCPGKVIYFAADRHHPLMATHRAQGKRTVYVDGPVLVAAEGAWVERIPLAGIPVTRGGSIGFQVENAMAAVAAAWAAGLNWDTIKSGLASFVNDAHNAPGRFNVMDYRGATVIADYGHNPDAMRALVAAVDAMAAAAGQRRSVVISGAGDRRDSDIRDQTVILGAAFDDVILYQDAAQRGRADGEVMGLLREGLEGLNKASRTSRIDEIRGEFLAIDTALGRLQPGDLCLVLVDQVQEALDHLALRVKEAKDQTVAA

SEQ ID NO: 14018 - protein, 743 aa, Polaromonas sp. JS666
MSKQDDIKLLRINYLRGPNIWTYRPVLEVWLDLGGLEDCPSHLLPGFNDRLVALLPALLEHHCGVGERGGFIQRLREGTWAGHVLEHVVIELLNLADMPTGFGQTRSTSKRGVYRMVFRARDEQVARTALAEGHRLLMAAINDEAFGPADVQVAVEKIRAKVDDCYLGPSTASIVAAATDRRIPHIRLNDGNLVQLGYGASQRRIWTAETDLTSAIAEGIAHDKDLTKSLLATCGVPVPDGEIVSTAERAWEAAQDIGLPVVVKPSDGNHGRGVSLDLNTREEVEAAFRVAEPHGSEVMVERFIRGHEHRLLVVGGRVVAAARGETATVTGDGHSTVMQLVDAQLNTDPRRGLEEDFPLSRIETDKDEAIVLDLQRQGLTPHAIPAAGRQVLIQRNGNVAIDCTDEVHPEVDHIVSLAARVVGLDIAGVDVVAQDISRPLHAQGGAIVEVNAGPGLLMHLKPAEGSPRPVGRAICDHLFPDSPDHAQQDGLNSSPCGRIPIVGIAGSEGTQRVARLVAWLLHLSGRYTGLACRDGLFLDQRCVDASDSAHWEAGQRLLINRTVQAAVFENGAETILRSGLAYDRCQVGVVTDLGGAAGLAEFDITEDEQMFRVMRSQVDVVLPGGAAVLNAAHERVVDMHDLCDGEVIFYSTDPKAAAIARHCAQGGRALYVRQDQIVLATGTTEAFLPGLGKLSAWRARRDLNDSTLLAAVGAAWALGIPLNLIGAGLEAFETTPKTAGSAE

SEQ ID NO: 14019 - protein, 1405 aa, Debaryomyces hansenii CBS767
MVKPLIPEDVSLNPELYGLRRSHRERRGPAIVESDISDEDDVDNKPTRKKKKKYNDEDGFEDGFDDDDDDEDNDEDEDDEFVVSTKKRKSNGKASKSTKKKSNTPTMSEIRFSSRNSKQVNYTVDYDEDDADLLESGPEFDHDEEDDEANGDYYYYQQAAEAEDERGIDQVMDHKINEDNAELTNEPKLDYLFKVKWSDASHLHNTWESWSTLKDFKGFRKVDNYIKQFIIMDREIRNDPLTTKEDIEAMDIDLERRRDEQNEYTEVERIVDSERAEVDGESQLQYYCKWKRLYYDECSWENAEEIARIAPEQVTRYQQRLKSKILPNLSANYPSNQRPRFEKLVKQPLFIKNGELRDFQLTGLNWMAFLWSRNENGILADEMGLGKTVQTVSFLSWLIYARRQNGPHLVVVPLSTVPAWQETFEKWSPDLNCIYYLGNTESRRNLRNYEFYQGNNKPKFNILLTTYEYILKDRNELGAIKWQFLAVDEAHRLKNAESSLYESLKLFKVTNRLLITGTPLQNNIKELAALCNFLMPGKFNIEQEIDFESPDDQQEQYIKDLQKKIQPFILRRLKKDVEKSLPSKTERILRVELSDLQTDYYKNIITKNYSALNAGNKGSQISLLNVMSELKKASNHPYLFDGAEERALAKANSNARDNVLRGIIMSSGKMVLLEQLLTRLKKEGHRVLIFSQMVRMLDILGDYLSIKGYQFQRLDGGIPSSQRRISIDHFNAPDSKDFAFLLSTRAGGLGINLMTADTVVIFDSDWNPQADLQAMARAHRIGQKNHVSVYRFVSKDTVEEEILERARKKMILEYAIISLGITDPSSTKSKTEPSANELTQILKFGAGNMFRENDNQKKLEDLNLDEVLNHAEDHVTTPDLGESNLGSEEFLKQFEVTDYKADIEWDDIIPQEELSKLKEDEKKKADDEFLQEQISMYSRRKAAVRKLQDGSENVSEDEVADSDNQRKARKRNDENYQLSEKEIRGIYRSILKLGDLTGKWEQLVEDGSISNKNPVLIKHAYNEIINISKQLVKEEEARRTKVLAELERKAMELKDKNVVTVDGSSPMALWVAKKKEKRAVLFEYQGVKNINAELVLARPQDMKLLESLISKENPTSFEIPKPPKQVSSWNCEWDTKDDSMLLVGVYKFGYGSWVQIRDDPVLGLQNKLFLDSANSKESKEDKSAKKVPGAVHLGRRVDYLFTLLKEGDETPNGNASNNTTTKKKVRRVKNETPTPAVKKKPTKSQSPEVNKKPKHKKLLPKDSPTSSSANSPKDPNGHAHTHTHAHAHVKEEPPADNDLEYESMDEAECKNTLKPVSKSLMRLHKGNKGFEKAEWANILRKELLTIGDFIDQTTGSKDKHLDKLKKHLWSYASLYWPAKVPSKKINDMYNRVKVQVRAPKEPKNS

SEQ ID NO: 14020 - protein, 631 aa, Thermomicrobium roseum
MGRVIGIDLGTTNSVMAVIEGGEPVVIPTAEGERLTPSVVAITRGERLVGRFAKRQAITNPENTIYSIKRFMGRRFDDPEVQRTIKLVPYQVRRAQNGGVAVKMGERSYTPQEISAMILQKLKQDAEAYLGETVDKAVITVPAYFDDSQRNATKDAGRIAGLEVRRIINEPTASALAYGLDKKGRGEGGVYDLGGGTYDISILDISEGVFQVLATNGYTHTPLVHFDQAIIDLALHEFKRETGIDLRQDRIVQRLKEAAEKAKIELSSVQQTEINLPFITADATGPKHLTVKLTRARLQAELVADLVEKTIPPMEQALKDAGLSPRDVDEVVLVGGQTRMPLIQRKVQEFFGKEPHKGINPDEVVAIGAAIQAGVLAGEVKEVLLLDVTPLTLAIETLGGVATPIIPRNTTIPTRKSQIFTTASDNQTQVEIHVVQGERPMAADNKTLGRFILDGIPPAPRGVPKIEVTFDIDANGILTVSARDLATGREQKITITASTGLTEEEIQRMIREAEEHAEEDRAKREAIDVRNQAEALLYQAEKTLNEFSDRIPSELKLELENKMQAVREIVERDPMNTARLRGLRRAGADPLPGRRPHVRAGPAPTASTGPDGGRTSGAPGEETVEGEYREV

SEQ ID NO: 14021 - protein, 68 aa, Physcomitrella patens subsp. patens
MTTSKRLAEKKSAKFQKNVHRRGNVPETTLKKKNQYPVGPMVLGLFVFVVVGSSIIQIFRTATSGGMA

SEQ ID NO: 14022 - protein, 618 aa, Streptomyces coelicolor A3(2)
MARAVGIDLGTTNSVVSVLEGGEPTVITNAEGARTTPSVVAFAKNGEVLVGEVAKRQAVTNVDRTIRSVKRHMGTDWKVNLDGKDFNPQQISAFVLQKLKRDAESYLGEKVTDAVITVPAYFNDAERQATKEAGEIAGLNVLRIVNEPTAAALAYGLDKDEQVILVFDLGGGTFDVSLLEIGDGVVEVKATNGDNNLGGDDWDQRVVDYLVKQFQSGHGVDLAKDKMALQRLREAAEKAKIELSSSTETTINLPYITASAEGPLHLDEKLTRAQFQQLTSDLLERCKTPFHNVIKDAGIQLSEIDHVVLVGGSTRMPAVAELVKELTGGKDANKGVNPDEVVAIGAALQAGVLKGEVKDVLLLDVTPLSLGIETKGGIMTKLIERNTTIPTKRSEIFTTAEDNQPSVQIQVYQGEREIAAYNKKLGMFELTGLPPAPRGVPQIEVAFDIDANGIMHVTAKDLGTGKEQKMTVTGGSSLPKDEVDRMRQEAEKYAEEDHARREAAESRNQGEQLVYQTEKFLKDNEDKVPGEVKTEVESAVAELKEKLKGEDTAEIRTATEKVAAVSQKLGQAMYADAQAAQAAGGEAPGADAGAEGKGADDDVVDAEIVDDERKDGAA

SEQ ID NO: 14023 - protein, 661 aa, Saccharomyces cerevisiae
MSRKSIVQIRRSEVKRKRSSTASSTSEGKTLHKNTHTSSKRQRTLTEFNIPTSSNLPVRSSSYSFSRFSCSTSNKNTEPVIINDDDHNSICLEDTAKVEITIDTDEEELVSLHDNEVSAIENRTEDRIVTELEEQVNVKVSTEVIQCPICLENLSHLELYERETHCDTCIGSDPSNMGTPKKNIRSFISNPSSPAKTKRDIATSKKPTRVKLVLPSFKIIKFNNGHEIVVDGFNYKASETISQYFLSHFHSDHYIGLKKSWNNPDENPIKKTLYCSKITAILVNLKFKIPMDEIQILPMNKRFWITDTISVVTLDANHCPGAIIMLFQEFLANSYDKPIRQILHTGDFRSNAKMIETIQKWLAETANETIDQVYLDTTYMTMGYNFPSQHSVCETVADFTLRLIKHGKNKTFGDSQRNLFHFQRKKTLTTHRYRVLFLVGTYTIGKEKLAIKICEFLKTKLFVMPNSVKFSMMLTVLQNNENQNDMWDESLLTSNLHESSVHLVPIRVLKSQETIEAYLKSLKELETDYVKDIEDVVGFIPTGWSHNFGLKYQKKNDDDENEMSGNTEYCLELMKNDRDNDDENGFEISSILRQYKKYNKFQVFNVPYSEHSSFNDLVKFGCKLKCSEVIPTVNLNNLWKVRYMTNWFQCWENVRKTRAAK

SEQ ID NO: 14024 - protein, 446 aa, Salmonella typhimurium
SAEHVLTMLNEHEVKFVDLRFTDTKGKEQHVTIPAHQVNAEFFEEGKMFDGSSIGGWDMVLMPDASTAVIDPFFADSTLIIRCDILEPGTLQGYDRDPRSIAKRAEDYLRATGIADTVLFGPEPEFFLFDDIRFGASISGSHVAIDDIEGAWNSSTKYEGGNKGHRPGVKGGYFPVPPVDSAQDIRSEMCLVMEQMGLVVEAHHHEVATAGQNEVATRFNTMTKKADEIQIYKYVVHNVAHRFGKTATFMPKPMFGDNGSGMHCHMSLAKNGTNLFSGDKYAGLSEQALYYIGGVIKHAKAINALANPTTNSYKRLVPPVMLAYSARNRSASIRIPVVASPKARRIEVRFPDPAANPYLCFAALLMAGLDGIKNKIHPGEPMDIPQVAGSLEEALNALDLDREFLKAGGVFTDEAIDAYIALRREEDDRVRMTPHPVEFELYYSVE

SEQ ID NO: 14025 - protein, 208 aa, Vitis vinifera
MKEMKECELCSFPARMFCESDQARLCWDCDEKVHGANFLVARHSRSLLCHACQAPTPWKASGTRLAPTVSVCEACVLRCDKDRHRSSGEDRESEGGNTDDEEDDDDDHDDDDENDGDEGDEDDDVEEEEDGENQVVPLSSSAASLLLPPDASSSSSEDGEASSRFSARGRGGVSALKRTRQNADLDLDSDVCFSFSSSNQRYCFLDLF

SEQ ID NO: 14026 - protein, 160 aa, Populus tremula x Populus tremuloides
MSTSEFKGFTEEQEALVVKSWSAMKKNASELSLKFFLKIFEIAPSAQKLFPFLRDSSVPLEQNPKLKPHAMSVFIMTCESAVQLRKAGKVTVRESSLKKLGAVHFKNGVVDEHYEVVKFALLETIKEAVPEMWSPEMKKAWGDAYDQLVAAIKTEMKPSS

SEQ ID NO: 14027 - protein, 443 aa, Thermococcus kodakarensis KOD1
MNEIKGIERAVQVEVPRPRFLLLAFTDINGSLKGMEIPMERYEEAVEDGVSFDGSSIPGFEGIEDSDLIFKADPSTYAEIPWEGIGRVYGYIYKGDEPYQADPRGILKRVLERLEKEGLKAHIGPEPEFYIFKKNGTWELHIPDSGGYFDLVGLDKAREIRREIALYMPYLGLKPEVLHHEVGKAQHEIDFRYDEALRTADNIVSFKHVVKAVAELHGYYATFMPKPIYGFPGNGMHLHISLWKDGENVFIGEDGLSDTALHFIGGILKHAKALAALTNPTVNSYKRLVPGYEAPVYISWGYRNRSALIRVPAFKGSGARIEYRCPDPSANPYLALAGILMVGLDGIKKKVEPDSYVETNVYEMDDAERERLGIDTLPGSLGEALEELKKDKTVREALGGAYKNFIDYKEREWEEYIEYLSSRDIPIDTKKVTEWELERYFYV

SEQ ID NO: 14028 - protein, 377 aa, Carboxydothermus hydrogenoformans Z-2901
MSRKKIIALVVVVFLLWGIFSLAGLFWKKSGDKIETLLTVIALIKSQYYQPVSTEKLINGAIKGMVEGLDDPYSTYLDPEQFKHLNEQITGTFGGVGLIVTMEENHIVVVKPIPDTPAAKAGIKAGDIIVNISGRDTKGMDLDTAVSLMRGPVGTRVEVGILRPGEKETRMFTLVRENITIPTVESKMLDDKIGYIMLSQFTENSPQAVRKAIGDLKKKGMKGLIFDLRDNPGGELKAAVEIADIFVPRGKTIVYVDYRNQPDEEEKAEVPELGIPVVVLVNGGSASASEIVAGALKDWGVAVLVGEKTFGKGVVQSIFRLPGNAGLKLTVARYLTPKKHDINKKGIMPDVVVKQPAGSKEDRQLLKAKEILAEKIK

SEQ ID NO: 14029 - protein, 554 aa, Desulfitobacterium hafniense DCB-2
MTKFSMFCSKLIKANTKAGRILTASALALILTVSAPAAALGSPVDDVRSLLESQYVDPVDPWVLSASSVEEMLKRLDDPHTVFFTQKEYQNFLNSMDLSFSGIGVYIELEPRGLEIVGIIPGSPAEEAKLKTGDIIAQVGGQSLAGLSQDAATTLIKGPEGTTIDIVVLRGEERLSLKVARRAVEVPTVSGEMLNEDIGYVAIESFGETTEELFEQVIKELDKQGADAWVMDLRNNPGGYLDSALSLAGYFIGEQTALQTKDRSQKFEPYQAEKQEFIIAEPVIFLTNENSASASEILTAVVKDYQKAVVVGTNTYGKGSVQSLWQLTDGDVLKITVAKFYSPYGKEINGVGISPDVEILENDPLEMAVLMLAGSIQGNDDGQEVADLVQFTAGGKDWNISLEEARNPEYWSAYRELIQNNSFPGGFSWRHNSDWAAISQSEQDALWPLFYPGYHGMKELKDLAVDKTFTVRFTAPIDFKSVTENSFELIESESGKRMPVTFEQVDERSVKVIPQGLLEPEKTYWLLTHQGIAAKDGSILKEGALTVGTTGAGH

SEQ ID NO: 14030 - protein, 1146 aa, Populus tremula; identical to SEQ ID NO: 7112

SEQ ID NO: 14031 - protein, 472 aa, Glycine max
SYVGPPPPPTGTPLQNNLEELWALLNFLLPNIFNSSEDFSQWFNKPFESAGDSSPDEALLSEEENLLIINRLHQVLRPFVLRRLKHKVENELPEKIERLIRCEASSYQKLLMKRVEENLGSIGNSKARSVHNSVMELRNICNHPYLSQLHAEEVDNFIPKHYLPPIIRLCGKLEMLDRLLPKLKATDHRVLFFSTMTRLLDVMEEYLTSKQYRYLRLDGHTSGGDRGALIELFNQPGSPYFIFLLSIRAGGVGVNLQAADTVILFDTDWNPQVDLQAQARAHRIGQKRDVLVLRFETVQTVEEQVRASAEHKLGVANQSITAGFFDNNTSAEDRREYLESLLRECKKEEVAPVLDDDALNDLLARSETELDIFEAVDKERKEDELATWKKSVLGQAADGSDSDIPPLPARLVTDEDLKQFYEAMKISDVPKAEVESSGVKRKGGYIGGLDTQHYGRGKRAREVRSYEEQWTE

SEQ ID NO: 14032 - protein, 1146 aa, Populus tremula; identical to SEQ ID NO: 7116

SEQ ID NO: 14033 - protein, 425 aa, Synechococcus elongatus PCC 6301
MAFSNRKLIAGICASAIATVAVVGAGNHWARGQALFQESPKEIIDEVWQVVDRNYVDSVGTFDRNKWRQLRREYLARNYKTREEAYSAVKEMLKTLGDPYTRFMDPDEFKDMQIDTSGELTGVGIQLSQDPDTKELIVVSPIEGSPAAAAGIRSRDVIVKIDQKTTQGMSSDEAVKLIRGPVGSKITLTIRREKETIAFPIVRERIEIHSVSARVQESPTGPVGYIRLRQFSANSAPEMRQAIKDLEAKNVKGYVLDLRSNPGGLLYASIDIARMWLPKGVIVSTKDRSGISEQASANNRALTDKPLVVLVDGGSASASEILSGALQDNNRAVLIGSKTFGKGLVQSVRPLGDGSGLAVTIAKYLTPSGRDINKQGIEPNIVAELTDAQREDLSKNQDQIGTASDPQFQSALKVLTQQIATASNK

SEQ ID NO: 14034 - protein, 468 aa, Anaplasma marginale str. St. Maries
MFLRAEDLLDYIAKNSVKFIDWRFTDLLGRWHHTTYSVSSLSAEVFSSGIAFDSSSVPGWQPIEKSDMLLVPDVSTAFVDPFSPQPSLAVICNVVNPHGHNDYQRDPRYTARKAYEYMLSSEIADKCFFGTELEFFVFDHVRFGTDPYNTYFKLASQEDGGLGSRGCFSNHGYRMKAKDGYMRLAPVDSLHDVRSEMLAMLSEVGVTPLLHHHEVAASQCEIGFRYAELVTSADNVQKCKYVLRNVASSYGKSVTFMPKPVRGDNGSGMHCHQSLWKDGNNIFSGSNRGLSELCLHYIGGVIKHGRALSAFANPSTNSYKRLLPNFEAPTWLVYSHENRSAAIRIPCIPDGGSTRIEVRFPDPLANPYLCFAAQLMAGLDGIKHKVHPHEVSGKCLYSMEESETRDLLSVPTSLEEALTSLDKDRDFLLQGEVFTNEQIESYIQLKRSEVDNLRSYPHPVEFSNYYAL

SEQ ID NO: 14035 - protein, 1146 aa, Populus tremula; identical to SEQ ID NO: 7117

SEQ ID NO: 14036 - protein, 1146 aa, Populus tremula; identical to SEQ ID NO: 7118

SEQ ID NO: 14037 - protein, 271 aa, Sulfolobus solfataricus P2
MGSSHHHHHHSSGLVPRGSHMASDLPDKIETNVYCNLTPEQAAMYKAEVENLFNNIDSVTGIKRKGMILSTLLKLKQIVDHPALLKGGEQSVRRSGKMIRTMEIIEEALDEGDKIAIFTQFVDMGKIIRNIIEKELNTEVPFLYGELSKKERDDIISKFQNNPSVKFIVLSVKAGGFGINLTSANRVIHFDRWWNPAVEDQATDRVYRIGQTRNVIVHKLISVGTLEEKIDQLLAFKRSLFKDIISSGDSWITELSTEELRKVIELSVGGY

SEQ ID NO: 14038 - protein, 391 aa, Bacillus anthracis str. A2012
MVKETIGDMNVKITGLEMDSRKITNGNLFICVSGIDGFLEDRHQFVEDAVKNGAVALIVERDVNIEIPKIIVKDARYAMAVIASHFYGYPSNKMKLIGITGTNGKTTTSYLLEKILSDYGYHTGLMGNNGVKVGSKWYPTDINTQEPPTLQRNLQMMKNQNADYCVMEVTSQGLHMERVKGCNFKIAVFTNLTQDHLDYHGTFDEYKHVKSLLFARLGNNLSTIDKKIAVLNADDPSVEYFKKITSAEVITYGIHNGADVQAKNITLSPKGIRFLVSSFNGEIEVSLNLVGRFNVYNALAAITVALVEGIPLTNISDSLSNLKSIEGRMEIIDENQDFLVIVDYAHTPDALENVLSTIREFAKGKIITVFGCGGDRDAKKTIYNGWNCWKL

SEQ ID NO: 14039 - protein, 1146 aa, Populus tremula; identical to SEQ ID NO: 7124

SEQ ID NO: 14040 - protein, 445 aa, Burkholderia cenocepacia J2315
MQPELSEFLRQHRITEVEAIIPDMAGIARGKIIPRNKFESGESMRLPQAVMVQTVTGDYPEDGTLTGVTDPDMVCVPDPSTICLIPWAVDPTAQVIHDCVHFDGSPVEISPRYVLRRVLDLYKAKGWKPVVAPELEFYLVDMNADPDLPLRPPVGRTGRAETGRQSYSIEAVNEFDPLFEDIYEYCEMQGLDIETLIHEVGAAQMEINFVHGDALPLADQVFLFKRTVREAALRHNMYATFMAKPMEGEPGSAMHIHQSLADARTGRNLFADEGGAVSPLFHSYLAGLQKYTPALMPIFAPYINSYRRLSRFMAAPINVQWGYDNRTVGFRIPQSSPVARRIENRIPGVDCNPYLAFAATLAAGYLGMTQQLAPTEPIASDGYDLPYQLPRNLEEGISLMAACEPLAGILGDKFVKAYLALKETEYEAFFRVISSWERRHLLLHV

SEQ ID NO: 14041 - protein, 1246 aa, Cryptococcus neoformans var. neoformans JEC21
MSEHNQDLRFLISDDVLNEDPMSTGRFAEEDRGSSDTEQLTDNKNDGEEPKETAVQAAFDGSDDVNRLEEPHNPVSSTANIGNFALLESSSAEVSDASCPATMPILVRQSPKTCSQPRTRKVKLSTLSLSSDPDPDINDPEFKARLEDSNQDDQDEELDLEMEEADSAGRESGEGNRDSEDEGLLADADLPIEVLLRRYGYPVPEGEGAVNGEPEQSESKGREQAAPTSTVSETLPSTKLSLAQPANQTDQSLTDTALPEPRVPEQLIISGKRQRRKKEIWTPDDSEPQHLVGKKRIKKVEIVEKVEADVHQNGDGLVIVEEETMGDEDNDDSKVGQEEEDGHEYDSEEEYDEDEDEEEEGAKEDNVDWDDRQDKEGDIGPRVRQPFLLRGTLRPYQQAGLEWLASLWSNNMNGILADEMGLGKTIQTIALLGHLACDKGVWGQHLIIVPTSVILNWEMEFKKFLPGMKVLTYYGNQKERKEKRVGWHTENTWQVCITSYQIVLADQHIFRRKNWCYMILDEAHNIKNFRSQRWQTLLGFKAQRRLLLTGTPLQNNLMELWSLLYFLMPGGIGADATAVVGFANHKEFMEWFSNPMDKAIETGDAMDEETLETVAKLHTLLRPFILRRLKSEVETQLPGKFEHVVYCRLSKRQRFLYDEFMSRASTHEALTTGGYLGVMNTLMQLRKVCNHPDLFEMRPVKTSFAMDNVARDFEPSDILIRKRLLAEEDERRIDALAIGFGVAHNEAMSGWVARARQTYDASDKLPYAASPLRRGKLSAPPPKDTRSVELWLKYRVWAEEEFSKRRWESIRATNRQRCGISPIYGSTFLSLLGNLPNFLLPQDVQSRREETFADFTPPAAKFITSLPERAKSLEDVIDRFAVIPPNAVARNLATYALPGLEPISHPALTDPAFDTLHRSSVKLQIAFPDASLLQYDCGKLQKLFEMLRDLKSEGHRVLIFTQMTRVLDILEMFLSHNGHRYLRLDGSTKIEDRQVLTERFNSDSRIFVFIASSRSGGVGINLTGADTVFFYDSDWNPSMDRQCMDRAHRIGQTREVHIYRFVSSHTVEENMLRKAEQKRLLDKMVIQEGGFNNDWWGRVGWKDMFGDVPGITDVSGVVEKSGEGIIDIQVEGTPVAEDVEVTRPRAGEERELARALAEVEDEEDAQAARMAQGEGELDLQEFEEGPKAVAKRVRVFEPENSGTPVTTEAGETGDVVEEYDDEPGSVEEYMLKWVEEDWDYFSPYRA

SEQ ID NO: 14042 - protein, 509 aa, Mycobacterium smegmatis str. MC2 155
MIDMTIARIAEIVGGELADITPEQAAATHVTGTVEFDSRAVGPGGLFLALPGARSDGHDFAAAAVQSGAVAVLAARPVGVPAIVVRPDGGVDSASGALEHDTDGSGAAVLAALARLAAAVANELAADGLKIIGVTGSSGKTSTKDLLAAVLAPLGEVVAPPGSFNNELGHPWTVLRATRDTDFLVLEMSARHPGNIAALAAIAPPSVAVVLNVGTAHLGEFGSREAIAKTKAELPQAVGPSGVVILNADDIAVAAMAEQTDARVVRISRDPGSDIDVWAGPVTLDELARPRFTLHTRDGEVDVNLAVHGDHQVSNALCAAAVALECGATPQQVADALAAAGPASRHRMQVSTRADGVTVINDAYNANPDSMRAGLKALAWMARQTAGGQPGGKRRSWAVLGEMAELGDDAITEHDAIGRFAVRLDVSRLLVVGSGRAMNAMHHGAVMEGSWGSESTMVADADAALTVLRDELQPGDVVLVKASNSVGLGALAEALVAGEGHTEGRTPAR

SEQ ID NO: 14043 - protein, 188 aa, Chamaecyparis lawsoniana
DEHGEVVAEIRRSDLEPYLGLHYPATDIPQASRFLFMQNKVRMISDCRADPVRIIQAEELPQLLCLVGSTLRAPHGCHAQYMANMGSIASLAMAVIVNNGNDEVGSSGRNTGKLWGLVVCHHTSPRAVPFPLRSACEFLMQAFSLQINMEMRLAAQLTENNILRTQTLLCDMLLRDAPYGIVTQSPSI

SEQ ID NO: 14044 - protein, 149 aa, Sesbania rostrata
MGAFTESQEALVTSSYETFKQNASDLSVLFYTFILEKAPGAKNLFSFLKDSDGVPKDNPNLKAHAAKVFELVVDSAVQLRTKGAVVIADANLGPVHVQKGVTDAHFVVVKEALLKTVKEATGAKWSDELSNAWEVAYDELAAAIKKAMG

SEQ ID NO: 14045 - protein, 102 aa, Triticum aestivum
  misc_feature (36)..(36): Xaa can be any naturally occurring amino acid
MVRSNSIDSCYSSIQDVTYSCGYCGYALNLSSAARXTANIGSKYGKQIRKKGIVAFVAVDETRFTQADEVTCAPRLRPWTWRLFRRRSRLLCGKCGGRIGAA

SEQ ID NO: 14046 - protein, 1558 aa, Cryptococcus neoformans var. neoformans JEC21
MCSRVYLGSLMYVSVISYCWCMRNDSASKEGYAWSWVARTTDKWRTQGATLDNAGWDESEAFSVGECRTSTNFFRRHPPASTAPASSVHPPSSLSSSAPATHSQAAPAPASSLYTQNIDASTKHVTTNMSDSQPQQPRPAPLVIDDERKLEMFKNMDPGRIANIRKRITELQSAGSSKESSTELAKLKMILDMYARAMQLEQERAAAANKPDGPADTSTAASTNGQAGPSNPAHVSMNPTQIAQLRTQAAAYQHLSRGQPVPSYLLAAAQGTPPPGIGGQPPVPTGLNGIQGKVADKTVEAVVEDSIEAKKAREKEEQQDKTSEGPDGAAPADGPSQPPYAMEFDETSIIYPYNAYTDPSFYSKRKFDEEVINPLHKRQRLITPSIMPRGLDPYLLMEERNRFIETRMAWRMKELENMDSTAGLGQPGAGDVPNVIESEKPGTPMGVRARIELMGLRLLGKQRLLREDVVRAMHGASQIPADRSQFRRFRTHTLRDARATETAERRQRTEREQRGKQRHLAYINSICEHGQALIGAGVSTARGQGADKMKRLGRAMMKLHAETEREEQKRIERIAKERLKALRNDDEEAYLALLGEAKDSRISHLMDQTDQYLETLAAAVVEQQNDDVHRDAIMAVPFEQEEGVASEEMFGAKRQDGEESGAERRAGKVDYYAVAHKIQEKVTKQASILSGGTLKDYQVKGLQWMISLYNNRLNGILADEMGLGKTIQTISLITYLIEKKKQPGPFLVIVPLSTLTNWTMEFERWAPAVRTLILKGSPAVRREAYPRLRAIDFQVCLTTYEYIIKERPLLSRIKWIHMIIDEGHRMKNVKSKLSQTLNEYYSSRYRLILTGTPLQNNLPELWALLNFVLPKIFNSVKSFDEWFNAPFANTGGEKMEMNEEEALLVVKRLHKVLRPFLLRRLKKDVESELPDKVEKVIYTKMSALQWKLYESVQKYKTLPTDMSVAKPQKRQNLQNALMQLRKICNHPYVFREVDEDFTVGNTTDEQIIRVAGKFELLDRILPKLFKTGHKVLIFFQMTEIMTIVSDFFDFRGWKYCRLDGSTKAEDRQTLLSTFNDPNSPYQVFILSTRAGGLGLNLQSADTVIIYDTDWNPHADLQAQDRAHRIGQKKEVRVLRLISSGTVEELVLARAQRKLEIDGKVIQAGKFDEVTTGAEYEALLQKAFETSAEEDNEETNELDDDELNELLARGDNELGIFTAMDNERKERKIAEWRASGSKGELPPPLMQESELPPFYRRDIGQELAEELANEEEQGRGRRNKGEVRYTDGLTDDQFIAALENSDDDVEDAADRKRKRAEKKAERKRMNEVLVQAEAEGRPLDVVATKEVVEPIKKKRGRPSSSVTPSVTGDEVPTKKRKMEKVQGPEVQLMTKLFIEVNKLKSDLGEDLNQFFLVPVNRKDYPDYYRIIAQPIAMSQIKAKIGKPSYNLASFRNDLHLLWNNARTYNQEGSWVFNAAEDMQEAFDKMWDDEVPQFLASQAAGAENSVGETSAGASGSSTPMFKPVGDKTTAPKIRISMGKKKIEAAMDGDESMDGGEDDDY

SEQ ID NO: 14047 - protein, 211 aa, Populus deltoides
MGRGKIEIKRIENASNRQVTYSKRKNGIIKKAKEITVLCDAQVSLVIFASSGRMHEYCSPSTTVVDLLDKYHKQSGKRLWDAKHENLSKEIDRIKKENDSMQIELRHLKGEDISSLHHTELMAIEEALDAGLAAVRKKQMEYHSMLEQNEKMLDEEFKRLQFVLQQQEMAMGENAMEMENAYHQQRMRDYNFQVPFAFRVQPIQPNLQERM

SEQ ID NO: 14048 - protein, 683 aa, Photorhabdus luminescens subsp. laumondii TTO1
MNKFVRLAFVLGVSIFGTCYANTNSPVAVPVGIEQLPILKQEPQHSTVSERVTSRFTRSHYRQFDLNGDFSAKIFDRYLNILDYSHNILLASDVAQYADKKKLLGKELENGNLEIPYDLFNLLQKRRFERYQYALSRLEQPMSFDGNDTIDVDRSKAPWPQSVEELNKLWDAKVKYDWLNLKLSGKEDNKIKEMLTKRYQSALKRLTQSQSEDVFQLIMTAFAREIDPHTNYLSPRNTEQFNSEMSLSLEGIGAVLQIDDDYTVINSLVAGGPAAKSKALNVGDKIIGVAQSGKSMVDIIGWRLDDVVALIKGPKGSKVRLEVVSDTKGAKPRTVILTREQIRLEDRAVKMSVKTIGQEKVGVLDIPGFYVGLTDNVKTQLQKLTKQHVSAIVIDLRSNGGGALTEAVSLSGLFLPSGPVVQVRDNNGKVRQDSDTDEVVYYKGPLVVLVDHFSASASEIFAAAMQDYGRALIVGEPTFGKGTVQQYRSLSRIYDQMMRPDWPSLGSVQYTIQKFYRVDGGSTQRKGVTPDIVMPTGVDPAETGESFEDNALPWDSIPPARYTGSKVIAALVPQLNVVHNIRITTDPEFKYINEDIAHYKALKEHKNIVSLNYAQREKENKEADALKLNRINDRFKREGKKPLTSLDDLPKDYQGPDPYLDESVKIALDLAHQPAEKMLAKSK

SEQ ID NO: 14049 - protein, 508 aa, Xylella fastidiosa 9a5c
MSVASRIIRHCSVVPGAVFFPECCMRVVGLSLAISVVLLSFSLSAKNPSGVVMSPPVEEMEMPESNDANVPLDEIRRFVSVYNAIKQAYVDPVNDRKLMHSAVRGLLSDLDPHSTYFDKEDADAFDEQTNGVYDGIGVELQEQSDNTLKVIAPIDDTPAARAGLRPGDLIVAINGKPLANVDAMKPLRGAPGSQVTLTIVRDKNGKPFDMTIKRETIHIASVRSRMLEPGYGYIRISVFQADTGNDFHKHLGQLKQQAGGKLRGLLLDLRSNPGGLLTAAVQVADALLDKGNIVSTRGRISASDTRFDATPGDLLDGLPLVVLVDAGSASASEVLVGALSDNHRARVIGSCTFGKGSVQTLLPLDNGDSVKLTTARYYTPSGRSIQARGIVPDLLLKPDGVGAADLSGSGIDRSEAGLPGHLRGTDEGVPGCTSSDPLPGDTPIMTALLELKQPGSAVQAKKAIPVKVVSDVKSATKSPLSVFGKGRAVKRVPVVSPTSEQVDGQPSK

SEQ ID NO: 14050 - protein, 226 aa, Zea mays
MGAARDSAAAGQKHGTGTRCELCGGAAAVHCAADSAFLCLRCDAKVHGANFLASRHVRRRLVPRRAADPEASSAASSGSSCVSTADSAESAATAPAPCPSRTAGRRAPARARRPRAEAVLEGWAKRMGFAAGPARRRAAAAAAALRALGRGVAAARVPLRVGMAGALWSEVAAGCRGNGGEEASLLQRLEAAAHVPARLVLTAASWMARRPDARQEDHEEGWAECS

SEQ ID NO: 14051 - protein, 549 aa, Oryza sativa Indica Group
MALELSLVSASPPGGLAASPPPPAAIPGKEQQVAGVGILLQISMLVLSFVLGHVLRRHRFYYLPEASASLLIGLVVGGLANISNTETNTRTQSGFSLSPKPFFANFGAIVTFAILGTFVASVVTGVLVYLGGLTFLMYKLPFVECLMFGALISATDPVTVLSIFQELGTDVNLYALVFGESVLNDAMAISLYRTMSLVRSQAAAGENFFMMVFQFLETFVGSLSSGCITAQNILNYFKGTFGIVVLELDLSLLLYPFPKFYMETLFAKHERLCMLSIDHVKLQYLCITIYHLLIACFTVNYFIYYLILCNLDHSVYLFKYAGLDIDKYMLAEGLGLSGIVSILFTGMVMKHYTFSNLSNNSQRFVSAFFHLLSSLAETFVAVNVFSCAYLVNMSRPEHRRIPLKHQKALWFSGLRGAMAFALALQSANELPGGHGKTIFTTTTAIVVLTVLLIGGSTGTMLEALDVIGDENRSIENYDDNNGYIPPTYEEGSSSGGGLRMKLKEFHKSTTSFTALDRNYLTPFFTSQTDEDDDVFGEQPQNQRRGFYDQ

SEQ ID NO: 14052 - protein, 359 aa, Arabidopsis thaliana
MEGDVGIGLVCQNTMDGKASNGNGLEKTVPSCCLKAMACVPEDDAKCHSTVVSGWFSEPHPRSGKKGGKAVYFNNPMWPGEAHSLKVEKVLFKDKSDFQEVLVFESATYGKVLVLDGIVQLTEKDECAYQEMIAHLPLCSISSPKNVLVVGGGDGGVLREISRHSSVEVIDICEIDKMVIDVSKKFFPELAVGFDDPRVQLHIGDAAEFLRKSPEGKYDAIIVNSSDPVGPALALVEKPFFETLARALKPGGVLCNMAESMWLHTHLIEDMISICRQTFKSVHYAWSSVPTYPSGVIGFVLCSTEGPAVDFKNPINPIEKLDGAMTHKRELKFYNSDMHRAAFALPTFLRREVASLLAS

SEQ ID NO: 14053 - protein, 462 aa, Marinobacter sp. ELB17
MKLAQRTLHALPMQALVMASCFAASGWAFAQQTPTSTIADAHAGIDMPAERELLPLDDLRKFTAVFSRIKDAYVEEVTDSQLLESAIKGMLSELDPHSTYLAPKDYEDLEESTSGAFGGLGIEVGMENGFVKVITPIDDTPAQKAGVRSGDVIIKLGEQPVKGMSLQDAVELMRGEPGSILQLTIIRDGETGPLVIPVERAIIKVTSVKSRMLDDGYGYVRITQFQAETGSQFRDALTALKKDAGGALKGVVLDVRNNPGGVLQAAVDTVDAVLNEGLVVYTEGRIQSSRMRFSATEGDILADTPMVVLINGGSASASEIVAGALQDHRRAVVMGTQSFGKGSVQTVIPLDETHAIKMTTARYYTPDGRSIQATGIKPDIEVKPAELKELESPPMFTEADLSGHLEGKNEAENRKNEAQNVRDSAKESAEAVLDRDYQLRSALNLLKGLNIISRAGTSSAQQ

SEQ ID NO: 14054 - protein, 1146 aa, Populus tremula; identical to SEQ ID NO: 7150

SEQ ID NO: 14055 - protein, 170 aa, Arabidopsis thaliana; identical to SEQ ID NO: 11333

SEQ ID NO: 14056 - protein, 439 aa, Pyrococcus furiosus DSM 3638
MNISVSMNKFDSKIKFVQLVFVDINGMPKGMEIPASRLEEAVTDGISFDGSSVPGFQGIEDSDLVFKADPDTYVEVPWDNVARVYGFIYKDNKPYGADPRGILKRALEELEKEGYKAYIGPEPEFYLFKKNGTWELEIPDVGGYFDILTLDKARDIRREIAEYMPSFGLIPEVLHHEVGKAQHEIDFRYDEALKTADNIVSFGYITKAVAEMHGLYATFMPKPLFGFPGNGLHLHISLWKDGENVFMGEEGLSEIALHFIGGILKHAKALTAVTNPTVNSYKRLVPSYEAPVYISWGYRNRSALIRVPAFWGKGARIEYRCPDPSANPYFAFAAVLKAGLDGIKHKIDPFSYVEENVYEMSEEKRKELGLETLPGNLGEALGELEKDKVVKEALGDSYKNFINYKWKEWESYLEYLEEKHIPPDTEKVTEWELERYFFL

SEQ ID NO: 14057 - protein, 216 aa, Shigella boydii
NIGRGFIGKLLADAGIQLTFADVNQVVLDALNARHSYQVHVVGETEQVDTVSGVNAVSSIGDDVVDLIAQVDLVTTAVGPVVLERIAPAIAKGLVKRKEQGNESPLNIIACENMVRGTTQLKGHVMNALPEDAKAWVEEHVGFVDSAVDRIVPPSASATNDPLEVTVETFSEWIVDKTQFKGALPNIPSMELTDNLMAFVERKLFTLNTGHAITAY

SEQ ID NO: 14058 - protein, 1144 aa, Populus tremula; identical to SEQ ID NO: 7153

SEQ ID NO: 14059 - protein, 612 aa, Streptococcus mutans UA159
MSKIIGIDLGTTNSAVAVLEGTESKIIANPEGNRTTPSVVSFKNGEIIVGDAAKRQAVTNPETILSIKSKMGTSEKVSANGKEYTPQEISAMILQYLKGYAEDYLGEKVEKAVITVPAYFNDAQRQATKDAGKIAGLEVERIVNEPTAAALAYGLDKTDKDEKILVFDLGGGTFDVSILELGDGVFDVLATAGDNKLGGDNFDQKVIDWLVEEFKKENGIDLSTDKMALQRLKDAAEKAKKDLSGVTSTQISLPFITAGEAGPLHLETSLSRAKFDDLTRDLVERTKTPVRQALSDAGLSLSEIDEVILVGGSTRIPAVVDAVKAETGKEPNKSVNPDEVVAMGAAIQGGVITGDVKDVVLLDVTPLSLGIETMGGVFTKLIDRNTTIPTSKSQVFSTAADNQPAVDIHVLQGERPMAADNKTLGRFQLTDIPAAPRGVPQIEVTFDIDKNGIVSVKAKDLGTQKEQTIVIQSNSGLTDEEIDKMMKDAEANAEADAKRKEEVDLKNEVDQAIFTTEKTIKETEGKGFDTERDAAQAALDDLKKAQESGNLDDMKAKLEALNEKAQALAMKLYEQAAAAQQAQAGQEGAQSSDSDSSDKGGDDVVDGEFTEK

SEQ ID NO: 14060 - protein, 495 aa, Salmonella typhimurium LT2
MADRNLRDLLAPWVAGLPARELREMTLDSRVAAAGDLFVAVVGHQADGRRYIPQAIAQGVAAIIAEAKDEASDGEIREMHGVPVVYLSQLNERLSALAGRFYHEPSENMRLVAVTGTNGKTTTTQLLAQWSQLLGETSAVMGTVGNGLLGKVIPTENTTGSAVDVQHVLASLVAQGATFGAMEVSSHGLVQHRVAALKFAASVFTNLSRDHLDYHGDMAHYEAAKWMLYSTHHHGQAIVNADDEVGRRWLASLPDAVAVSMEGHINPNCHGRWLKAEAVEYHDRGATIRFASSWGEGEIESRLMGAFNVSNLLLALATLLALGYPLTDLLKTAARLQPVCGRMEVFTAPGKPTVVVDYAHTPDALEKALQAARLHCAGKLWCVFGCGGDRDKGKRPLMGAIAEEFADIVVVTDDNPRTEEPRAIINDILAGMLDAGQVRVMEGRAEAVTNAIMQAKDNDVVLIAGKGHEDYQIVGTQRLDYSDRVTAARLLGVIA

SEQ ID NO: 14061 - protein, 1146 aa, Populus tremula; identical to SEQ ID NO: 7154

SEQ ID NO: 14062 - protein, 176 aa, Ostreococcus tauri
  misc_feature (161)..(168): Xaa can be any naturally occurring amino acid
MACTPWRVLVKKTKHHEEDARRHISRRIASMSSDERESYGAETFAEGNWYHELLEDGLALSYRVQERIARVRVEEVLYEGASKFQEVEVVRTVPFGSLLITDGLMQSSEHDEYVYHESLVHPALAAHACPKRVFIGGGGEGATLREVLRHPCVEECVMVDXXXXXXXXPRRSHVAS

SEQ ID NO: 14063 - protein, 1146 aa, Populus tremula; identical to SEQ ID NO: 7156

SEQ ID NO: 14064 - protein, 500 aa, Sulfolobus solfataricus P2
MGSSHHHHHHSSGLVPRGSHMASKSFQLLEPYNIKANLRPYQIKGFSWMRFMNKLGFGICLADDMGLGKTLQTIAVFSDAKKENELTPSLVICPLSVLKNWEEELSKFAPHLRFAVFHEDRSKIKLEDYDIILTTYAVLLRDTRLKEVEWKYIVIDEAQNIKNPQTKIFKAVKELKSKYRIALTGTPIENKVDDLWSIMTFLNPGLLGSYSEFKSKFATPIKKGDNMAKEELKAIISPFILRRTKYDKAIINDLPDKIETNVYCNLTPEQAAMYKAEVENLFNNIDSVTGIKRKGMILSTLLKLKQIVDHPALLKGGEQSVRRSGKMIRTMEIIEEALDEGDKIAIFTQFVDMGKIIRNIIEKELNTEVPFLYGELSKKERDDIISKFQNNPSVKFIVLSVKAGGFGINLTSANRVIHFDRWWNPAVEDQATDRVYRIGQTRNVIVHKLISVGTLEEKIDQLLAFKRSLFKDIISSGDSWITELSTEELRKVIELSVGGY

SEQ ID NO: 14065 - protein, 1144 aa, Populus tremula; identical to SEQ ID NO: 7157

SEQ ID NO: 14066 - protein, 366 aa, Bacillus cereus ATCC 14579
MPKHRKQSKIKIYRITSYKKDKRSELDSDKFELEQQDKHDIQDKQDKQDEQNKQDKQVQSENVTIVPTDSHSLDVWDEISLKEIQAGEHTSLFEEKSNYQNINLVQVNDVRLYLDKQLQFSSVDEQIYHEALVHPIMAKVIDPKRVLILGGGDGLALREVLKYETVLHVDLVDLDEAMINMARNVPEIVSLNKNAFFDNRVNVHVCDAKEFLNSPSSLYDVIIIDFPDPATELLSTLYTSELFARIATFLTEDGAFVCQSNSPADAPLVYWSIGNTIEHAGLTVKSYHTIVPSFGTDWGFHLATNSAHVLDQIEQLYVVPTPRTLPALLFPLFQFKEEHLEQRNLALLNSESNLILHQCYKQEMKF

SEQ ID NO: 14067 - protein, 598 aa, Fulvimarina pelagi HTCC2506
MQPRPKSNAELRLRRKRSASLTAPTSQIGRHLKDVKQDAFLDCGWGRLVFAHTFQDTGNLVANLREEGPDRRDIAFYVADPHVLLAYAPQELFLDPSHTYRLDLSTYRPSSRRPRGYFIRRMSSEQDGTEINRIYQTRNMVQVHPAFLTANHDNRALTYFVAEDETTGAIVGTVTGVHHRRAFDDPQNGSSLWCLAVDPQAVHPGIGESLVRRLSEHFQARGCSFMDLSVMHDNDKAIALYDKLGFHRVPFFAVKRKNQINEKLFTGPDEGFEELNPYARIIVDEARRRGIHAEVTDGQGGFFRLTQGGRTIHCRESLSELTTAVAMSICDDKTVTRRMVEPAGVKVPDQIDGDKADDAEIAAFIEEHGSIVVKPARGEQGRGIAVGIDNLEDAKAAIKTASEVSERVLLEACFEGDDLRLIVIDYRVVAAALRKPAQITGDGRTSIRELIEAMSRRRSAATSGESRIPLDGETTRCVKHAGYAMEDILPESETIAVRKAANLHTGGTIHDVTGELHRDLVEAAVNAARAIEIPVTGIDLMIKKPHQPDYVFIEANERPGLANHEPQPTAERFIDLLFPLSIPYATRSARNKKRKHKE

SEQ ID NO: 14068 - protein, 287 aa, Symbiobacterium thermophilum IAM 14863
MELFLTENQTEDMRLSVRATRVLHHEKTPYQELLVVETPQWGRLMALDGFFQTCDRDEFVYHEMGAHVPLCTHPNPRRVLIIGGGDGGMAREAARHPEVERVDLVEIDERVVECCKQYFPQIAVALSGNPKVHVHIADGIQWVQEHEAEYDVVIIDSSEPIGPGEGLFTANFYARVFRCLKDDGILVAQTESPWVNAPVIQRAYRGIRQSFPITRLYTCAVPTYPTGLWSFTLGSKKYDPLQAEPEKRVGTLGELRYYTPEVHRAAFQLPVFVQRILAEAEAEEEQP

SEQ ID NO: 14069 - protein, 637 aa, Pseudomonas aeruginosa PAO1
MGKIIGIDLGTTNSCVAILENGNVKVIENAEGARTTPSIIAYTNDGETLVGQPAKRQAVTNPQNTLYAVKRLIGRRFEENVVQKDIQMVPYSIVKADNGDAWVEVKGQKMAPPQISAEVLKKMKKTAEDYLGEPVTEAVITVPAYFNDSQRQATKDAGRIAGLDVKRIINEPTAAALAYGLDKAKGDHTVIVYDLGGGTFDVSVIEIAEVDGEHQFEVLATNGDTFLGGEDFDIRLIDYLVDEFKKESGINLKGDPLAMQRLKEAAEKAKIELSSTQQTDVNLPYVTADASGPKHLNVKVSRAKLESLVEDLVQRTIEPCRTALKDAGLDVSDIHEVILVGGQTRMPLVQKTVAEFFGKEARKDVNPDEAVAVGAAIQGAVLAGDVKDVLLLDVTPLTLGIETLGGVMTGLIEKNTTIPTKKSQVFSTADDNQGAVTIHVLQGERKQAAQNKSLGKFDLADIPPAPRGVPQIEVTFDIDANGILHVSAKDKATGKQQSIVIKASSGLSEDEIQQMVRDAEANAEEDRKFEELAAARNQGDALVHATRKMITEAGDKATAEDKATIEKALGELEAAVKGDDKAEIEAKMNALSQASTPLAQKMYAEQAQQGEDAPQGEQAKAADDVVDAEFEEVKDNK

SEQ ID NO: 14070 - protein, 757 aa, Actinobacillus pleuropneumoniae serovar 1 str. 4074
MKLQQLIKTHHLGLLFQQGKFGIEKESQRIDNKGNIVTTAHPSVFGNRSYHPYIQTDFAESQLELITPPNDKLENTYRWLSAIHEVTLRSLPDDEYIFPFSMPAGLPPESEIKEAQLDNEWDVKYREHLSAIYGKYKQMVSGIHYNFQISDEFVESAFALQTEYPNKIAFRNALYMKLANNFLRYQWILVYLLAATPTVEAQYFGENRPLAGGQLVRSLRSGPYGYVNAPHIVINHDSLQQYVESLEHFVATGDLLAEKEFYSNVRLRGAKKARELLEKGVKYAEFRLFDLNPFSPYGIELADAKFIHLFLLAMLWMDETSGQREVEIGTQKLYQVALEDPRSHTAFQAEGEAILNLMLAMLDDLSVPQNEKDLLQQKLAQFADPSQTVNGRLLAAVEQAGSYKALGAQLAQQYKAQAFERFYAISAFDNMELSTQALLFDAIQQGLQIELLDENDQFLALKFGDHLEYVKNGNMTSHDQYISPLIMENKVVTKKVLAKAGFNVPKSVEFTSVEQAVAHYPLFEGKAVVIKPKSTNYGLGITIFQQGVTDKADFAKAIEIAFREDKEVMVEDYLVGTEYRFFVLGDETLAVLLRVPANVKGDGIHTVRELVEAKNSDPLRGDGSRSPLKKIALGDIELLQLKEQGLTPDSIPADGQIVQLRANSNISTGGDSIDMTDQMHDSYKQLAVGLAKEMGAKVCGVDLIIPDLTKAAEPSLRSWGVIEANFNPMMMMHIFPYQGKSRRLTKAVLKMLFPELP

SEQ ID NO: 14071 - protein, 540 aa, Zoysia japonica
MGPGVVAHLVRLGVLSSTSDHASVVSINLFVTLLCACIVLGHLLEENRWVNESITALIIGLCTGVVILLTTKGKSSHILVFSEDFFFIYLLPPIIFNAGFQVKKKQFFRNFMTITLFGAVGTMISFFTISAGAIAIFSRMNIGTLDVGDFLAIGAIFSATDSVCTLQVLNQDETPLLYSLVFGEGVVNDATSVVLFNALQNFDLNKIDVAVVLKFLGNFCYLFLTSTFLGVFSGLLSAYIIKKLYIGRHSTDREVALMMLMAYLSYMLAELSDLSGILTVFFCGIVMSHYTWHNVTESSRVTTKHAFATLSFISETFLFLYVGMDALDIEKWKFASDSPGKSIGISSILLGLVLVGRAAFVFPLSFLSNLTKKEPSEKITWRQQIVIWWAGLMRGAVSIALAYNQFTRFRHTQLHGNAIMITSTITVVLFSTMVFGMMTKPLIRLLLPASSHTVHSEPSSPKSLHSPLLTSMQGSDLETASHSHIVRPSSLRMLLSKPTHTVHYYWRKFDNALMRPMFGGRGFVPFSPGSPTEQSVHGGR

SEQ ID NO: 14072 - protein, 446 aa, Rhodopseudomonas palustris CGA009
MRKIVVRSLAVLGVVAVPVVSALALQREQTAPADLDLIGGVIQLVQRAYVHPIPSDELTKDALKGLLNRLDPHSDYMDEKEFKDMQTDMSGQFGGLGMQITAQGGIPRIVSPIDGTPAARAKLEPGDLIIKVGTATTQGMSLRNVVDMLRGAPGTKVTITVLRGKDEPFDVTLTREIIRVASVKSEIKPDGVGYIRISQFGADTADGFTAALTKLKSDAKDGGLKGLVIDLRNDPGGLLNAAVSVAGDLLDGGTVVSIRGRQADDQRVFSAPSKGDKLPGVPIVVLINGASASASEIVAGALQDRKRATVMGTTSFGKGSVQTVIPIKGHGAVRLTTALYYTPAGRSIQDEGIVPDVIEEAPKDQQISGGPLIRESALHGAIANPGQLGKSDASATKATPKTGEPTDDKTKSATSAPIKADLIGKPEDAQLNAALALVLKKDAAPK

SEQ ID NO: 14073 - protein, 530 aa, Streptomyces coelicolor A3(2)
MDVMPLLLLVAGSAAVAAAGRRVPVPVPLLLVAAGLAVSYVPGVPDYTLDPHIVLPLLLPPLLYTAATDSSYLDLRAQARPVALLSVGYVLFATFVVGCAAYLIVPGLPLTAALVLGAVVAPPDAVAATAVARRVGLPSRITTILQGESLVNDATAITAFKVALAAAVGEGATWAGGIGEFLIAAVGGVGVGLVLMVPLHWLRTHLTEALLQNTLSLLIPFVAYAVAEQVQASGVLAVVVVALYLGHRAWEVDFATRLQEEAVWKMVAFVLESAVFALIGLQLPVVLKGLGEYEGADAAWYALAVFLVVAVARFVWVYPATYLPRLSARVRAREGELSWKGPFVIGWAGMRGVVSLAIAFSIPLTVHGGEPFPERNLILFLTFTTVIGTLVVQGVSLPPLIRLLKFPAHDVQAETLAEANAQAQASRVAELRLDDLLADERNALPAPLADRLRMVLERRRNAVWERLGQVNPVTGETVDDTYRRLSREMISAEREVFVRLRDGRYIDDEMLRTLLRRLDLEEAAAYREAT

SEQ ID NO: 14074 - protein, 452 aa, Methylobacillus flagellatus KT
MKAGTQKTLTHSDLVEQGVRFLLASYVDLHGVPKAKAVPISHFDRMMNGSEMFTGAALDGVPQEISDEEVAAHPDMGSAIVLPWSKDIAWLPSDLYTQGEPFNACSRTILKKVRQQAAELGMAMQLGIEAEFFVLKDQEAGGFSPISTRHHLKKPAYDVARLLDNKPWLSELVEAMDSLDWGVYSFDHEDGIGQFEIDFSYFEVLRMADNFTFLRMMANEIARKHGGFASFMPKPYGDRAGSGAHFNISLTDINTGLNLFEPEQDDPRGCGLSTLGYQFIAGVLRHLPAICAVVAPTVNSYKRLVKQGSMSGFTWAPVFCCYGNNNRTNTIRIPLGGKRIEIRAVDSACNPYLGAAMILAAGLEGIRENLDPGDPHLDNMYEKTPEELASLGIRELPKTLEEAIDAFEADPLSRQVFGDQMFSAWTQYKREEWLSYITHVSDWEYDRYLKLF

SEQ ID NO: 14075 - protein, 1023 aa, Ostreococcus tauri
MEQKVSRRRKAPDVVNDNEFVPALDTDDDLETFNEEAAYADRDEQKMELKELEAESELPLDQLLLRYGIGSHRDITPKADSETADVVALGHTPLSAKTVSLLELRTGEMQEHVLSAASHLADEDGIILRYQSLESKIKPTKPLPHFPEPIPNKCHWQHVVEEMTWLSGDFSRERKWRRRTASKIATLLVAHHSRNAQTKRGQVKDITSTRRAAKAISNMIISFWNKVEKVLTLQRQVVAAHTEKLQLDAQLDDLVKVTESYSSQLAERLSHSTSFKPQNLIGEHSVRDSQYNDTSTVSSAKKTMVADGNTSGEALRFPLLKYTLRDYQLDGVKWLTHSYISGLNVLLADEMGLGKTIQTIALLSTLASEFGNWGPHLIVVPTSVMLNWEVEFKKWCPALKVFTYFGSVKERRLKRHGWTKPNSFHVCITSYKIVTQDQVIFRRKNWEYLILDEAHMIKNWQSQRWQVLLNFSTKHRLLITGTPLQNELMELWALMHFLMPELFTSHSEFKDWFANPMSAMADGTQVVNETIVTRLHSILRPFILRRLKSDVEKSLPEKREHIVKCVLSRRQRRLYEEYISSSSTMRTLSSGNVMGMMNCLVQLRKVCNHPDLFAGRQICSAYDMTHVDKLSPFAYFAHLSHSAPRISGVHLEKTASEAGTNATEPNALRMKFQVRRNASRHCTQVDVIRNDDSMVRSTKCLHANDKETSYSRECRVALHSHLHDGSLPFTFLIPRVRTTSPTVFWETSRDLHPRASRYMDENILRLLAPLRKSIIRQSMFFPDKQLVQFDCGKLQVLATLLRTLKQGNHKVLIFTQMTRMLDILESFLNLHGYSYCRLDGSTSTEQRQLLTQRFNGDDRIFIFILSTRSGGFGINLTGADTVIFYDSDWNPAMDQQAQDRCHRIGQTRDVHIYRLIGEGTIEESILQKAIQKRELDSMAIQLGNFNTGTLVSTDVKVCMFGKGQTSHEVSAEGISASNPQADQEFRTRDETSYREEIQPVASFDASKLLPVERYALDHCATRG

SEQ ID NO: 14076 - protein, 368 aa, Staphylococcus aureus subsp. aureus COL [sequence omitted]

SEQ ID NO: 14077 - protein, 468 aa, Pseudomonas syringae pv. syringae B728a
MSKSVQLIKDHDVKWIDLRFTDTKGKQQHVTMPARDALEDDFFEVGKMFDGSSIAGWKGIEASDMILLPDDETALLDPFTEEPTLVLVCDVIEPSTMQGYDRDPRAIAHRAEEYLKSTGIGDTVFVGPEPEFFIFDEVKFKSDISGSMFKIFSEQASWMTDGDVDGGNKGHRPGVKGGYFPLPPVDHDHEIRTAMCNALEEMGQTVEVHHHEVATAGQNEIGVKFNTLVKKADEVQTLKYCVHNVADAYGRTATFMPKPLYGDNGSGMHVHMSISKDGKNTFAGEGYAGLSDTALYFIGGIIKHGKALNGFTNPSTNSYKRLVPGFEAPVMLAYSARNRSASIRIPYVNSPRGRRIEARFPDPAANPYLAFAALLMAGLDGIQNKIHPGDAADKNLYDLPPEEAKEIPQVCGSLKEALEELDKGRAFLTKGGVFSDDFIDAYIELKSEEEIKVRTFVHPLEYELYYSC

SEQ ID NO: 14078 - protein, 1144 aa, Populus tremula; identical to SEQ ID NO: 7175

SEQ ID NO: 14079 - protein, 497 aa, Acidovorax sp. JS42
MNLLDPTVITFGIYLLAMLFIGWLGYRATTDLSDYILGGRSLGSFVTALSAGASDMSGWLLMGLPGAVYLSGLSEAWIAIGLTIGAYLNWRLVAARLRLYTERTNNALTLPDYLASRFEDGANVLRLVTTAVILVFFTIYCASGVVAGARLFESMFGLPYQTALWVGALCTIAYVFIGGFLAVSWTDTIQASLMITALILAPVVAYFAVTGELQAGQSLTEMIGAQKLDLMHNASVIGVVSLMAWGLGYFGQPHILVRFMAADSVASIPRARRIGMTWMVLCLGGAVAVGLVGIPYFAVHTQQAAGVQANAETVFIEIARQLFNPWIAGLLLAAILAAVMSTLSCQLLVCSSALTEDIYRVFLRKNATQRELVWVGRAMVFAIAVVAIVIAGNPNSRVLSMVSYAWAGFGAAFGPVILLSLFWRGMTRNGALAGIVVGAVTVVVWKQGGWLGLYEIVPGFVLGALAVVLVSKLGKQPSPAMLQRHDAVDAEMARLQA

SEQ ID NO: 14080 - protein, 327 aa, Arabidopsis thaliana
MRVPKDGFSGTGIFPHPFHKMIMKPHHFEILNFLYKNLVVENSNGCIIAQTPLSEKTFLMISFIYGYLEKHPNSKSLFVLPKWVLNLEVLKRWIKTWSIIFLGAKQFSNIVSDNSGAEASDSCRDILLNILSVVVFDRGTDPRNEMMSFLKVVSRIKTPHKVLLTGSLYQNNIKEVFNILDVAFPEFLKHNQIGKNFRKLLNVEADGPSTNLKMPLFDKLEEALLSQDSDHGDKICYLTELKMLTNKVIYNHKGECLLEVPGLMDFTVVLKPTSSQKSAWEVERKSNGKGFKKYSTLSGIMLHPLLCAFSDRAKGLPAPNEDEMDEM

SEQ ID NO: 14081 - protein, 215 aa, Shigella boydii
GCGFIGKLLADAGIQLTFADVNQVVLDALNARHSYQVHVVGETEQVDTVSGVNAVSSIGDDVVDLIAQVDLVTTAVGPVVLERIAPAIAKGLVKRKEQGNESPLNIIACENMVRGTTQLKGHVMNALPEDAKAWVEEHVGFVDSAVDRIVPPSASATNDPLEVTVETFSEWIVDKTQFKGALPNIPGMELTDNLMAFVERKLFTLNTGHAITAYL

SEQ ID NO: 14082 - protein, 370 aa, Citrus sinensis
MAAFSYQQHHHPFLLDSSEFIEEGSFFSQLYYPPKFPTHDDHQEMIVVNNNSNNLLDAAAVFKTSCGDNHNHHSDDNCNEPSNNNSLATKNQSTAVSSTEQQVTQSTVTTTATTTRMDKKRKNRTNASSSFNSAQSKDPREVKSKKQKKGNVNDAKKEEKENSPKADSEKKVAKEPPKDYIHVRARRGQATDSHSLAERVRREKISERMKILQKLVPGCDKVTGKAFMLDEIINYVQFLQNQVEFLSMKLASVNPMFYDFGMDLDNTFMVRPDDQQNLNSIIAASASAPQVQCSPTAQLTAFADTTTAFAPADHRNNYPVLDTALLLQQGQRPNALIYQDNGNSLLWDVEDQKQRFLNPSGFTSNLCSFN

SEQ ID NO: 14083 - protein, 445 aa, Gemmata obscuriglobus UQM 2246
MFHPVELVLALLAVTVALALIARKLRVAEPIFLVVGGLLLGLQPWVPGFRIDPQVVFLLFLPPLLYAAAFRTPWPEFRAQLRAITLLAVGLVLFTTAAVAAAAHYLLDLPWAVAFVLGAIVSPPDAVAAVAVTQRLRVPRLIVTILEGESLVNDATALVALRFAVAAVATGAFSLAGAGWEFVLVSAGGVGVGVAGGWLVYRFHRWLDRSGVADSKLVITVTLLTPFAVYLTAEHLHLSGVLAAVSAGLWIGNRCEEVFTHELFEEARAVWEWIEFLLNGLVFILVGFALRQILEQFGDTTHTPRELAIGAAGVCGATIVARLLWMFPGAYVPRWVDNRLGCAGPYPSWRSVTVVGWTGMRGAVSLAAALALPLTTEDGRPFPGRDLIQLLTFAVIFATLVGQGLTLPLLIKGLGVSAVPAPRTEDADESEREWEARADADSTDT

SEQ ID NO: 14084 - protein, 430 aa, Trichodesmium erythraeum IMS101
MVIAKRGLILGVTALMLTGVTVIGAGIHLSSQASLSNNAPKELIDEVWQIIDKTYVDGTFNQVDWKATRNEYLDKTYTSEEQAYDAIKEMLKKLDDPYTRFMDPEEFKNMQIDTSGELTGVGIQLTQDPDSKKLVVISPIEDTPAFDAGIQAKDIISKIDGQSTKGMNINEAVSLIRGPIGSQVILTIKRENLEIEFPIVRAKIEIHPVKYSQKESYNSLGKVGYIRLSQFSANAAGEMREAIGNLETQKVSGYILDLRSNPGGLLYASIEIARMWLKRGDIVSTVDRNGVTDRQKANNRSLTDKPLVVMVDGGSASASEILSGALQDNKRATLVGTKTFGKGLVQSVRSVGKGAGIAVTIAKYFTPNGRDINKLGIQPDVKIPLSEKQKETLQKNRDKIGTIEADPQYAKALDILNKEIAEFQNQTAQW

SEQ ID NO: 14085 - protein, 213 aa, Solibacter usitatus Ellin6076
MTPAAARLGLWTPIEVFLYCWWPLAADLEQAALLPCPKQIKTHDGGIYENPTDTNHRKESYEIPGFVDRILAALPGLHEHHCGKGYAGGFVERLREGTWFGHIVEHVCLELTDRAGIPVNRGKTVEAGAEGIFYVAVEYRSEAGMRRLLEISVDYVEALIAGRPYRLEEGIAEVIDIVARFELGPSTRAIIDAAVGSLGFQVTMPIWLRTAGQ

SEQ ID NO: 14086 - protein, 704 aa, Pseudomonas syringae pv. syringae B728a
MRYQLSSRRISMKQLFPSTALALFVGLSVLPMSASTFAANSWDNLQPDRDEVIASLNVVELLKRHHYSKPPLDDKRSAIIYQSYIKQLDPSRSYFMASDIAEFDKWQFQFDDFLKSGDLNAGFIIYKRYLDRVNARLNFALGELGKGVDKLDFNTKETLLVDRKDAAWPKDTAELDELWRKRIKDEVLRLKIAGKDPAKIQETLTKRYKNQQARLNQTRAEDIFQAYINTFAMSYDPHTNYLSPDSAENFDINMSLSLEGIGAVLQSDNDNVKIVRLVPAGPAAKTKQVAPADKIVAVAQGDKEMVDVIGWRLDEVVKLIRGPKGSVVRLEIIPASNAPNDQTTKIVAITREAVKLEEQAAKKSILHLKQDGKDYKLGVIDIPAFYLDFKAYRAGDPEYKSTTRDVKKLLTELQAEKVDGVVLDLRNNGGGSLQEATELTSLFIDKGPTVLVRNADGKVDVLEDEAKGAFYKGPMALLVNRLSASASEIFAGAMQDYHRALVIGGQTFGKGTVQTIQPLNHGELKLTLAKFYRVSGQSTQHQGVVPDITYPSLIDTKEIGESALPEAMPWDSIKPAIKPAIDPFRPFLAQLQARHEARSAKDAEFVFIEDRLALAKKLMNEKTVSLNEADRRAEHASIESKQLALENTRRKAKGEEPLKELKKEDEDALPVEDEKTKPEDDAYLAETGRILIDYLGLSAAVAKK

SEQ ID NO: 14087 - protein, 109 aa, Triticum aestivum
MSAAEGAVVFSEEKEALVLKSWAIMKKDSANLGLRFFLKIFEIAPSARQMFPFLRDSDVPLETNPKLKTHAVSVFVMVIHHASPNDVLLYRYASMADQCVCASMCCDWR

SEQ ID NO: 14088 - protein, 1531 aa, Trichodesmium erythraeum IMS101
MAILHSFWVTEHEQPSFLFIWGEAWHRVTEEDAGEVEKITNNPYSITLDELLKLSEANIYLSLEKHKKSTNQTLGIPTKLSESNQKLYPIHSAISLSEIPENLYIYPWKIEGICLEPDEAIKFLQSIPLGQTTESFIGSDLKFWSHLARWSLDLLARCKFLPSIEQRSITQEFITTWQPLIDSSIDQTRLKNFAQQMPLVCRTYNLDWQLHPSLESLQIITKNNSYSNLPRLQSSQEIIQDFLKNTIDKQIRQLSAEISLTETTSLNSSIRQWLKSLSGKLSLKLPAPQETKKIQKILDNWKSPLQEYQAIENKFVACFCLHSPSNNSQQWKLEYCLQGLDNPDFLVDAKTIWENPVASLNYQGKTIKLPQETLLKGLGLASRIYPIIEPSLQEATPQYCLLTSQQAYDFIKSGSGRFIDSGLGVILPPSLANREGWASRLGLSIQATAPKMKKTEKLGLKSLLNFKWQLSIGGHKLTKAEFEKLVSQDSPLVEVNGEWVELQGQDVRAAKNFFASRKDQMSLSLEDALRLATGDTQTVEKLPVVNFEAGGQFQELLDTLTNNRSLEEVSTPENFRGELRNYQARGVSWLSFLERWGLGACLADDMGLGKCVLHDTEIYVNGMVMEAEQIWQAYAGEAEFDGEGFWTEPNKELLVNSLDETTGKIVFARIRRLYRQWVREKLRKVRLKDGSSITITCRHKLFIRDSWKNDFQVGDDVCVPAKLMWDGKPEDPDVVKFVAWQVAEGWERVNSGMFGVSQKGKDVLEGLLEVFSRLGKRYDIKINCPKVVAHGSKKNCYEFSAHSLEYRKFLEEKRYGWGKRSHEKTIPLFIMQADLDSVRVFLSNYFDAEGWVNKTVRCVEISTASSQLIQELSILLRRFGVWMKISPQQKCATNGTGVFCTYYIGTFGGNSARCFLQEIGFNDSGKQENLKSICEKIADSNVEGIPASDIVAELVEKTQLPVGSLGIQDPIYMDGCQDFSPTSLEKVINSIEDIISGAGEEEYGQLKSSKLRNKTLEAYSLLNILELEIYKTRLQKLLNQEVYYCQIESIEEMEYEGWVYDFEVSKYHNFVANNIICHNTIQTIAFLLKQQEQKALKGPTLLVCPTSVLGNWEREVKKFGPTLKAIVHHGDKRAKGKGFATAVKDTNLVITSYALLHRDEKILETIKWQSVIVDEAQNIKNPEAKQSQAARKLDASFRIALTGTPVENRLSELWSILDFLNPGYLGQKQFFQRRFAIPIEKYGDTSSLQILRSLVQPFILRRLKTDKDIIQDLPEKQENTIFCPLANEQALLYQNIVENSLAEIDTVGGIQRKGKILALLIKLKQLCNHPVLLQIKKGSRKKVEITDKNSGKLQRLGAMLEEIISEEERAIIFTQFAEWGKVLQPYLQKSLGREVSFLYGSTQRSKREEMIDQFQLDPQGPPVMILSLKAGGTGLNLTRANHVFHFDRWWNPAVENQATDRVFRIGQTRNVQVHKFVCTGTLEEKIHDLIESKKELAEQVVGAGEKWLTELDTDQLRNLLILDRNQVIKEE

SEQ ID NO: 14089 - protein, 215 aa, Arabidopsis thaliana
MGKKKCELCCGVARMYCESDQASLCWDCDGKVHGANFLVAKHMRCLLCSACQSHTPWKASGLNLGPTVSICESCLARKKNNNSSLAGRDQNLNQEEEIIGCNDGAESYDEESDEDEEEEEVENQVVPAAVEQELPVVSSSSSVSSGEGDQVVKRTRLDLDLNLSDEENQSRPLKRLSRDEGLSRSTVVMNSSIVKLHGGRRKAEGCDTSSSSSFY

SEQ ID NO: 14090 - protein, 227 aa, Paulownia kawakamii
MAREKIQIKKIDNATARQVTFSKRRRGIFKKAEELSVLCDADVGLIIFSSTGKLFEYASSSMKEILGRHNLHSKNLDKLEQPSLELQLVEDSNYSRLSKEVAERSHQLRRMRGEELQGLSIEKLQHLKKSLESGLSRVIEKKGEKIMKGDQSTSRKGKQLMEENERLRQQVADISNDCKNNAASDSENIVYDEGQSSESVNACNSVGPPQDYDSSDTSLKLGLPYSG

SEQ ID NO: 14091 - protein, 1064 aa, Bacillus thuringiensis serovar konkukian str. 97-27
MSFTLNKSIIKEVCGETSYKRGEAYYKSNKVIVNHYDETKEICEATVKGNEDFYVTVEKAKKGDVVARCSCPSLASFQTYCQHVAAVLIQINYNQQTGGMGSVSSRNDQLTNGMFQLFADKPLRPKSKQHRFDTREILDVAFICSPVATKSGGALLGIQLKLAKTYFINHIREFLSKVEKRETFHYSNEFTYTPDIHSFKQETDVIIQHLIKIYHNEKMYEDALEVHAKQDESMIFIPPASWNDMLSALSRAEYVQLKQNEQLFHGLQISKGLLPLHFEFTKGNNGGFTLHIAGLNRVRVMEMYNNALYDGKLYHLPMEDCMRLIELQKMMSRSNSNQFYIPENKMEHFVAKVVPGLMKLGTVRIDEGISDRVETPSLKAKLYLDRVKNRLLAGLEFHYGNVVINPLEEDGQPSVFNRDEKKEKEILDIMSESAFAKTEGGYFMHNEEAEYNFLYHIVPTLKGLVDIYATTAIKLRIHKGDTAPLIRVRRKERIDWLSFRFDIKGIPEAEIKGVLVALEEKRKYYRLANGSLLSLESKEFNEINQFVKESGIRKEFLHGEEVNVPLIRSVKWMNGLHEGNVLSLDESVQDLVESIQNPKKLKFTVPQTLRAVMREYQVYGFEWMKTLAYYRFGGILADDMGLGKTLQSIAYIDSVLPEIREKKLPILVVSPSSLVYNWLSELKKFAPHIRAVIADGNQAERRKILKDVAEFDVVITSYPLLRRDIRSYARPFHTLFLDEAQAFKNPTTQTARAVKTIQAEYRFGLTGTPVENSLEELWSIFHVVFPELLPGRKEFGDLRREDIAKRVKPFVLRRLKEDVLKELPDKIEHLQSSELLPDQKRLYAAYLAKLREETLKHLDKDTLRKNKIRILAGLTRLRQICCHPALFVDDYKGSSAKFEQLLDILEECRSTGKRILIFSQFTKMLSIIGRELNRQAIPYFYLDGNTPSQERVELCNRFNEGEGDLFLISLKAGGTGLNLTGADTVILYDLWWNPAVEQQAADRAYRMGQKNTVQVIKLVAHGTIEEKMHELQESKKNLIAEVIEPGEEKLSSITEEEIRDILMI

SEQ ID NO: 14092 - protein, 349 aa, Pseudomonas aeruginosa PAO1
MPAEVAAGLPPLPPNHFYFYPPDPLLEGDGAITAIEDSDPFDQYVYRLRRVLYQGRTRWQNVLIADTYNYDRVLMLDGAIQSAESDESLYHELLVQPAMLAHDEPRDVLIIGGGEGATLREVLSHASVRRAVMVDLDRELVELCREHLFQWHQGAFDDPRCELLAEDGRAYLERDPSLYDVVIIDVVDMLDNGPAQALYTRQFYELLHSRLRPGGVVAVQGLEFSHSDDKPHAALARTLRSVFSQVHSYRATVPSFLSSWGFLLASDWLDTNHWQAEDIDRRIERKLGPLWLDHLDGDYLKACFVMDRETRFLLAQPGPVLEDGVPFVAPPDIEEIEFGPAQLPALART

SEQ ID NO: 14093 - protein, 105 aa, Vitis vinifera
MILLIKKIRILRERESPENSPTILCFDIFRPPDLTVNMTTSRRLADRKVEKFEKNITKRGSVPETTTKKGSDYPVGPVLLGFFVFVVIGSSLFQIIRTATSGGVA

SEQ ID NO: 14094 - protein, 1011 aa, Aspergillus nidulans FGSC A4
MVFKPFKPLSIRKPPQPADPTQKPSIKPLETDDGPPAKRPRLFSQDTSNTENTRTTLANQRKPLIQVTNVSEASALTSGGSGDGSAYVDSSLPEARRKPTTKKNKIWDGDGIVSVRDGYVYLQDISGRAMGRAMYGSVLKPGVILSVGGKEVEIDTEIPKEEYLSGKRSLMTKTEAPTPPSLTRPLPSKKTSVPVLMSREKDISRSEISAPSPGLAETRVKESQAANLASRGSISGAYKRPLLESTVMPAASLDEPTPRHDPKQPGALIMKRPGSAPKGKRIVDVVVDPILAKHLRPHQREGVKFLYECVMGMRSFNGEGAILADDMGLGKTLQTITLLWTLLKQNPIYEAAPVIKKALIVCPVTLINNWRREFRKWLGNERIGVFVFDDKRKRLTDFTMGKAYSIMIVGYEKLRSVQEGLARGNGVDIVIADEGHRLKTLQNKSGQAIQSLNATKRIILSGTPIQNDLKEFFAAVDLVNPGVLGSFKSFIKEFEGPIVRSRQPEATEKDIEKGEARNEELRELTSQFMLRRTADILADYLPPKTEYVLFCKPTNTQAKIYQNVLASPVFQGALGNSESALQLITILKKLCNSPSLLSLKDANEKPSETIAAILSSLPPNLLRHFSPSCSAKIRVLDQLLHYLRTSTSEKVVLVSNYTSTLDLLANLLSSLSLPFLRLDGSTPAQKRQSLVEDFNRHPASTCFAFLLSAKAGGTGLNLIGASRLVLFDVDWNPATDIQAMARIHRDGQKHHCHIYRILLQGSLEEKIWQRQVTKIGLADSVMEHKDSVAQFSRDELRDLFRLDVVSKCQTHDLLACGCGGKGYSTASGNDHTPQQEPEGLSEDDDESDISCLKFPTLMKATEVNMEEQERFFATGGRGPRASVLTSKNSGSGNTNSSKQKIKESLSHYVHIDPSLFMPSTSTLENFGAGGLDQVLGDEVLRSLLTDEENRVQFLFKKSTEPEVKQTPFAADDGAGATPKSRTNSTCRSEPEDGAEARAGNGTADSPVDLSD

SEQ ID NO: 14095 - protein, 690 aa, Yersinia pestis CO92
MNKFVRLAAIAGLLLAGASYATDTTYRIDQLPQLRQEPEHATVSERVTSRFTRSHYRQFALDDQFSAKIFDRYLNMLDYSHNVLLASDVAQFADKKYSLDKELKSGQLDTPFALFNLAQKRRFERYQYALSVLDRPMVFTGNDTIDIDRAKAPWPSSEAELNALWDAKVKYDQLNLKLAGKTDKEIKETLTKRYQSAIKRLTQSNSEDVFQLIMNAFAREIDPHTNYLSPRNTEQFNTEMSLSLEGIGAVLQMDDDYTLINSMVPGGPAAKSKTIAVGDRVIGVGQAGKPMVDVIGWRLDDVVALIKGPKGSKVRLEILPAGKGTKPRTVTLTRERIRLEDRAVKMSVKTIGKERVGVLDIPGFYVGLTEDVKVQLQKLEKQNVSSIIIDLRSNGGGALTEAVSLSGLFIPSGPVVQVRDNNGKVREDSDTDGVVYYKGPLVVLVDRYSASASEIFAAAMQDYGRALIVGEPTFGKGTVQQYRSLNRIYDQMLRPEWPALGSLQYTIQKFYRVDGGSTQRKGVTPDIVMPTGVDPAETGENFEDNALPWDRINAASYTKTGDLKPWEPELLKNHAERIAANPEFQYIQKDIERYKALKDKRNIVSLNYAQREKENRDDDMTRLTRLNERFIREGKKPLKSLDDLPKDYQEPDPYLDETVNIALDLAHKEKAQPQIASRPVAAATAGATVK

SEQ ID NO: 14096 - protein, 638 aa, Oceanobacter sp. RED65
MGKIIGIDLGTTNSCLSVLDGDKARVIENAEGDRTTPSIIAYADDGEILVGQPAKRQAVTNPQNTLYAIKRLIGRRFEDDVVQKDIKMVPYTITKADNGDAWVEVKGEKFAPPQISAEVLKKMKKTAEDYLGEKVTEAVITVPAYFNDSQRQATKDAGKIAGLEVKRIINEPTAAALAYGIDKEGGDRTIAVYDLGGGTFDISIIEVADVDGEKQFEVLATNGDTFLGGEDFDMRLIEFLADEFKKDQGMDLRGDALAMQRLKEAAEKAKVELSSASQTDVNLPYITADASGPKHLNVKVTRAKLESLVEELVKNSLKPCEMALKDAGVSASEVDEVILVGGQTRMPLVQKSVADFFGKEPRKDVNPDEAVAMGAAIQGAVLSGDVKDVLLLDVTPLTLGIETMGGVATAVIEKNTTIPTKKSQVFSTADDNQSAVTIHVVQGERKQASQNKSLGRFDLADIPPAPRGVPQIEVTFDIDANGILNVSAKDKATGKEQSIVIKASSGLNDDEIEKMVKDAEANAEADKKFEEMIQVRNTADGLVHATKKTLEEAGDKATDEEKSAIEAAIAEVEEALKGDDKDAIEAATNKLTEASSGLAQKMYAEQAQQAQGAEGAQEEAGKDDDVVDAEFEEVKDNK

SEQ ID NO: 14097 - protein, 515 aa, Brassica napus
MLDSLVSKLPSLSTSDHASVVALNLFVALLCACIVLGHLLEENRWMNESITALLIGLGTSVTILLISKGKSSHLLVFSEDLFFIYLLPPIIFNAGFQVKKKQFFRNFVTIMLFGAIGTVVSCTVITLGVTQFFKKLDIGTFDLGDYLAIGAIFAATDSVCTLQVLNQDETPLLYSLVFGEGVVNDATSVVVFNAIQSFDLTHLNHEAAFQLLGNFMYLFLLSTLLGVATGLISAYVIKKLYFGRHSTDREEVALMMLMAYLSYMLAELFALSGILTVFFCGIVMSHYTWHNVTESSGVTTKHTFATLSFLAEAFIFLYVGMDALDIEKWRFVSDSPGTSVAVSSILMGLVMLGRAAFVFPLSFLSNLSKKNQSEKIDIKQQVVIWWAGLMRGAVSMALAYNKFTRSGHTELRGNAIMITSTITVCLFSTMVFGMLTKPLIRHLMPHQSTTTSMLSDDNTPKSLHMPLLDGEQQDSFVEFSGSHHDVPRPDSLRGFLMRPARTVHHYWRQFDDSNH

SEQ ID NO: 14098 - protein, 1025 aa, Ralstonia metallidurans CH34
MVVSLCSPGKCRKGTIVSRASLRANEGRRIERSTIAPSDLPPFRSRVSQPELPVERADHDADSVADGGWQATLCALEALAGGVDEAAGTGDGRRLLWALTLDADGVVGTIEPLEQTHGARGWSKPRPVPLARVAEDDTLPQWDVRVARAIRRDASRNRRHVLDRAAAVVALVGHPAVVLSHAPTVPMEVVESAPSLEAVREGDRYVLRIVPPLREALAMEDFLPAAARQEAESLRQITVLQDGPRRLRVVRFTPAQQGAAKLIAGGLSVPADAQARLDSTLRALAGHFQIHADSSGEARERDPESRLRAEVAPVGRGISLRLVVTPLGVLGPRLAPGHGRAQLMATIGGETHVTYRDLDAEHAHVAEVFEALPFLVQQAPAGGEHTWTLDDPEDALTAIEVLPGLAGVIDLEWPRGRELRVLPADIAQLAVSVETGSEWFKLVGELRVAEGLVISLEKLVAWAHGHAGRFMPMAHGVYVALTRQLRDRLRDLAGVGDGVRDGIRVPLVAAPWLDDVLAGAGIDPDAHFRTRVKQLRAARGHDAPVPPTLVAELRPYQLEGFRWMMSLAEAGFGACLADDMGLGKTLQSLAVLLARAAGGPALVVAPTSVCGNWATEARRFAPALRVHVYADGDREAIVGQAAAHDLVIVSYNLLQQARKAFCDRHWHTVVADEAQSFKNPSSRRAQAMFALPADCRIALSGTPVENRLAELWAVMRFCVPGLLGSLARFNEHFANPIERSGARDPRQRLRRMIAPFVLRRTKAQVLDELPPRTELVIRVTPEPTEAAHYEALRRQALSEAERALLRPRKDKKAPAAMTEPEARIHVLAQLMRMRRAACDPRLVTPDVGQPGAKVRAFAELAATLAANGHKTLVFSQFVDFLQMLRQALVDAGLAWQYLDGATPAGERTRRVAAFQAGEGDVFLISLKAGGFGLNLTAADYIVIADPWWNPAAEDQAMGRAHRIGQQRPVTVYRLIAAGTIEERIVDLHQGKRALADGVLDAMDGEAIGRDVPLPDVDELVGLLRR

SEQ ID NO: 14099 - protein, 701 aa, Vitis vinifera
MNDVKDDKNICDDDIRNLSNDDEEEINRDKPRYLEFVSDTNMANPKFSIGLLFTCATEFRAAVRECAIKNGRNVKFVKNEKDKIKYILPSNPWGGSEKGNAGKEDCNSIFDELQFQKPGCGSQSGSDHGLHPEGTVWDIIPGIRNSMYRHQCEGFEFIWKNVAGGIYLDELKRSSFSDGGSGCIISHAPGTGKTRLTIVFLQTYMELYPACRPVIIAPRTMLLTWEEEFKKWNVDIPFHNLNKLEYSGKENITALNFLRRISHQGQSAKSIRMVKLYSWKKDRSILGISYTLFEKLAGERDYTKVQVRKILLELPGLLVLDEGHTPRNEQSLIWKALSKIDTERRIILSGTPFQNNFKELYNTLCLVRPKFADRIAVEQGKWDLLTSSIGKIADDKVEELRAMIEPFVHIHKGTILQENLPGLKDSVVVLQPSDLQRRLLESIREKKNPLELGYLVSLISVHPSLLPSDERKLFFDQTKLEKIKLNPDIGVKTKFLMAFIRFSETMNEKVLVFSQFLDPLTYLMDQLKYHFHWIVGKEVLYMDGQRDVKQRQSSINTFNDPASQVRVLLASTKACSEGISLVGASRVILLDVVWNPSVERQAISRAYRLGQRKVVYIYHLLTSGTMEEEKYCRQAKKDRLSELVFSSKDKTSAGNKISSTVSEDKILEEMVQHNKLKDMFDKIINQPKESNLIETFGLVDI

SEQ ID NO: 14100 - protein, 295 aa, Hibiscus cannabinus
PFSSGTTGLPKGVMLTHKSLVTSVAQHVGGDNPNIYFHERDVILCLLPLFHIYSLNCILLCSLRAGAAILIMQKFEILPLMELVEKYSVTIAPFVPPIILAIAKTPDIQKYDLSSIRMVISGAAPMGKKLEDAVRDRLPNAKLGQGYGMTETVLALNLAFAKEPWETKSGACGTVVRNAEMKIVDPETGTSLPRNQSGEICIRGSQIMKGYLNDPEATKRTIDKEGWLHTGDIGYIDEDNELFIVDRLKELIKYKGFQVAPAELEAMLISHPNISDAAVVPMKDEAAGEVPVAFV

SEQ ID NO: 14101 - protein, 541 aa, Triticum aestivum; identical to SEQ ID NO: 13377

SEQ ID NO: 14102 - protein, 213 aa, Shigella sonnei
GRGFIGKLLADAGIQLTFADVNQVVLDALNARHSYQVHVVGETEQVDTVSGVNAVSSIGDDVVDLIAQVDLVTTAVGPVVLERIAPAIAKGLVKRKEQGNESPLNIIACENMVRGTTQLKGHVMNALPEDAKAWVEEHVGFVDSAVDRIVPPSASATNDPLEVTVETFSEWIVDKTQFKGALPNIPGMELTDNLMAFVERKLFTLNTGHAITA

SEQ ID NO: 14103 - protein, 216 aa, Shigella boydii
NIGRGFIGKLLADAGIQLTFADVNQVVLDALNARHSYQVHVVGETEQVDTVSGVNAVSSIGDDVVDLIAQVDLVTTAVGQVVLERIAPAIAKGLVKRKEQGNESPLNIIACENMVRGTTQLKGHVMNALPEDAKAWVEEHVGFVDSAVDRIVPPSASATNDPLEVTVETFSEWIVDKTQFKGALPNIPGMELTDNLMAFVERKLFTLNTGHAITAY

SEQ ID NO: 14104 - protein, 214 aa, Shigella boydii
GNIGRGFIGKLLADAGIQLTFADVNQVVLDALNARHSYQVHVVGETEQVDTVSGVNAVSSIGDDVVDLIAQVDLVTTAVGPVVLERIAPAIAKGLVKRKEQGNESPLNIIACENMVRGTTQLKGHVMNALPEDAKAWVEEHVGFVDSAVDRIVPPSASATNDPLEVTVETFSEWIVDKTQFKGALPNIPGMELTDNLMAFVERKLFTLNTGHAI

SEQ ID NO: 14105 - protein, 248 aa, Synechococcus sp. WH 5701
PIEKHHHEVAASGQQELGMFAELISAADNVMIYKYVVRNVARKYGRSATFMPKPVFADNGSGMHVHQSLWRDGQPLFFGLGTYADLSQTARWYIGGLLRHAPSFLAFTNPTTNSYKRLVPGFEAPVNLVYSQGNRSAAVRIPLSGENPRAKRLEFRSGDAMANPYLAFSAMLLAGLDGIRQQIDPGDGMDLDLFELPPEDLEQIATLPSSSEGVLAALEADHEYLLAGEVFSEDFISNWIALKSEALQ

SEQ ID NO: 14106 - protein, 108 aa, Ostreococcus tauri; identical to SEQ ID NO: 573

SEQ ID NO: 14107 - protein, 492 aa, Bacillus cereus ATCC 14579
MSTQMLTLTSISIYMLGMLVIGYFAYKRTSNLTDYMLGGRTLGPAVTALSAGASDMSGWLLMGLPGAMFSVGLSSSWIAIGLTLGAYANWLYVAPRLRTYSEIANNSITIPEFLEHRFHDKSHMLRLVSGLVIMIFFTFYVASGLVSGAVLFENSFGMNYHVGLFIVAGVVVAYTLFGGFLAVSWTDFVQGIIMVVALILVPIVTIMNSNGLGPAFDTIRSVDPTRLDIFKGASTLGMISLFAWGLGYVGQPHIIVRFMAIASVKELKSARRIGMSWMIFSVVGAMFTGLIGIAYYSQQELTLSNPETIFLELGKILFHPLITGFLLAAILAAIMSTISSQLLVTSSAVTEDLYRTFFKRSASDKELVFVGRMAVLGIALVGCALAFKQNDTILALVGYAGAGFGSSLGPAILLSLYWKRMTKWGALAGMISGAATVIIWTQFKFLRDFLYEMIPGFAISLLAIVIVSLLTQPSKEVEEQFEDFEKQHRHNL

SEQ ID NO: 14108 - protein, 1357 aa, Azotobacter vinelandii
MSSPAVRSTLASLPDAYKALLYVLFLASPRNKSTLLEQLKRLGVRATTSRAMDGVALGEMLETLQRLKWLERGDERDFFRLNPLACNQVLLLLQSEPQWWPKLRGGLVEHAVATPGGLPVSLWRGLWLALLAGEVPELTQLLLGMEADRSELPHPCGQLLADETGRQLFARLTPGVREVLLEDYLTRANEGLVAAGETYRQGLALLDSDQAKSTELAFQLFLQALWRGDWTRFEALGRSEWVPFGGVFEYLLRGKPGEALEQIQEYIRIQRGSRKRRVELPPTLNACYCLLLLVDGDGQQHAALRQALGLGLKKGLGTAYQMFEKLFEQFQGKGVRGADPAYRVQRLEGFDGLLTAIALYWMDAPASSAWQRRLAQFRTELEEEGYAWLAAELDVLLERQFGLPPAQADWHRSLGLRPLVDLYRRQELWEHALAALAALRPGARSSAPPQPQSSHRLAWMIGSPLTPSPAIEPREQRLGAKGQWSKGRPVSLKRLLEETGSFDYLLEQDRRAIQQIQMHSDAFGIRYQLDGERALPHLVGHPALFWSDAPEVRIDLLAGSVALELRQRGAQIHLALSPEGIADCQGLFIERETPTRLVVYPLGREARQIAEIIGGGLTVPQAAKAQLMETIGSIAPLLPIHSDLPELAVNIDKVTADGKLYAHLLPLQDGLRLQLLVRPLAGGSWFRPGQGAESVLGEQDGKPLQAVRDLQAERRKLKQVLQACPALAEADSEGHEWQLAEPQAALQVLSELQALDAELLECVWPEGERMRIRARPGLRQLQLRLRQCGDWFELDGEVVVDDGRVLKLRQLLELLQSNPGRFVRLGEQDWLALGSSLRRRLDELGRLAERSGAEGLRLNSLTAPLLAELAEEVGCFEADAAWKEHLSRLESLRDYRPRVPNTLQAELRDYQLEGFDWMARLAKWGVGACLADDMGLGKTLQTLTLLLHRSAEGPQLVVAPTSVTPNWLAETTRFAPTLRLHAYRESRSLDGLGPRDLVVTSYGLLQQDAESFAAQRWTTVVLDEAQAIKNAASKRSQAAMALQADFRLVATGTPLENHLGELWNLFRFINPGLLGSREHFTQRFAGPIERGDQGARKALKALIQPFILRRLKSQVLDELPARTEVVYRVPLSDAEQHLYEAMRQQALESISQSGEEGSQSLRVLTEITRLRRFCCHPSLVLPDSDLPGSKLAAFAEIVEELLDSRHKALVFSQFVDHLSIVRKWLEERGIRYQYLDGATPAKERMARVEAFQGGDGDIFLISLKAGGTGLNLTAADYVIHLDPWWNPAVEDQASDRAHRMGQQRPVTIYRLVAENTIEERILALHGQKRDLADSLLEGGEVSAKLDAEALLRLLRGG

SEQ ID NO: 14109 - protein, 442 aa, Desulfitobacterium hafniense Y51
MGFTKEECLKYVQENDVRFIRMQFTDIFGQMKNIAITHNQLAQALDEGVLFDGSAIKGFAGVEASDMLLLPDPSTFTLIPWRPQQGKVARIICDVKNHDGSQFEGDPRYILKRTLQKAHDLGYVFQVGPECEFFLFHTDEEGQPTTITHDAAGYCDLAPIDQGENTRREICLVLEEMGFEIETSHHESAAGQHEIDFKYTDALTAADHIMTFKYVVKIVSQRNGLHATFMPKPLHGVNGSGMHINMSLAKEGRNVFIHPENPGELSETAKQFIAGLLEHIKGITAVANPLVNSYKRLTPGYEAPVHIAWSPMNRSPLLRVPSPRGAGTRLELRSPDPSCNPYLTLALLLEAGLDGLQREMKVPEPVNENIYNLTPEQEKALSLERLPSNLLLALEEMEKDPLIQATLGRHIFTKYIAAKAREWKAYDEMVHQWEIDSYLKIY

SEQ ID NO: 14110 - protein, 339 aa, Arabidopsis thaliana; identical to SEQ ID NO: 10681

SEQ ID NO: 14111 - protein, 510 aa, Mycobacterium tuberculosis H37Rv
MIELTVAQIAEIVGGAVADISPQDAAHRRVTGTVEFDSRAIGPGGLFLALPGARADGHDHAASAVAAGAAVVLAARPVGVPAIVVPPVAAPNVLAGVLEHDNDGSGAAVLAALAKLATAVAAQLVAGGLTIIGITGSSGKTSTKDLMAAVLAPLGEVVAPPGSFNNELGHPWTVLRATRRTDYLILEMAARHHGNIAALAEIAPPSIGVVLNVGTAHLGEFGSREVIAQTKAELPQAVPHSGAVVLNADDPAVAAMAKLTAARVVRVSRDNTGDVWAGPVSLDELARPRFTLHAHDAQAEVRLGVCGDHQVTNALCAAAVALECGASVEQVAAALTAAPPVSRHRMQVTTRGDGVTVIDDAYNANPDSMRAGLQALAWIAHQPEATRRSWAVLGEMAELGEDAIAEHDRIGRLAVRLDVSRLVVVGTGRSISAMHHGAVLEGAWGSGEATADHGADRTAVNVADGDAALALLRAELRPGDVVLVKASNAAGLGAVADALVADDTCGSVRP

SEQ ID NO: 14112 - protein, 162 aa, Coprinopsis cinerea okayama7#130; identical to SEQ ID NO: 594

SEQ ID NO: 14113 - protein, 535 aa, Mycobacterium tuberculosis H37Rv
MSSLARGISRRRTEVATQVEAAPTGLRPNAVVGVRLAALADQVGAALAEGPAQRAVTEDRTVTGVTLRAQDVSPGDLFAALTGSTTHGARHVGDAIARGAVAVLTDPAGVAEIAGRAAVPVLVHPAPRGVLGGLAATVYGHPSERLTVIGITGTSGKTTTTYLVEAGLRAAGRVAGLIGTIGIRVGGADLPSALTTPEAPTLQAMLAAMVERGVDTVVMEVSSHALALGRVDGTRFAVGAFTNLSRDHLDFHPSMADYFEAKASLFDPDSALRARTAVVCIDDDAGRAMAARAADAITVSAADRPAHWRATDVAPTDAGGQQFTAIDPAGVGHHIGIRLPGRYNVANCLVALAILDTVGVSPEQAVPGLREIRVPGRLEQIDRGQGFLALVDYAHKPEALRSVLTTLAHPDRRLAVVFGAGGDRDPGKRAPMGRIAAQLADLVVVTDDNPRDEDPTAIRREILAGAAEVGGDAQVVEIADRRDAIRHAVAWARPGDVVLIAGKGHETGQRGGGRVRPFDDRVELAAALEALERRA

SEQ ID NO: 14114 - protein, 169 aa, Oryza sativa
MGAAESVPETSIHEFTVKDCNGKEVSLEMYKGKVLIVVNVASKCGFTETNYTQLTELYQKHRDKDFEILAFPCNQFLRQEPGSDQQIKDFACTRFKAEYPVFQKVRVNGPDAAPLYKFLKASKPGLFGSRIKWNFTKFLIDKNGKVINRYSTATSPLSFEKDILKALED

SEQ ID NO: 14115 - protein, 678 aa, Oryza sativa Japonica Group
MASTTTKNALLLLLLLLLLFPLLHSSLADVAAAAPSSASAAEVDALMELKAALDPSGRLLPSWGARRRPGKGLAGAISPAVAMLPGLTGLYLHYNELAGAIPRQLGDLPMLAELYLGVNNLSGTIPVELGRLPALQVLQLGYNQLSGSIPTQLGQLKKLTVLALQSNQLTGAIPASLGDLPELARLDLSSNRLFGSIPSKLAAIPKLATLDLRNNTLSGSVPSGLKKLNEGFHFDNNSELCGAHFDSLKPCANGDEDDNEEGSKMARKPESTNVKPLQAPQTMNVNRDCDNGGCSRSSSSSTTLSSGAILAGTIIIIGGAAACGISVISWRRRQKQKVGGGGTVESLEGRASSSNASSSLINVEYSSGWDTSSEGSQQGLRLSPEWSPSVRYNMEEVECATQYFAGANLLGRSGFAATYRGAMRDGAAVAVKSIGKSSCKAEEADFLRGLRAITSLRHDNLVALRGFCRSRARGECFLVYEFMANGSLSRYLDVKDGDVVLDWATRVSIIKGIAKGIEYLHSSKANKAALVHQNICADKILMDHLFVPHLSGAGEHKLLADDVVFSTLKDSAAMGYLAPEYTTTGRFTDRSDVYAFGVVVFQVLTGRKAVSSELRLLGGGGGAEYSGKLDDLVDPRLGGRFSRPEAAKLAGIALLCTSESPAQRPAMAAVLQQLGATQ

SEQ ID NO: 14116 - protein, 467 aa, Erythrobacter sp. NAP1
MKIAALLRSAALVTAVALVPATTATMAQVDARAGTEIAKIFTIMQRVQANYVEPVEDEVLVRGAIDGMLAALDPHSAYLDGSDLERLNTLIDGNYSGLGLSVILEDGAVKVISPFKGSPADQMGIKAGDFITHLDGDLIYGGDLDDAVARMRGKAGTSIQLTIFRPGRDEPFEVDVTRGVIELEPVTYELQAGNIGLISVNEFSADVGRDVFEAWQSLQTEATGRMSGLVLDLRSNPGGSLDEAVALTDLFIDEGQIVSQRGRSWGETFQFEADDINYYLRRRMSRDQAQIFMGQIAKDVPMIVLIDAGSASASEIVAGALQDHGRALIMGQRSFGKGSVQSLLPLGPDSALKLTTARYFTPNGKSVQEGGIAPDIRVPQLSDPDYALRERYQTRESDLRGHLINELGIADEEMEDDRIDDPRFQLTSEQLEEQGVEDFQLHYALETLRRTTASSVALRPAPAMKRP

SEQ ID NO: 14117 - protein, 560 aa, Kalidium foliatum
MWSQLSSLFYSKMDMLSTSDHASVVSMNLFVALLCGCIVIGHLLEENRWMNESITALLIGLSTGVVILLISGGKSSHLLVFSEDLFFIYLLPPIIFNAGFQVKKKQFFRNFITIIMFGALGTLVSFSIISLGAMTTFKRMDIGSLELGDYLAIGAIFAATDSVCTLQVLNQDETPLLYSLVFGEGVVNDATSVVLFNAIQNFDLTHIDHRIALQFSGNFLYLFFASTLLGAMTGLLSAYVIKKLYFGRHSTDREVALMMLMAYLSYMLAELFYLSGILTVFFCGIVMSHYTWHNVTESSRVTTKHAFATLSFVAEIFLFLYVGMDALDIEKWRFVSDSPGTSVAVSSILLGLLMVGRAAFVFPLSFLMNFSKKTHSEKVTFNQQIVIWWAGLMRGAVSMALAYNQFTRSGHTQLRGNAIMITSTISVVPFSTMVFGLLTKPLILFLLPHPKHFTSASTVSDLGSPKSFSMPLLEGVQDSEVDVDNQDEGTNNHVEGTNNRTIARPGSLRMLLNAPTHTVHYYWRKFDDSFMRPVLGGRGFVPYVPGSPIEQTTNNLLDRT

SEQ ID NO: 14118 - protein, 213 aa, Shigella flexneri 2a
NIGRGFIGKLLADAGIQLTFADVNQVVLDALNARHSYQVHVVGETEQVDTVSGVNAVSSIGDDVVDLIAQVDLVTTAVGPVVLERIAPAIAKGLVKRKEQGNESPLNIIACENMVRGTTQLKGHVMNALPEDAKAWVEEHVGFVDSAVDRIVPPSASATNDPLEVTVETFSEWIVDKTQFKGALPNIPGMELTDNLMAFVERKLFTLNTGHAI

SEQ ID NO: 14119 - protein, 417 aa, Arabidopsis thaliana; identical to SEQ ID NO: 13402

SEQ ID NO: 14120 - protein, 388 aa, Paracoccidioides brasiliensis
MGKKAVHFGGGNIGRGFVGEFLHESGYEVVFVDVMDSVIDALQKASSYTVTEISGEGEHKKVIENYRAINSKHNLDDVIKEISTADVVTCAVGPNILKFIAPPIAKGIDIRTQPKPLAVIACENAIGATDTLHGFIKDNTDESRRDSLPSRAQFANSAIDRIVPTQDPNSGLDVKIEKFYEWVVEKTPFGDVGHPDIKAIHWVDNLEPYIERKLFTVNTGHATAAYFGYNAGKPTIHDALKDERIRSQVNAVLAETSALIVEKHHIPAEEQHDYVQKIITRISNPYLEDVVQRVGRAPLRKLSRKERFIGPAAQLAERGQQVDALMGAVEEALKFQNVPDDEESFELHKILKELSAADATTKLTDLEPDHPLYPRVLEKVTKVQSETK

SEQ ID NO: 14121 - protein, 556 aa, Suaeda salsa
MLSQLSSFFASKMDMVSTSDHASVVSMNLFVALLRGCIVIGHLLEENRWMNESITALLIGLSTGIIILLISGGKSSHLLVFSEDLFFIYLLPPIIFNAGFQVKKKQFFRNFITIILFGAVGTLVSFIIISLGSIAIFQKMDIGSLELGDLLAIGAIFAATDSVCTLQVLNQDETPLLYSLVFGEGVVNDATSVVLFNAIQNFDLTHIDHRIAFQFGGNFLYLFFASTLLGAVTGLLSAYVIKKLYFGRHSTDREVALMMLMAYLSYMLAELFYLSGILTVFFCGIVMSHYTWHNVTESSRVTTKHAFATLSFVAEIFIFLYVGMDALDIEKWRFVSDSPGTSVAVSSILLGLHMVGRAAFVFPFAFLMNLSKKSNSEKVTFNQQIVIWWAGLMKSAVSVALAYNQFSRSGHTQLRGNAIMITSTITVVLFSTMVFGLLTKPLILFMLPQPKHFTSASTVSDLGSPKSFSLPLLEDRQDSEADLGNDDEEAYPRGTIARPTSLRMLLNAPTHTVHHYWRRFDDYFMRPVFGGRGFVPFVPGSPTEQSITNFVTENIS

SEQ ID NO: 14122 - protein, 682 aa, Klebsiella pneumoniae subsp. pneumoniae MGH 78578
MNTFFKITALAGLLAIAGHAFAVDDITRADQIPVLKEEPQHATVSERVTSRFTRSHYRQFDLDNAFSAKIFDRYLNLLDYSHNVLLASDVAKFAAKKDQIGDELRSGKLDVFYDLYNLGQQRRFERYQYALKVLERPMDFTGNDNFNLDRSKAPWPKDEAELNKLWDAKVKFDQLSLKLAGKDDKEIRDTLTRRYKFAIRRLAQTNSEDVFSLAMTAFAREIDPHTNYLSPRNTEQFNTEMSLSLEGIGAVLQMDDDYTVINSLVAGGPAAKSKAISVGDRIVGVGQTGKSMVDVIGWRLDDVVALIKGPKGSKVRLEILPAGKGAKTRIVTLTRERIRLEDRAVKMSVKTVGKEKVGVLDIPGFYVGLTDDVKVQLQKLEKQNVSSIIIDLRSNGGGALTEAVSLSGLFIPSGPVVQVRDNNGKVREDSDNDGVVYYKGPLVVLVDRFSASASEIFAAAMQDYGRALIVGEPTFGKGTVQQYRSLNRIYDQMLRPEWPALGSVQYTIQKFYRINGGSTQRKGVTPDIMMPTGNEDRETGEQYEDNALPWDSINAATYVKSGDLTPFGPELLKRHDERIAQDPEFQYIMKDIARYNAMKDKRNIVSLNYAQREKENEEDDAIRLARINDRLKREGKPPLKKLDDLPKDYQEPDPYLDETVHIAVDLAHLEKARPAVEPPASK

SEQ ID NO: 14123 - protein, 473 aa, Synechococcus sp. WH 7803
MASTAQDVLRQIKDEGIELIDLKFTDLHGKWQHLTICSDLLEADSFEEGLAFDGSSIRGWKTIDASDMAMVPDPSTAWIDPFYSHKTLSMICSIQDPRTGTLYDRCPRALAQRALAYLSGSGLADKAFFGPEPEFFLFDDVRYNSSEGGSFYSVDTIEASWNSGRLEEGGNLGYKIQLKEGYFPVAPNDTAQDIRSEMLLMMAQLGIPIEKHHHEVAGAGQHELGMKFAELIKAADNTMTYKYVVRNVAKKYGKTATFMPKPVFNDNGSGMHVHQSLWKAGQPLFFGEGTDANLSQTARWYIGGILKHAPSFLAFTNPTTNSYKRLVPGFEAPVNLVYSEGNRSAAVRIPLTGPNPKAKRLEFRSGDALANPYLAFSAMMMAGIDGIKNQIDPGAPTNEDLFELSAERLSAIDTVPASLNGALEALNADHHYLMEGGVFSKDFINNWIDLKYEEVQQLRQRPHPHEFTMYYDA

SEQ ID NO: 14124 - protein, 254 aa, Triticum aestivum
LSRTSLYKKAGWYRSGIPGISSTHASVLYGRRRHRLLLLQTDKASMLDDAIEYLKHLQLQVQMLSMRNGMYRPSVNLPGAPDQLPTSQMCAALNRVDASSNHPSSMLPMNHFLGAMSGTRHLYGPPNQDRPRHEPLVLSSVPCTTTREPPFLLGPSQGSPLRSLQLTLPAEMIFQEEAMRKHRLSSTQETTSVPGHEMKQETPAARAGHFDACSIWKNQSQDMTPNNPESVLFAPHLRRFGNGNADSGLRAESK

SEQ ID NO: 14125 - protein, 164 aa, Gluconobacter oxydans 621H
MTCAYDFSLPGLSGDTIDLSAYRGRPLLIVNTASKCGFTPQYEDLQHLWSRYGRDYPEGLMIIGVPSNDFGQQEPGSSEDIKNFCHRNYGVSFPMTARQHVRGPETTPLFRWLDKQGGFLARPRWNFYKYLTDRDGNLANWFTPLAKPASNRVEEAVRKVLLDH

SEQ ID NO: 14126 - protein, 496 aa, Symbiobacterium thermophilum IAM 14863
MLSALDPVQVLEAPDVTVTGIAADSRAVRPGDLFVCIPGAHVDAHQFIPDALRRGAVAVVTQRPWAVPTGIGAAVVPDARLALSALADRFYGHPSRALRMVGVTGTNGKTTTAFLVEAIARTAGKAMGVIGTAGMMLGREVLEGKSGYTTPEPQTIHRLLAAMLQRGAWGAVMEVSSHALEQRRTDHCRFDVAVFTNLTHEHLDYHGDMEGYYAAKARLFRGLQPGAAAVVNIDDPYGRRLAEEIPAGVRTLTYGFSEGADIRAEDVHLTGPGARYRLITPVGEADVEAPHLFGTYNVSNAMAAVGAGLALGFSLQDAVAALGTAKGAPGRFERIDEGQDFTVVVDYAHTPDGFEKLLSDVARIKEPGSRVIMVFGSAGQRDPSKRPDMGRIAGEYCDVLVLTEEDPRTEDAMEIARQIASGVARDEVEIHLIEDRVEAIREAIRMARTGDIVLITGKGQETELEVQHPTTWRGDVVEAVDALRDRAREEARGVRA

SEQ ID NO: 14127 - protein, 462 aa, Magnaporthe grisea 70-15
MDRIRSLFARHKPVRNEAEYEPLTEDGLDRRAGAETLLAPEDGGEVPFSWVEYLIFAMVGVAMLWAWNMFMAAAPYFQMRFRDDPWLLDNFQSAILSTSTFTNLAAMLVLTGMQKSASYPLRINTALIINTCTFALLTISTVYFLNVSPGFYLVFVLVTVALSAWATGMMQNGAFAFAASFGRPEYTQAIMAGQGVAGVLPPIAQVVSVLVFPAPIDDQQQQSSQSGAGNAAFIYFLTAVVVSAAALFSFIPLVRRHNALVEMRLADQMAASHASIEEAERAARRVVGPVTLFRKLHFVAGAVFICFALTMFFPVFTTKIVSVRTGKDVSPIFQPQAFIPLAFFFWNMGDLAGRMATILPFSLRHRPATLFGLGVARVLFLPLYLLCNVGGRGAAVNSDLFYLLLVQLPFGLTNGWLGSSAMMAAAEWVDEPEREAAGSFMSLSLVAGLTVGSLLSFTASGV

SEQ ID NO: 14128 - protein, 469 aa, Fulvimarina pelagi HTCC2506
MTDANEILKQIKDNDVKFVDLRFSDPKGKLQHVTMDISQVDEDLFSEGTMFDGSSISGWKAINESDMVMMPDPETAHMDPFFAQSTMAITCDILDPISGEAYNRDPRTTAKKAEAYLSQSGIGDTAFFGPEAEFFVFDDVRYKTDPYNTGFKLDCTELPSNDDTEYETGNLGHRPRTKGGYFPVPPIDSAQDMRSEMLTVMAEMGVSVEKHHHEVAAAQHELGIKFDTLTRNADKLQIYKYVIHQVANAYGKTATFMPKPVYGDNGTGMHVHQSIWKDSKPTFAGDEYAGLSESCLHYIGGIIKHARTLNAFTNPSTNSYKRLVPGYEAPVLLAYSARNRSASCRIPFGQSPKAKRVEVRFPDPTANPYLAFSAMLMAGLDGIKNKIHPGAAMDKDLYDLPPEELKEIPTVCRSLREALESLDSDRDFLKAGGVFDDDQIDAYVELKMEEVERFEMTPHPVEFEMYYSV

SEQ ID NO: 14129 - protein, 918 aa, Bacillus cereus ATCC 14579
MINQTEVTIRLQHVSQGWFLWGEDDSGTPLSVTSWKRHAFTWHSTSFYGTFLKEANFEGKQGVLLTNAQAFEYIANKPMNSFAHIQLNGPITALTKDANELWDAFTSGSFVPDIEHWPKQPSWKVQNTPIEDDTLASLFSAAVNESILQDNRSNDGWEDAKRLYEHYDFTKRQLETALHEEDWLRKIGYIEDDLPFTIGLRLQEPQEEFEMWKLETIVTPKRGAHRIYVYENIDSLPKRWHDYEERITETQEGFSKLIPWLKEGDTFRNELFETEAWNFLTEASNELLAAGITILLPSWWQNLKATKPKLRVQLKQNTVQTQSFFGMNTLVNFDWRISTNGIDLSESEFFELVEQNKRLFNINGQWMRLDPAFIEEVRKLMNRADKYGLEMKDVLQQHLSNTAETEIVEDDSPFTDIEIELDGYYEELFQKLLHIGDIPKVDVPTSLNATLRPYQQHGIEWLLYLRKLGFGALLADDMGLGKSIQTISYLLYIKENNLKTGPALIVAPTSVLGNWQKEFERFAPNLRVQLHYGSNRDKGNSFEDFLQSADVVLTSYALAQLDEEELTSLCWDAVILDEAQNIKNPHTKQSKAVRNLQANHKIALTGTPMENRLAELWSIFDFINHGYLGSLGQFQRRFVTPIEKDRDEGKIQQVQRFISPFLLRRTKKDQTVALNLPDKQEQKAYCPLTGEQASLYEQLVQDTLQNVEGLSGIERRGFILLMLNKLKQICNHPALYLKEEEPQNVVERSMKTKTLIELIENIKDQNESCLIFTQYIGMGNMLKRVLEEKFGQRVLFLNGSVPKKDRDKMIEEFQNGTYDIFILSLKAGGTGLNLTAANHVIHYDRWWNPAVENQATDRAYRIGQKRFVHVHKLITTGTLEEKIDEMLERKQSLNNAVITSDSWMTELSTDELKELLGV

SEQ ID NO: 14130 - protein, 666 aa, Moritella sp. PE36
MKKVLTRTFISASVLLATYAHAFEPAISIQELPTLKQEAQHSEASKRLVNLFTRSHYKSVDFDNAFAVEVFDRYLKQLDAYRTIFLQSDIDSFNKYALSFKKDFRQGRLAPAYDIYTVGLQRRYERFAFALSLLETEIKFDTNDEYYFDTSESEWAKTTAQLDELWRQKVKYEALNLKLTGKDWPEIKKLLHKRYDTAIKRLKQTQSEDVFQTLMNSYARSIEPHTSYLSPRNADRFKTEMNLSLEGIGAVLQTIDDYTVIRSLVAGGPADATKQLKAEDKIVGVAQDDQTIVDIVGWRLDDVVDKIKGPKGTKVRLEIVRGEGASAKHKIVEIIRDKVRLEDRAAKSKIIDVDGEKVGVIEIPSFYDGLTKNVLTEITKLKKDQVSSIIIDLRDNGGGALKEANLLSGLFFDSGPTVQVRDARDKVNVLEDRDGKTYYDGPLVVLVNRYSASASEIFAAALQDYGRALVVGEQTFGKGTVQQHRTLARLYDLYDKPIGSVQYTISKFYRINGGSTQLRGVLPDITFPSAVKPEDTGESIEDNALAWDQIRKASYQQSLALQSTLNSLTLKHNKRVAANPEFSYIQEDIIKYKQELDVKTISLQESVRIKEREKNEAIRLNRLNERLERKELPAVKSLDDKPEDFEFDDAFLLETANIAIDLSKSS

SEQ ID NO: 14131 - protein, 176 aa, Ashbya gossypii ATCC 10895; identical to SEQ ID NO: 624

SEQ ID NO: 14132 - protein, 616 aa, Glycine max
PWSLNLLQGSASPEMPVSQENDNVWVLIPELKAKLHAHQKKAFEFLWQNIAGSMDPGLMEAASKRRGGCVVSHTPGAGKTFLIIAFLVSYLKLFPGKRPLVLAPKTTLYTWYKEFIKWDIPIPVYLIHGRRTYRVFKQKSSIVIPGVPKPTDDVKHVLDCLEKIQKWHSHPSVLIMGYTSFLTLMREDSKFAHRKYMAKVLRESPGVMVLDEGHNPRSTKSRLRKVLMKVQTELRILLSGTLFQNNFCEYFNTLCLARPKFIHEVLKALDPKYKRKGKVAKKASHLLESRARKFFLDQIAKKIDSSNGRERRKGLKMLRNVTNGFIDVYEGGSSDGLPGLQIYTLLMNSTDTQHEILHELHKKMAKVNGYPLELELLITPGSIHPWLVKSAVCAEKFFTQAQLMELEKCKFDLRIGSKVKFVLSLIYRVVKKEKVLIFCHNIAPVKLFVEYFEKYFGWTKGREVLVLTGELELFERGRVMDKFEEPGGVAKILLASITACAEGISLTAASRVIMLDSEWNPSKTKQAIARAFRPGQQKVVYVYQLLVTGSLEEDKYKRTTWKEWVSSMIFSEAFVEDPSQWQAEKIEDDILREMVAEDRSKSFHMIMKNEKASTNK

SEQ ID NO: 14133 - protein, 530 aa, Zea mays
LQLGYNQLTGSIPTQLGHLNKLTVLALQSNQLSGAIPASLGDLLALARLDLSSNQLFGSIPSKLAEIPRLATLDLRNNTLSGSVPSGLKKLNEGFLYENNPELCGAQFDSLKACPNDGNDDNDDGRTPRKPESTSVKPQQIQKTADLNRNCGDGGCSKPSTLSTGAVVAGTVVIVAGAAACGLSAFSWHRRQKQKEAYQRSAVSSLMNVEYSSGGWDTSSEGSQSQHGVARLSSSTEGGSPSVRSFNLEEVECATQYFSDANLIGKSGFAATYKGVLRDGTAVAVKSISKNSCKSEEADFLRGLRTLTSLRHENLVGLRGFCRSRASGGCFLVYEFMANGSLSRYLDAKEGDAADAAAVLDWPTRVSIIKGVAKGIEYLHSSKLAHQSISADKVLLDHLYAPRLSGAGLHRLLADDVVFAALKDSAAMGYLAPEYATTGRSTDKQGDVYAFGVVVLQVLAGRRAVSPPHLQQGGGGGGRLDDLVDPRLRGRFSRAEAAKLAGVALLCTAEAPAQRPTMTAVLQQLGTSSQ

SEQ ID NO: 14134 - protein, 667 aa, Salinibacter ruber DSM 13855
MGKVIGIDLGTTNSVVAVMEGDDPEVIENAEGSRTTPSVVAYKDDGERLVGAPAKRQAITNPENTVSSIKRFMGRFYDEVEDEIEEVPYEVVRGENDTARVQIGDRKYTPQEISAVVLQKLKQTAEDYLGQEVTDAVITVPAYFNDAQRKATQEAGEIAGLNVQRIINEPTAASLAYGLDDESDQVVAVYDLGGGTFDVSILELGDGVFEVNATYGDTHLGGDNFDKRLIDHIADEFEQDTGIDLRDDPMALQRLKEAAEEAKIELSSAKTTTINLPFITATDEGPQHLNMDLNRATFENLIEDLVEKTVPQMEKALDDAGHSKSDVDEVILVGGSTRVPLVQETVEDFFGKQANKSVNPDEVVSLGAAVQGGVLSGDVDDVLLLDVTPLNLGIETLGGVMTTLIEANTTIPTKESEVFSTAADNQTSVEVHVLQGDREMAKDNRTLGRFHLDGIPPAPRGTPQIEVTFDINADGILNVSAEDKDTGKEQSIRVEANSGLSDEEIEKMKEEAEQHAEEDERRKERADTINEANSMAYSVEQGLEEYGDKIPEDKRSTLQEALDALNEELETASADEDITALEDALEELNAAWSAAGEEIREAQQQQAQQGAAAGAGAGAAGAGAAAGAEGPAGGPTGGPASGNGAADSDEEDVQDADYEVVDEGDDE

SEQ ID NO: 14135 - protein, 382 aa, Vibrio parahaemolyticus RIMD 2210633
MKNAVHFGAGNIGRGFIGKLLADAEVEVTFADVDVPLVDQLSHKQEYKVKVVGTECKIDTVTHVTAVNSASEDVIDRIVKTDLVTTAVGPNVLDIIAKTIAKGIAKRFEAGNDAPLNIIACENMVRGTTHLKGEVYKHLDKSLHAKADELVGFVDSAVDRIVPPAEAANDDPLEVTVESFSEWIVDEQQFKGDIPNIAGMEKTNNLMAFVERKLFTLNTGHCITAYLGCLKGHRTIREAIEDPNIHAEVKQAMQESGEVLIRRYGFDHDMHNAYIEKILGRFANPYLVDEVDRVGRQPIRKLGANDRLVKPLLGTIEYGTENQTLLKGIAAALKYTNDTDPQAVELQTSLKEVGVTKTLAKYTGLAEDSDEVAQIETLYNQL

SEQ ID NO: 14136 - protein, 388 aa, Nicotiana benthamiana
MEVISTNKNGSNIFKNGAIPMNGYKNGTSKHQNGHQNGTSEHRTGHQNGISEHQNDHQNGTSEHQNDHHNGRSEQQNGTISHDNGNELQLLGSSNSIKPGWFSEFSALWPGEAFSLKIEKLLFKGKSHYQDVMLFESATYGKVLTLDGAIQHTENGGFPYTEMIVHLPLSSIPNPKKVLIIGGGIGFTLFEMLRYPSIEKIDIVEIDDVVVDVSRKFFPYLAANFNDPRVTLVLGDGAAFVKAAQAGYYDAIIVDSSDPIGPAKDLFERPFFEAVAKALRPGGVVCTQAESIWLHMHIIKQIIANCRQVFKGSVNYAWTTVPTYPTGVIGYMLCSTEGPQVDFKNPVNPIDKETTQVKSKLAPLKFYNSDIHKAAFILPSFARSMIES

SEQ ID NO: 14137 - protein, 108 aa, Arabidopsis thaliana
MASSMLSSATMVASPAQATMVAPFNGLKSSAAFPATRKANNDITSITSNGGRVNCMQVWPPIGKKKFETLSYLPDLTDSELAKEVDYLIRNKWIPCVEFELEHGFVYP

SEQ ID NO: 14138 - protein, 536 aa, Zea mays
MALELSLASASPPAGGGLAQPPPLAPPGKEQQVAGVGILLQISMLVLSFVLGHVLRRHRFYYLPEASASLLIGLVVGGLANISNTETNTRTWFNFHEEFFFLFLLPPIIFQSGFSLSPKPFFANFGAIVTFAILGTFIASVVTGVLVYLGGLTFLMYKLPLVECLMFGALISATDPVTVLSIFQELGSDVNLYALVFGESVLNDAMAISLYRTMSSVRSHAAGGENFFMMILQFLETFVGSMSSGVGVGFISALLFKYAGLDVDNLQNLECCLFVLFPYFSYMLAEGLGLSGIVSILFTGMVMKHYTYSNLSDNSQRFVSAFFHLLSSLAETFVFIYMGFDIAMEEHSWSHVGFIFFSIIFIVVARAANVFSCAYLVNMSRPEHRRIPVKHQKALWFSGLRGAMAFALALQSVHELPEGHGKTIFTTTTAIVVLTVLLIGGSTGTMLESLDVVGDENTSRENYEDNNGYMPPSYEEGTSSGGGLRMKLKQFHKSTTSFTALDKNYLTPFFTSQTDDDNDDDFSQQPQNRRLAFYDQ

SEQ ID NO: 14139 - protein, 491 aa, Dictyoglomus thermophilum H-6-12
MKKLKEIVEYIKDHVIEVIGDVDLNITGIATDSRKVRKGNIFFALPGTKDDGKNYISDAISKGASAVFLEGEVNNIYGVPLVRVREILDVLSKVSSYFYDFPSKYLNIIGVTGTNGKTTTTNLLYHYWKSKGIRSGLIGTIEYKIDDESYPSNFTTPQPQDLQEILRKMVDREVKFLAMEISSHALALKRVDGISLKGAVFTNLTQDHLDFHKTMEEYFQAKLKIFNYLEDGGFAVINRDNEWTGRISLPNRRVFWVSLKNGDLYLKKHENTNNGMLLEIGTPLGDLIIDTKLKGKFNIYNILFAVGVLIGLGEPLEDISKFLSTFKGVKGRLELIREGQNFDVIVDYAHTPDGLFNVLQTVKEFTKGRVIVVFGCGGDRDPTKRDKMGEISARLADIVIVTSDNPRTEDPLKIIRQIEEGIRRVGRSDYFVIENREEAIKKAIEIAGEGDSVLIAGKGHEDYQIIGNTKIPFSDQEVAKKYILERLKNES

SEQ ID NO: 14140 - protein, 192 aa, Xylella fastidiosa Temecula1
MNMLNVLRFPVLALALAFVSSGVLADVGSLLDLDYRPLAGKETVNLQRLYGGKVLLVVNTASKCGFTPQYEGLEALHQKLSPLGFAVLGFPSNDFKGQEPGDEQQIQEFCTLTYGVKFPMFQKVHVKGNEVTPLYQRLTQTTGVAPGWNFHKYLIARDGHVVAQFDSRTRPDDPILLEAIKRELAKSVQVVH

SEQ ID NO: 14141 - protein, 368 aa, Staphylococcus aureus subsp. aureus Mu50
MKAVHFGAGNIGRGFIGYILADNNVKVTFADVNEEIINALAHDHQYDVILADESKTTTRVNNVDAINSMQPSEALKQAILEADIITTAVGVNILPIIAKSFAPFLKEKTNHVNIVACENAIMATDTLKKAVLDITGPLGNNIHFANSAVDRIVPLQKNENILDVMVEPFYEWVVEKDAWYGPELNHIKYVDDLTPYIERKLLTVNTGHAYLAYAGKFAGKATVLDAVKDSSIEAGLRRVLAETSQYITNEFDFTEAEQAGYVEKIIDRFNNSYLSDEVTRVGRGTLRKIGPKDRIIKPLTYLYNKDLERTGLLNTAALLLKYDDTADQETVEKNNYIKEHGLKAFLSEYAKVDDGLADEIIEAYNSLS

SEQ ID NO: 14142 - protein, 288 aa, Synechococcus sp. PCC 7335
MLEVQPLLAHKPMTVSTQYPVMIIGGAEDKTNGCTILNAFVKSAGGSDATIGIIPSASREPAIVGDRYYQLFTAMGALRVQILDIRYRSECEEARWIEVLNDCSGIFITGGDQLRLRDLIGGTRLLQLIKEKLAKSELVLAGTSAGAAVMGEQMIAGGSSGESPNQSLVDLTDGLGFVPELLVDQHFHNRNRMARLLSAIAAHPNRLGVGIDEDTCIAIANDGIFQVLGKGTITVIDPGNLTHTSYPESLETSPLSLHNLKVHVLNQGDRYDYKARALMQLQSKADWS

SEQ ID NO: 14143 - protein, 470 aa, Pennisetum glaucum
MAVFSRTCLDSRFQVKKKQFFRNFMTITLFGAVGTMISFFTISLGAIAIFSRMNIGTLDVGDFLAIGAIFSATDSVCTLQVLNQDETPLLYSLVFGEGVVNDATSVVLFNALQNFDLNHIDVAVVLKFLGNFFYLFVSSTLLGVFAGLLSAYIIKKLYIGRHSTDREVALMMLMAYLSYMLAELLDLSGILTVFFCGIVMSHYTWHNVTESSRVTTKHAFAFATVSFIAETFLFLYVGMDALDIEKWEFASDSPGKSIGISSILLGLVLAGRAAFVFPLSFLSNLTKKTALEKITWRQQIVIWWAGLMRGAVSIALAYNKFTRSGHTQLHGNAIMITSTITVVLFSTMVFGMMTKPLIRFLLPASSNTVTSEPSSPKSLHSPVLTSMQGSDLEVATANIVRPSSLRMLLSKPTHTVHYYWRKFDDALMRPMFGGRGFVPFYPDHPPTRSMRTVTGKKPKIGHQEMKTCFW

SEQ ID NO: 14144 - protein, 397 aa, Chlamydomonas reinhardtii
AVTSEQLLFLEAWRAVDRAYVDKGFNGQSWFRVREAYLKKEPMEDRDQTYAAIRKLLASLDDPFTRFLEPARLARLRGDTEKSEVTGIGVEVSFTEEAGGPSQSVLKVVAPTEGGPSERAGVRPGDVIAAVDGKSTRGISLYEASDLLQGPAGSSLTLTLQTPGKDGKLGAPREVQLVRCKVVFRPVSYATCSGVSPSSGVGAGKEGGGKYIRVTTFNNSTVDGVVAAMKEGKAAGVDGLILDMRNNGGGSFPAGVQVAKLLLPGGDIVLISDSNGVRDIYSADKSLNLDTTTPLSVWVNKGTGSASEVLAGALKDNGRGTIVGETTFGKGLIQTVVNLSDGSGLAVTVAKYQTPSGLDINKIGITPDIRISPESLAVGGDAVCRQLAEPAAPRIFG

SEQ ID NO: 14145 - protein, 819 aa, Magnaporthe grisea 70-15
MRMRVEGICEELAGTQLTVGTATPSANKENAPRSRFPTPQSLEKLHKPFKCPGSATRRPEADRPARKRRKVDYKGADGADDTGESYTSIERLALANRDVNKYPVFKPKDKDTIFRKSFVVPLVNKNVASYNPNRPPPTLGLRQGAVFVAKALHDPSGEFAIVLYDPTVDDRPKEPEKPVEEPDKPSPSQEKLDAPLVHKSLAEILGIKKKVEGEHPRVPVVIDPRLAKVLRPHQIEGVKFMYRCVTGMIDEKANGCIMADEMGLGKTLQCITLLWTLLKQSPEAGKPAIQKAIVACPSSLVRNWANELVKWLGADAITPFAIDGKASKEELTRQLRQWAISSGRAVTRPVIIVSYETLRLNVEELKHTKIGLMLCDEGHRLKNGDSQTFTALNNLNVSRRVILSGTPIQNDLSEYFSLISFANPDLLGTRLEFRKRFELPILRGRDADASEKERVKGDECLKELLALVNKFIIRRTNDILSKYLPVKYEHVVFCNLAPFQLDLYNYFITSPDIQALLRGKGSQPLKAIGILKKLCNHPDLLNLSDDLPGSEAHWPSDYVPKESRGRDREIKPWYSGKMQVLDRMLARIRADTNDKIVLISNYTSTLDLFERLCRNRGYGSLRLDGTMNVTKRQKLVDKFNDPEGSEFVFLLSSKAGGCGLNLIGANRLVLFDPDWNPAADQQALARVWRDGQKKDCFVYRFIATGSIEEKIFQRQSHKQSLSSCVVDSAEDVERHFSLDSLKELFQYRGNTRSDTHDTFKCKRCKPDGKQYIKAPAMLYGDTSTWNHFNNEGLKPIQDLLLRQECGETEVSAVFQYISH

SEQ ID NO: 14146 - protein, 162 aa, Pseudomonas syringae pv. phaseolicola 1448A
MSAFHDIKLKALGGQELPMAGFKNKVVLVVNVASKCGLTPQYAALENLYQQYKDKGLEILGLPCNQFAGQEPGSEKEIAEFCELNYGVTFTLGEKLDVNGPDRHSLYRLLAGEGAEFPGDITWNFEKFLVGKNGGVSARFSPRTAPDDPAVIQAIEKALAQS

SEQ ID NO: 14147 - protein, 150 aa, Brassica napus
MEGDGVKGLACQKTMDGNASNGNGVEKTVPSCCLKAMSCLPEEDAKCHSTVVSGWFSEPPHPRSSGKRGKAVYFNNPMWPGEAHSLKVEKVLFKDKSDYQEVLVFESATYGKVLVLDGILQLTEKDEFAYQEMIAHLPLCSTPSPKNVLV

SEQ ID NO: 14148 - protein, 645 aa, Ustilago maydis 521
MTKAIGIDLGTTYSCVAVWQNDRVEVIANDQGNRTTPSYVAFTDSERLIGDAAKNQVAMNPHNTVFDAKRLIGRKFDDAEVQSDMKHWPFEVTSVGGKPQIRIEYKGEKKTFTPEEISSMVLLKMRETAEAYLGGTVKDAVVTVPAYFNDSQRQATKDAGIISGLNVMRIINEPTAAAIAYGLDKKTEGEKNVLIFDLGGGTFDVSLLTIEEGIFEVKATAGDTHLGGEDFDNRLVNHFVQEFKRKNKKDLTTNARALRRLRTACERAKRTLSSAAQTTIEIDSLFEGIDFYTSITRARFEELCGDLFSHTIEPVEKVLRDSKIDKGSVHEIVLVGGSTRIPKVQKLLTDFFNGRELNKSINPDEAVAYGAAVQAAILSGDTSEKTQDLLLLDVAPLSMGIETAGGVFTPLIKRNTTVPTKKSEIFSTYADNQPGVLIQVFEGERARTKDNNLLGKFELSGIPPAPRGVPQIEVTFDVDANAILNVSAAEKGTGKSEKITIRNDKGRLSSEQIEEMLKQAEQFAEEDKQALERTQAKNGLESYIYNVRNTTNEPQLKDKLEAADKEALEKIVKEGIEWLDSNTTASTDELKDKQKEIEEQVNPIMTKIYSAAGGAPGGMPGGAPGAAPGGAAPGGDDGPTVEELD

SEQ ID NO: 14149 - protein, 92 aa, Zea mays
  misc_feature (24)..(24): Xaa can be any naturally occurring amino acid
MMTKPLICLLNTTTSEPSSLKSYXLSPFLTSMQARTMAHIVRPSSLLSKPTHTVHYYWRKVDDALMRPMFGGHVFVPFSPGSPTEQSVHVGR

SEQ ID NO: 14150 - protein, 318 aa, Arabidopsis thaliana
GIMKKAKELSILCDIDVVLLMFSPMGKASICIGKHSIGEVIAKFAQLSPQERAKRKLENLEALRKTFMKANHDIDISKFLDRISTPTVEVLSEKIRFLQTQLSDIHTRLSYWTDVDNIDSVDVLQQLEHSLRQSLAQIYGRKASMPQRQQQQLMSSQCKNQLQTEIDIDFGMEMEQQLENFSWVRTDENMNVPIEEEDPNLQLHHMYKDITCSASSALGNYSGLFSKSSDILQKLETGSIPGTSADPNQQFSNLSFLNDQKLKQLAEWNLLGSPADYYVSQILEASYKPQIGGKNNGASSETLPYVAVFDDPLYFWPN

SEQ ID NO: 14151 - protein, 469 aa, Rhodospirillum rubrum ATCC 11170
MSDVKTILEMIKENDVKFVDFRFTDPKGKWQHTAQYVTTIDEESLVEGIMFDGSSIAGWKDINESDMILKPDLKSAFMDPFSAQPQLVLFCDVLEPSTGQPYERCPRSIAKKALSYLASTGIGDTSYFGPEAEFFVFDDVRFDVSMNRVMYEVDSEEGPYVTGKIFDEGNYGHRPPIKGGYFPVPPVDSAQDLRAEMLSTMAEIGMPVEKHHHEVAPSQHELGVRFNTLIEAADDMQKYKYVVHMVAHAYGKTATFMPKPIAGDNGSGMHVHQSIWKDGKPLFAGSGYADLSEMALYYIGGIIKHAKALNAFTNPSTNSYKRLIPGFEAPVLLAYSARNRSASCRIPYVASPKGKRVEVRFPDAAANPYLAFAAMMMAGIDGIENKIHPGDPMDKNLYDLPPEELMGIPTVCGSLREALDSLNADRDFLKKGGVFTDDMIDGYVALKWEEVYNLEHAPHPIEYKMYYSV

SEQ ID NO: 14152 - protein, 617 aa, Frankia sp. EAN1pec
MTELPGRLQATFVPAEDAIAWWGVVGLDDAVREHGLPEGRAGVCRLAVAGRGGVRSASVPVRFADLDAARQGLLMLDPRAEVGASVRAWRDAVRLLDGDDEEFGRLGARMPPAAHAVLNAEGTAITTASTLLAQFRQTLATRAALRGAVVTAELRPYQVHGVAWLSARPGLGYGGVLADEMGLGKTLQAICMLATCRSDMPHLVVCPTSLIGNWRRELARFAPTTPVISYHGAARKLPETFQPGTVVVTSYPVLRKDEPLAATAWGVVILDEAQQIKNPEALASRAAAQLSATVRIAMTGTPVENRLEELWSILNVSNPGLLGTRGRFRQRFVVPIEQRRSATAAAALNRMVRPHLLRRTKAEVAADLPPKQYSTIVCTMADEQARLYREAVDRAFTEGLGAGIERSGRVLALLTALKQICNHPAQYLREDTATPGRSGKFDRATEMLSEVVEQDDRVLVFTQYRAMGKLLSRYLGTALGVGLVPFLHGGLSMQRRDELVHAFQEDDDAPPVLLLSLRAAGFGLNLTRASHVMHYDRWWNPAVEEQATDRAHRIGQSRTLNVYTLVTGGTIEDHIAQMHENKRGVAEIVSGDTQAALAKLSDDDLHAVLALDEGTFA

SEQ ID NO: 14153 - protein, 161 aa, Xanthomonas campestris pv. campestris str. ATCC 33913
MTTLSTYQFTDLDGQPQSLAEYAGKVVLVVNVASKCGFTPQYAGLQALWQRYRDRGLVVIGFPCDQFGHQEPGDAADIRQFCSLDYAVDFPLAAKVEVNGSGAHPLWQWLKHEKRGVLGSEAIKWNFTKFLIGRDGSVLERYAPTTKPEALAADIERALGA

SEQ ID NO: 14154 - protein, 521 aa, Acidovorax sp. JS42
MSTPGGAPGITTPAVPLPGPRPIDIALLASVFVVAACGLLYELAAGALASYVLGDSVLQFSTVIGTYLFAMGVGSWLSRYFDRQLPAHFLRIELLVALIGGALPAVLFLANAYVPSAFRVLLYGMVLLVGTLVGLEIPLVMRILKRNVQLKDLVSQVLTFDYLGALAVSMAFPLLLVPQLGLVRTGLLFGFMNAAVAVWALWLFRHELRRFGAHALACALVLAALLAGLLGAEHITRFAEDKFYQDRIVLSSASPYQRIVVTHGRAGHRLYLNGNLQFAERDEYRYHEALVHPVMAAHGHPKRVAVLGGGDGMAVREVLKYPSVESVTLVELDPAMTQLFGSHPTLRQLNGDALASRKLTIVNTDAFQWLQQGDDTYDVIVVDFPDPTNFAIGKLYTNSFYALLDQRLAASGYAVVQTTSPLVARRSFWTVVTTIESVGLQARPYHAHVPSFGEWGFVIASRRPWRVPAELPAGLRFLDAAALPLLFDFPRDMARVPAEVNRLSNQVLVHTYEQEWGQVAH

SEQ ID NO: 14155 - protein, 382 aa, Escherichia coli str. K12 substr. W3110
MKALHFGAGNIGRGFIGKLLADAGIQLTFADVNQVVLDALNARHSYQVHVVGETEQVDTVSGVNAVSSIGDDVVDLIAQVDLVTTAVGPVVLERIAPAIAKGQVKRKEQGNESPLNIIACENMVRGTTQLKGHVMNALPEDAKAWVEEHVGFVDSAVDRIVPPSASATNDPLEVTVETFSEWIVDKTQFKGALPNIPGMESTDNLMAFVERKLFTLNTGHAITAYLGKLAGHQTIRDAILDEKIRAVVKGAMEESGAVLIKRYGFDADKHAAYIQKILGRFENPYLKDDVERVGRQPLRKLSAGDRLIKPLLGTLEYGLPHKNLIEGIAAAMHFRSEDDPQAQELAALIADKGPQAALAQISGLDANSEVVSEAVTAYKAMQ

SEQ ID NO: 14156 - protein, 286 aa, Salmonella typhimurium LT2
MAENTMWHETLHDQFGQYFAVDNVLYHEKTDHQDLIIFENAAFGRVMALDGVVQTTERDEFIYHEMMTHVPLLAHGHAKHVLIIGGGDGAMLREVTRHKNVETITMVEIDAGVVSFCRQYLPNHNAGSYDDPRFTLVIDDGVNFVNQTHQTFDVIISDCTDPIGPGESLFTSAFYEGCKRCLNPGGIFVAQNGVCFLQQDEALDSHRKLSHYFSDVGFYQAAIPTYYGGIMTFAWATDNDALRHLSSEIIQARFHAAGLKCRYYNPAIHAAAFALPQYLHDALSAQ

SEQ ID NO: 14157 - protein, 545 aa, Oryza sativa Japonica Group; identical to SEQ ID NO: 11770

SEQ ID NO: 14158 - protein, 660 aa, Chlamydophila pneumoniae CWL029
MSEHKKSSKIIGIDLGTTNSCVSVMEGGQAKVITSSEGTRTTPSIVAFKGNEKLVGIPAKRQAVTNPEKTLGSTKRFIGRKYSEVASEIQTVPYTVTSGSKGDAVFEVDGKQYTPEEIGAQILMKMKETAEAYLGETVTEAVITVPAYFNDSQRASTKDAGRIAGLDVKRIIPEPTAAALAYGIDKVGDKKIAVFDLGGGTFDISILEIGDGVFEVLSTNGDTLLGGDDFDEVIIKWMIEEFKKQEGIDLSKDNMALQRLKDAAEKAKIELSGVSSTEINQPFITMDAQGPKHLALTLTRAQFEKLAASLIERTKSPCIKALSDAKLSAKDIDDVLLVGGMSRMPAVQETVKELFGKEPNKGVNPDEVVAIGAAIQGGVLGGEVKDVLLLDVIPLSLGIETLGGVMTTLVERNTTIPTQKKQIFSTAADNQPAVTIVVLQGERPMAKDNKEIGRFDLTDIPPAPRGHPQIEVSFDIDANGIFHVSAKDVASGKEQKIRIEASSGLQEDEIQRMVRDAEINKEEDKKRREASDAKNEADSMIFRAEKAIKDYKEQIPETLVKEIEERIENVRNALKDDAPIEKIKEVTEDLSKHMQKIGESMQSQSASAAASSAANAKGGPNINTEDLKKHSFSTKPPSNNGSSEDHIEEADVEIIDNDDK

SEQ ID NO: 14159 - protein, 473 aa, Synechococcus sp. WH 7805
MATTAQDVLRQIKDEGIELIDLKFTDLHGKWQHLTICSDLLEAESFNEGLAFDGSSIRGWKSIDASDMAMVPDPSTAWIDPFYSHKTLSLICSIQDPRTGDAYDRCPRALAQKALAYLSGSGLADTAFFGPEPEFFLFDDVRYSSSEGGSFYSVDTIEAAWNSGRLEEGGNLGYKIQLKEGYFPVSPNDTAQDIRSEMLLVMAQLGIPIEKHHHEVAGAGQHELGMKFAELIQAADNTMTYKYVVRNVAKKYGKTATFMPKPVFNDNGSGMHVHQSLWKGGQPLFFGEGTEANLSQTARWYIGGILKHAPSFLAFTNPTTNSYKRLVPGFEAPVNLVYSEGNRSAAVRIPLTGPNPKAKRLEFRSGDALANPYLAFAAMMMAGIDGIKNQIDPGAPTNVDLFELSAERLSEIDTVPASLNGALEALNADHHYLMEGGVFTKDFIDNWIDLKYEEVQQLRQRPHPHEFTMYYDA

SEQ ID NO: 14160 - protein, 465 aa, Symbiobacterium thermophilum IAM 14863
MVARLWRSFAASLLALFLTAALWTGPAYAASDPAHWGDASAELWMVYHVVQRYHVNGADLDAFLEGAVRGGLDALGDPYTEYLGPQDYQSFLDSVDGNLTGIGVYLEKVGDYITIVRPIRSSPAEAAGLRAGDRIVAADGVSLVGESIEKTQQLVRGEPGTKVVLTIERPDEGRRFDVTITRAFIHVPQVDYRMLEDGIGYLELSGFGQQAAEEFFAAVAELKEAGATRLVLDLRYNSGGWVASALEIAEAYVPAGEPIMFEITRDERRVYRSEGSPLGLPTAVLVSEYTASAAEILAGAVQDYGTGVLIGTQTFGKGTVQELVDLPGGGAVKVTTAEYLTGRQRRVHQVGLTPDLVVEPYQPPVHLQTPLVADRVMTTGHVGLDVLGLQERLALLGYRTDRDGYFKGQTTLAVLQFARDHGLNEVPMVDKAFVEALNAAVAAKLAAAEWPDTQLEAAIRYLKEK

SEQ ID NO: 14161 - protein, 167 aa, Rhodococcus sp. RHA1
MVRMTTPVQNIGINTLGGTPTSLGEYDGRAVLVVNVASKCGLTPQYKGLEKLATDYADRGLTVIGVPCNQFMGQEPGTAEEIETFCSTTYGVTFPLLEKIEVNGENRHPLYEELTKATDAEGAAGDIQWNFEKFLVAPDGTVVKRFRPRTEPDAPEVVEAIEAVLPK

SEQ ID NO: 14162 - protein, 275 aa, Xerophyta humilis; identical to SEQ ID NO: 1374

SEQ ID NO: 14163 - protein, 187 aa, Cycas revoluta; identical to SEQ ID NO: 7269

SEQ ID NO: 14164 - protein, 649 aa, Chlamydia muridarum Nigg
MKRLARFCLLALTLFPQLAFSSAPLRQQDVRKTVEKLVEHHIDTKHISPHILSRSLEDYARSFDSHKAYLTQDEVLTYVFSEKATHSLFKQYQEDNFASFRELHTCIQQSISRVREWRTVWLSDAVRVIQDASSHTIPKKPTTWGSSIEEVKQRQYELLLSYASIYLEDATKNRYQGKEHALVRLCIRQIENHENPYIGINDHGLKMSLEEEANSFHIRIIKSIAHSLDAHTAYFSKEEALSMRAQLEKGMCGIGVVLKEDIDGVVVKEVLPGGPADKTGSLRVGDIIYRVNGKNIENTPFPGVLDSLRGLPGSSVTLDIHRQNNDHVVQLRREKILLDSRRVDVSYEPYGDGIIGKITLHSFYEGENQISSEQDLRRAIRELQEKNLLGLVLDIRENTGGFLSQAIKVSGLFLTNGVVVVSRYADGSVKRYRTISPQKFYDGPLAVLVSKSSASAAEIVAQTLQDYGVALIVGDKQTYGKGTIQHQTITGNNSQEDFFKVTVGRYYSPSGKSTQLEGVKSDIVIPSRYAEDNLGERFLEYALPADQYENVLNDNLGDLDIHIRPWFQKYYSPHLQKTELTWREMLPQLVENSQQRLEKNKNFEIFVQHLKKTDKQEQSFGSNDLQMEETVNIVKDMILLQTSLRSPAQ

SEQ ID NO: 14165 - protein, 500 aa, Zea mays
  misc_feature (378)..(378): Xaa can be any naturally occurring amino acid
  misc_feature (391)..(391): Xaa can be any naturally occurring amino acid
MASNMYGTTVACRMCYRDQYRPPPRDFTCEARKSEARRWGNGYHLIPRLCQWKPRGSKSDGSLLGDGHGGRDARCHSCGSHNSCECETRDCDAMEDAAASSYRDFKQHSRGNPQFSDDQVSSKNKSAYASQGLAEACKFVYNDAKFVNERAQNDILLLSRGITRLNKRACQDAAVLGLGFLKLDARARKDTQKIDHTVKERAALLNHFARAFKERAQSDLKKAADKHWSDGALEADLRRADLVVKRRAMEDAFMALKILSSSKPSLWCGGQNVGVTMCGREPNMPYIITPEVIQRNMPTSKFVQDIHDMMVNRLYEQLPKDGSSSRTNSTGFITLEKNGKALELFPGEVSADQIYAIEEAYQSMASAFSEADGIDYTXFPEELELLVATLXIDLDAMDGKRSVSLIAECSSSPDVNTRKALANALATAPSMWTLGNAGMGALQRLAQDPNYAVARAASRAIDELKKQWELEEGDSLRFVMNQNLASRDTEDDNSPADDAA

SEQ ID NO: 14166 - protein, 634 aa, Gluconobacter oxydans
MSKVIGIDLGTTNSCVAVREGDETKVIENSEGARTTPSMVAFTDNGERLVGQAAKRQAVTNPANTLYAVKRLIGRRYDDPTVQKDKEMVPYAIVRGDNGDAWVEARGEKYAPSQIAAYVLGKMKETAESYLGETVSQAVITVPAYFNDAQRQATRDAGKIAGLEVLRIINEPTAAALAYGLGKRDSGTVAVYDLGGGTFDVSILEISDGVIEVKSTNGDTFLGGEDFDNRIIGFLADEFKKDQGIDLRGDKLALQRLKEAAEKAKIELSSSKETEINLPFITADASGPKHLVVKLSRAKLESLVDDLIQRTLGPCRAAIKDASVSANEIDEVILVGGMTRMPKVIETVKEFFGKDPARNVNPDEVVAIGAAVQGAVLKGDVKDVLLLDVTPLSLGIETLGGVFTRLIDRNTTIPTKKSQTFSTAEDNQNAVTIKVYQGEREMAADNKLLGNFDLQGIAPAPRAVPQIEVTFDIDANGIVNVSAKDKATNKEQQIKIQASGGLSDADIDRMVKDAEANASADKAKRELVDVRNSTESLIHQTEKSITEGGDKVPAADKSEAEAAIAEAREALGGENLDTLKAASEKLTQAAMKVGQGVYQAGQGAEGGAAPEGEKKDENVVDADFEDLEDDSKKH

SEQ ID NO: 14167 - protein, 823 aa, Coprinopsis cinerea okayama7#130
MAYPLDSDARVRAAWTQAGGDKSKAAAFLSNPSWSPPTPSRPQSNGAEKETGRVKEIDEANKLQRAAVREKGKKSMIYANRPILETNISTPPVSKIASETAVASPVSPATPFLPAARKIKRTKKLVLDSESEADDSDSDDDREVKKARVAESSYTTRALNYFNTRDVAALQELTGCTAEQAEIIISKRPYESQEDFSEKFSGGKKKAAALGGLTPRIFDDVVKIFKGYGSVDSVLEDCERIGESLRSAIASWTITDDKKPSTSSTAVPTDEVEDGALSLRSLTKVSEKKSKNFLTKQPSMLPKNIQLKDYQLLGVNWLNLLYRRGYSCILADEMGLGKTIQVISFLAHLKEQGNRGPHMVVVPSSTLENWCREFKRFAPDIRVQTYYAGKEERISLRAVLLDTVCSKKKEGWEVLITTYNLASGDKHDRKFFKKLDWDCTVFDEGHVLKNYQSERYKDLVQYECNWRLLLTGTPLQNNLQELVVLKDLPNKSERIEWCEMTELQQAIYNDALERSRKTILDAELDTPDTGTPTGTGKPTTKKKIRPKDKMYVENSSNVLMDLRKAASHPMLFRTLFTDDNLTGMARQLLKEPDYKKRGALFEYVKEDMTVMTDAELQCLRKFLKNDDVYLNAGKVTTLLKLIEGYRKEDRKMLIFSQFTQILDILQVILKNKGIKFLVLTGSTPVDVRQSLVDEFTEDEDIPIFLLSTKAGGMGINLTAASVVVMFDQDFNPHNDKQAQDRAYRIGQKRDVDVVKLISRGTIEEDMLKLGETKLALDEAVAGDTEGKEESAPEKAIKTSLMKVLRRQLEKEEEEKEAEKSMKV

SEQ ID NO: 14168 - protein, 663 aa, Vitis vinifera
  misc_feature (14)..(14): Xaa can be any naturally occurring amino acid
  misc_feature (141)..(141): Xaa can be any naturally occurring amino acid
  misc_feature (201)..(201): Xaa can be any naturally occurring amino acid
  misc_feature (386)..(386): Xaa can be any naturally occurring amino acid
  misc_feature (411)..(411): Xaa can be any naturally occurring amino acid
  misc_feature (446)..(446): Xaa can be any naturally occurring amino acid
  misc_feature (451)..(451): Xaa can be any naturally occurring amino acid
  misc_feature (517)..(517): Xaa can be any naturally occurring amino acid
MGFGFGFGWFHIHXFPFHPLPDLPRLLPTLEIPSPSSPSWSVPENELRYHPCPYLLGKTDALIRVHTVLFKYQRNTFLQTQTFMEKSGYGRDGIYRSLSPPLVLPKDPNLSLVSFLFRKASSYPRRPALIEAHSGETVNFXQFKSMVIKVSHGLTRLGLKKNDVVLIFAPNSIQYPLCFFGVIAIGAIATTANPLYTVAEXQKQVKDSNPKLVITIPQLWEKVKALNLPAVILDSADTSKDTIQSPLKITYFSDLVKMAGEVSHFPKASITQGDTAALLYSSGTTGASKGVILTHGNFVAAALMVTMDEELMGEMHNVFLCFLPMFHVFGLAVVMCAQLQMGYTIVSMPKFDLDVALKSIEKYRVTHMWLVPPVMLALVKQGKLDXYDISSLKHIGSGAAPLGKELMEECXKSLPHVAVGQGYGMTETCGIVSKEIPKIGIQHTGXTGPLXSGVEAQIISVDTLKPLPPNQLGEIWVRGPNMMKDAVEKQNGSQLTLCRMQCKRYKDFIYCAVHCPXWYKWKLIFVWATKLTIDKKGWVHTGDVGYFDEQGKLFVVDRIKELIKYKGFQVAPAELEALLVSHPEILDAVVIPFPDAEAGEVPIAYVVRSPNSSLTEEDVKTFIANQVAPFKKLRRVSFINTVPKSASGKILRRELIEKVRAKL

SEQ ID NO: 14169 - protein, 669 aa, Oryza sativa; identical to SEQ ID NO: 11741

SEQ ID NO: 14170 - protein, 663 aa, Metarhizium anisopliae
MSGKVTAVGIDLGTTYSCVGVFDQEKCEIIANDQGNRTTPSYVAFNDTERLIGDAAKNQVTKNPENTVFDAKRLIGRKFSDADVQADMKHFPFKVIDKSGKPAVEVQYMGETKTFTPEEISSMILMKMRETAEAFIGETVNNAVITVPAYFNDSQRQATKDAGLIAGLNVLRIINEPTAAAIAYGFDKIRPEDKDKDDIPERNILIFDLGGGTFDVSLLAVAGGVFEVKSTAGDTHLGGEDFDNRLVNHFVNEFKRKHKKDLTTNSRALRRLRSACERAKRALSSASQTSIEIDSLMENIDFYTSITRARFEELCQDLFRSTMQPLDRVISDAKIDKNQVDEIVLVGGSTRIPRIQKLITEYFNGKQPSKSINPDEAVAYGAAVQAAILSGYNSQTTSSILLLDVAPLSLGIETAGGMMTKLIPRNTTIPTKKSEVFSTFSDNQPGVLIQVFEGERQRTKDNNLLGKFELTGIPPAPRGVPQIEVTFDLDANGIMNVSAVEKGTGKSNKIVITNDKGRLSKEEIERMLADAEKYKEADEAEGRRVGARNALDHYASNLRTTLQEPGVDEKLDAGDKEKLAAAADISSWLDQNEQASAEEYEAKQKEIEAIANPIMMKFYGAGGQAGGMPGGMPGGPGGPGGFPGAGGPGGAGGDDGPTVEEVD

SEQ ID NO: 14171 - protein, 99 aa, Triticum aestivum
AAIEKFLQFQDAVPCKIRAKRGCATHPRSIAERVRRTRISERIRKLQELVPNMDKQTNTADMLDLAVDYIKELQEQVKVINESRANCTCSASKHQQYSG

SEQ ID NO: 14172 - protein, 1169 aa, Suaeda japonica
MAASRIEVPFPFMLAEDVTSPSSSNSTVSAVLEEESNPTDAVIFFGASLILGIACRHFLRGTRVPYTVALLVIGIGLGSLEYGTKHGVGRFGDGIRIWENIDPELLLAVFLPALLFESSFSMEIHQIKRCIAQMVLLAGPGVLLSTCILGAALKLTFPYGWNWKTSLLLGGLLSATDPVAVVALLKELGASKKLSTIIEGESLMNDGTAIVVYQLFYQMVLGRSFTWVAIVKFLLQVALGAVGMGIVFGAASVLWLGFIFNDTVIEISLTLAVSYVAYFTAQEGADVSGVLTVMTLGMFYAAAARTAFKGESQQSLHHFWEMVAYIANTLIFILSGAVIAQGVLSSDNIFENHGIAWGYLFLLYAYVLVGRAIVVGVLFPFLRYFGYGLEWREALILIWAGLRGAVALSLSLSVKRSSGDPALLSTQTGTLFVFFTGGIVFLTLIVNGSTTQFLLSSLGMNKLSKAKRRILDFTKYEMEKKALDAFGDLGEDEELGPADWATVKRYIKSLNTLDEERIHPHEASGTENDGYLDPMNLKDMRVRLLNGVQAAYWAMLDEGRITQNTANVLMQSVDEALDKVDYEPLCDWKGLKSSVQFPNYYRFLQGSIYPKKLVTFFTVERLESACSICAAFLRAHRIVRGQLHDFIGDSEVSFAIINESEAEGEEARKFLEDVRITFPQVLRVVKTRQATFAVLQHLIHYIESLEKAGILEEKEMVHLHDAVQTDLKRLLRNPPTVKLPKVGDLICTHPFLGALPEGLRNRLVGSTKEEVKVRGMTLYKEGGKPNGIWLISNGVVKWASKSSKNKHVLHPTFTHGSTLGLYEVLIGKPYFCDMITDSVAVCFFIEAEKIQAVLGSDPAVEHFFWKESVIVLAKVLLPRFFENKSMQDMRMLTAERSTLNTYLRGETIEVPPHSIGFLLEGFIKSHSLVEELITSPAPLFPAQGNSSFLNQNHNGSGYNKSTSFSHQGASYYVETRARVLLIDMSQSQPESTLQRRKSSFLLPEQSARNLTNREHSGLLSWPENQYRSHQQLPTGQEIEESENLSAKAMQLSIYGSMVPSRGESFKEAPMRGQSFKGDNLGNPSHVRSYPQVPFSDQEQRSLTSVKSEGSTAVRKRLAEEGIKQELLPPAHSSRHPSHARDDSSSESGGDEDVIVRIDSPSKLSFRQAP

SEQ ID NO: 14173 - protein, 638 aa, Pseudomonas syringae pv. syringae B728a
MGRIIGIDLGTTNSCVSILENGNVKVIENAEGTRTTPSIIAYANDGEILVGQSAKRQAVTNPHNTLYAVKRLIGRKFEEDVVQKDIQMVPYKIVKADNGDAWVEVNGQKMAPPQISAEILKKMKKTAEDYLGEAVTEAVITVPAYFNDSQRQATKDAGRIAGLDVKRIINEPTAAALAYGMDKAKGDHTVIVYDLGGGTFDVSVIEIAEVDGEHQFEVLATNGDTFLGGEDFDIRLIDYFVDEFKKESGMNLKGDPLAMQRLKEAAEKAKIELSSSTQTEVNLPYITADATGPKHLVVKISRSKLESLVEDLVQRTIAPCEMALKDAGIDRSKINDVILVGGQTRMPLVQKLVTEFFGKEARKDVNPDEAVAMGAAIQGAVLAGDVKDVLLLDVSPLTLGIETMGGVMTALIEKNTTIPTKKSQVFSTADDNQNAVTIHVLQGERKQAAQNKSLGKFDLAEIPPAPRGVPQIEVTFDIDANGILHVGAKDKATGKQQSIVIKANSGLSEEEIQQMVRDAEVNSEEDRKFEELASARNQGDALVHSTRKMIADAGDKVTAEEKTAVEAALVALEAAIKGDDKAAIEAKVEELSKVSAPIAQKMYAEQAENPDAAAKPAEETAKADDVVDAEFEEVKDHK

SEQ ID NO: 14174 - protein, 289 aa, Desulfitobacterium hafniense DCB-2
MTRKLPTFLSENEHGLWMTEDERENLKIDYRIKEIIVEAKSTLQHVMILDSYSFGRMLVLDGAVQTTSLDGHIYNETISHVPLSIHPNPKKVLIIGGGDCGVAKEVCKYSSVEQIDVVEIDPMVVEVCLKHLPEVSGGLADPRVNFIFDDGVNYVQNSPTKYDIVIVDSSDPIGPAEVLIEKSFYRSIFNALEEDGLMVCQSQSPIFHGEVMEQIFERVHDIFPKTKMFTAVVPTYPGGLWSFTLGSKGYVIPNEARMKELDALYVNEQIMASCFSLPEFMNKQLSKYR

SEQ ID NO: 14175 - protein, 1220 aa, Physcomitrella patens subsp. patens
SLVTERLRQRTNRKPVYVEEEEGMEEDEWEEEADEGEEEEDEEKEVLKMEQSEDFCSICHLGGDLLCCDTCTAVFHLGCLDPPMKVVPRGKWSCPKCVNPLGDVEKFIDTQMRPMKVPGKLPVNVEDKGSEDQPQKLVKQYLVKWKSRSYLHCSWVTAEDLERGMKNFAGLRMKLNHFHKMLDGTRNWNTPDEDRMPIRPEWTTVDRVLDMRHNGDITEYLVKWKELGYDEATWEVEEDVLAFQAEIDKFKEIMSRQVLKKRKGSALDSKDLKRRRKDFKPFKKTPKFLIGGSLHPYQLEGLNFLRFAWEQNKHVILADEMGLGKTIQSISLLGSLVEENVGLPHLVVAPLSTLRNWEREFATWCPQMNVVMYVGSSQARAILRQYEFFFPQKSSKKSKDKGKKKMAGESKQDRVKFDVLLTSYEMINLDTAILKALKWECLIVDEGHRLKNKDSKLFQTLTTFSTRHRVLLTGTPLQNNLDELFMLMHFLDAGKFNSLEEFQQEFQDINQEEQVGRLHKMLAPHLLRRVKKDVLKEMPPKKELILRVELSSLQKEFYKAILTKNYQILAKQGGPQVSLTNVVMELRKLCGHPYLLEGVEPTVRNQAEANRQLLENSGKLLLLDKMMTKLHAQGHRVLIYSQFTRMLDILEDWLHLKKWGYERIDGKISGSERQIRIDRYNAPNSTKFCFLLSTRAGGLGINLATADTVIIYDSDWNPHADLQAMARAHRLGQQNKVMIFRLVTRGTIEERMMQMTKKKMVLEHLVVGRMKKENINQEELDDILRYGAMELFSEKDEDGKTRQIHYDDAAIDRLLDRAQVNDEEEKADDEEDSDLLKAFKVANFDYINDEDAAAAAAEEAEREARAKLEAEMEGQGRAQFWDSLLKDRVVEQQVEEFEELGKGKRSRRQVVPGLYSQEDDLAGMAEMNSDDGQEPEWAPTADADSPGSNGEVGEVSERMTGEPPPLMEGEGRELRILGFNHRQRSVFVNVLMRFGLGDFSWSEFIPRLKPKTPEEIKDYGTLFLSHIAEDINDSPFFSDGIPKEGLRIQDVLVRLAILHLIRDKVKALTEDPAMPLFSQGSHMYRYYSLRNTKVWKEEHDRKLLYAICSRHGYGRWLSIVEDPQLGLGPVIRGELLLRGVNDSAGPSKNGDARPGESEDPSGREAPAPADEEGPPGLPVGADREEREAYLQKRMVDFVKRRVLVLEKVLNAEYHCTVHHT

SEQ ID NO: 14176 - protein, 345 aa, Zea mays
MRQPRSGPGKRRGRGPRIPAATLQKQKTALANVDQITGAKIPKSFVFSRGKLPSTLRHLQQDLRKVMLPYTALNLKEKKRNNLKDFVNVAGPMGVTHFLILSNPQSLPHLRFAKSPQGPTFTFQIEEYSLAADIANSQKRPRCPPGIFKNSPLVVLGGLTGLGNPFRSLVEYFQHMFPSVDPTTVKLATCQRILLLKHDKEKDVIEFRHYSIKLQPVGVSRRIRKLMQNNQVPDLGEFEDVSEFVKKAGYGSESEADDEAAMVSLPSDIDKLNRASRKSAVRLQEIGPRMTMRLVKVEAGLCSGDVLYPWPVEKEVVGKKGTETGEVEGQEDDSEATDESEDEMV

SEQ ID NO: 14177 - protein, 459 aa, Helicobacter pylori 26695
MVLLTMTKRLFKGLLAVSLAVSLHGGEVKEKKPVKPVKEDPQELAAKRVEAFSRFSNVVSEIEKKYVDKISISEIMTKAIEGLLSNLDAHSAYLNEKKFKEFQAQTEGEFGGLGITVGMRDGVLTVIAPLEGTPAYKAGVKSGDNILKINNESTLSMSIDDAINLMRGKPKTPIQITVVRKNEPKPLVFNIIRDIIKLPSVYVKKIKETPYLYVRVSGFDKNVTKSVLEGLKANPKAKGIVLDLRGNPGGLLNQAVGLSNLFIKEGVLVSQKGKNKEENLEYKANGRAPYTNLPIAVLVNGGSASASEIVAGALQDHKRAVIIGEKTFGKGSVQMLLPVNKDEAIKITTARYYLPSGRTIQAKGITPDIVIYPGKVPENENKFSLKEADLKHHLEQELKKIDDKTPNSKEADKDKKNEEEKEITPKMINDDIQLKTAIDSLKTWSIVDEKMDEKAPKKK

SEQ ID NO: 14178 - protein, 448 aa, Thermoplasma acidophilum DSM 1728
MAAMPEDLVSKTLKRIEEDKVEFLQMQFTDIIGNVKSLTVPKNRFENALTEGVVFDGSSVAGYAQIEESDMRAIPNLESYTLLPDEFGKNKIARFVCSVYSPDGTRFPGDPRYVLERILDQVHKEGNEFFVGPEFEFFLFKRDEHGNPTTEPSDYGGYFDNTPLDSASDIRQQIMKELYDLGYQPEAAHHEVAYGQQEVDLRYAPALKMADRIVMLKSIIKNIAERNGLYASFMPKPINGVNGSGMHIHQSIMSADEKTNRFYDKNAKYGLSDYAMHYLGGILKYINEASAVLASTVNSYKRLIPGYEAPVYISWANKNRSALVRIPAGEGVRKRMELRCPDPAGNPYLQFAVVLGMGLEGIKNRIEPPEPVEKDIFHMTPEERQAEGIMSMPESLGEALHHLRSSKLMRNVLGDHVYENFITVKQREWDQFRSYVGEWEIKRYLPTL

SEQ ID NO: 14179 - protein, 355 aa, Physcomitrella patens subsp. patens
MVECFEVECSNAAYGNGTSRQTAVSNGASHQSSVTKTVLPAEAEHKKRCLWFEEELEEDLRWVFGVSKILHTGVSEFQDIELVESGPFGKVLILDGKLQSAEADEFVYHESIVHAALLYHPNPKNVFIMGGGEGSTAREALKHRSVEKVVMCDIDEEVVNFCRKHLTVNAEAFRSKRLDLIINCARAELEKKTEKFDIIVGDLADPVAGGPCYQLYTKSFYERVLKPSLKDGGILVTQGGPAGILTHTEVYSSIYNTLRQTFKYVVPYAAHVPSYADTWGWIMASDEPIPTISAETTDNRIKERIDGELKFLDGQTLSAAIALNKHVRRSLAAERHVYTEETARFIHGHGTALKN

SEQ ID NO: 14180 - protein, 478 aa, Mycobacterium smegmatis str. MC2 155
MAEKTSDDIFKLIKDENVEYVDIRFCDLPGVVQHFSIPASAFDESVFEDGLAFDGSSVRGFQSIHESDMMLLPDPNTARIDPFRAAKTLNMNFFVHDPFTREAYSRDPRNVARKAENYLASTGIADTAFFGAEAEFYIFDSVSFDSKINGTFYEVDSESGWWNTGEPFESDGSANRGYKVRPKGGYFPVAPYDHYVDLRDQMATNLQNAGFTLERGHHEVGTAGQAEINYKFNTLLAAADDVLLFKYIIKNTAWQAGKTVTFMPKPLFGDNGSGMHAHQSLWKDGQPLFHDESGYAGLSDIARHYIGGILHHAPSLLAFTNPTVNSYKRLVPGYEAPINLVYSQRNRSACVRIPITGNNPKAKRLEFRCPDSSGNPYLAFAAMLMAGIDGIKKKIEPLQPVDKDLYELPPDEAAAIPQAPTSLSAVIDKLEEDHEYLTEGGVFTEDLIETWISYKRENEIMPIQIRPHPYEFSLYYDV

SEQ ID NO: 14181 - protein, 609 aa, Enterococcus faecalis V583
MSKIIGIDLGTTNSAVAVLEGGEAKIIANPEGNRTTPSVVSFKNGEIQVGEVAKRQAVTNPNTISSIKRHMGEAGYKVDVEGKSYTPQEVSAMILQYLKGFAEDYLGEKVEKAVITVPAYFNDAQRQATKDAGKIAGLEVERIVNEPTAAALAYGLDKTDKDEKILVFDLGGGTFDVSILELGDGVFDVLSTAGDNNLGGDDFDNKIIDYMVAEFKKENGIDLANDKMALQRLKDAAEKAKKDLSGVTSTQISLPFITAGEAGPLHLEMNLTRAKFDELTSDLVERTKVPVRQALKDAGLNPSEIDEVILVGGSTRIPAVVEAVRKETNKEPNKSVNPDEVVAMGAAIQGGVITGDVKDVVLLDVTPLSLGIETMGGVFTKLIDRNTTIPTSKSQVFSTAADNQPAVDIHVLQGERPMAADNKTLGRFQLTDIPAAPRGVPQIEVSFDIDKNGIVNVRAKDLGTQKEQTITIKSSSGLSDDEIERMVKDAEANAEADKQRKEEVDLRNDADALLFTVDKTLKELEGKVDAEEVKKAEDARDELKAAIEANDIEQMKAKRDSLNEIVQNLTVKLYEQAAQQQAQENPEAAQGGADDVVDADFEEVNGDDK

SEQ ID NO: 14182 - protein, 663 aa, Ostreococcus tauri
MTAKRKIMRRLTLCTLLAVIFAAACAPQGRAESTTSEITGTVIGIDLGTTYSCVGAYVNGKVEIIANDQGNRITPSYVAFTDTERLIGDSAKNQASANPTRTVFDAKRLIGRKFTDKEVQRDLKMFPFKIVDKDSKPCIEIELKDGKKIFQAEEISAMVLTKMKETAEAYLGKDIKNAVVTVPAYFNDAQRQATKDAGIIAGLNVARIINEPTAAAIAYGLDKKGEKNILVFDLGGGTFDVSILTIDNGVFEVISTNGDTHLGGEDFDQRIMEYFIKLIKRKHGKDISSDSKAVQKLRREAERAKRTLSNQHQVRVEIEALFDGMDFSEPLTRARFEELNNDLFRKTMGPVKKAMDDAGMKKSEIDEIVLVGGSTRIPKVQDLLRDFFDGKEPNKGVNPDEAVAYGAAVQGGILSGEGGDETKDILLLDVAPLTQGIETVGGVMTKLIPRNTVIPTKKSQTFTTYQDNQQTVMIQVFEGERAMTKDNHLLGKFELTSIPPAPRGVPQIEVTFEIDANGILNVGAEDKGTGKSEKITITNDKGRLSQEEIERMVEEAEEFAEEDRKTKERIDSRNSLETFAYNMKNTVSDSDKLADKLEEDDKSTIEEAVKEALDWLDDNQSAEKDDYDEQLKKLEEVCNPIVAKAYQSGSADDSETVDEHDEL

SEQ ID NO: 14183 - protein, 284 aa, Brassica napus
  misc_feature (185)..(185): Xaa can be any naturally occurring amino acid
  misc_feature (206)..(206): Xaa can be any naturally occurring amino acid
  misc_feature (222)..(222): Xaa can be any naturally occurring amino acid
  misc_feature (250)..(250): Xaa can be any naturally occurring amino acid
  misc_feature (279)..(279): Xaa can be any naturally occurring amino acid
QFRFLDKAAVIIEGDLTPEGVPANKWRLCSIQEVEEVKCLIRIVPVWSAGIISLAAMSQQGTFTVSQALKMDRHMGRNFEIPAGSLSVISLLTIGVFLPLYDRVLVPFLRRITGHKSGITLLQRIGTGIVFAILSMIVAGLVERKRRIRSINAGDPTGMTPMSVFWLSPQLVLMGLCEAFNIIGXQIEFFNSQFPEHMRSIANSLXFSLSFAGSNYLSSLLXVTTGPRFSPGGMTPGRDWLNKNLNAGKXLDYFYYLIAVWGVFNLVYFWYCARGYRYXVGLQM

SEQ ID NO: 14184 - protein, 608 aa, Hordeum vulgare subsp. vulgare
MDRARGSALLLGVLLAGSLFALCAAKEEAKKLGTVIGIDLGTTYSCVGVYKNGHVEIIANDQGNRITPSWVGFTDGERLIGEAAKNQAAVNPERTVFDVKRLIGRKFEDKEVQRDMRLVPYKIVNKEGKPYIQVKIKDGETKVFSPEEVSAMILGKMKETAEAYLGKKINDAVVTVPAYFNDAQRQATKDAGVIAGLNVARIINEPTAAAIAYGLDKRGGEKNILVFDLGGGTFDVSILTIDNGVFEVLATNGDTHLGGEDFDHRIMDYFIKLIKKKHGKDISKDNRALGKLRREAERAKRALSNQHQVRVEIESLFDGTDFSEPLTRARFEELNNDLFRKTMGPVKKAMDDAGLEKTQIHEIVLVGGSTRIPKVQQLLRDYFDGKEPNKGVNPDEAVAFGAAVQGSILSGEGGDETKDILLLDVAPLTLGIETVGGVMTKLIPRNTVIPTKKSQVFTTYQDQQTTVSIQVFEGERSMTKDCRLLGKFDLSGIPAAPRGTPQIEVTFEVDANGILNVKAEDKGTGKSEKITITNEKGRLSQEEIDRMVKEAEEFAEEDKKVKERIDARNQLETYVYNMKNTVGDKDKLADKLESEEKEKMEGSWPNNN

SEQ ID NO: 14185 - protein, 491 aa, Bacillus cereus G9241
MKLHTLVSCLHDFPVVPKENPEITSIEADSRKVKEGSLFVCMKGYTVDSHDFAKQAAAQGAAAIVAERPIDVDVPVVLVKNTFRSLAVLADYFYGQPTHKLHLIGITGTNGKTTTSHIMDEIMRAHGHKTGLIGTINMKIGDETFDVKNTTPDALTLQQTFAKMVEHGVDSTVMEVSSHALDLGRVHGCDYDVAVFTNLTQDHLDYHKTMEEYKHAKGLLFAQLGNSYNHNREKYAVLNNDDVVTAEYMRSTAATVVTYGIDTTSDVMAKDIVMTSGGTTFTLVTPYESVNVTMKLIGKFNVYNVLAATAAGLVSGVSLETIIDVIKELAGVPGRFEVVDGGQNYTVIVDYAHTPDSLENVLKTAKQFAKGDVYCIVGCGGDRDRTKRPIMASVATQYATHAIYTSDNPRSEEPGAILDDMVHGANGNNYEVIIDRKEAIYHAIANAKAEDIVIIAGKGHETYQIIGKDVHHFDDREVAKEAITERLNNEE

SEQ ID NO: 14186 - protein, 135 aa, Brassica napus
  misc_feature (84)..(84): Xaa can be any naturally occurring amino acid
  misc_feature (92)..(93): Xaa can be any naturally occurring amino acid
  misc_feature (101)..(101): Xaa can be any naturally occurring amino acid
  misc_feature (103)..(106): Xaa can be any naturally occurring amino acid
  misc_feature (108)..(112): Xaa can be any naturally occurring amino acid
  misc_feature (114)..(115): Xaa can be any naturally occurring amino acid
MASSMLSSAAVATSPAQATMVAPFTGLKSSAAFPVTRKSNTDITSIASNGGRVSCMKVWPPVGKKKFETLSYLPDLTDVELAQXADYLLRNXXIPCVEPEXGXXXXVXXXXXRXXPGVYLLRFSPSPPHPSYTFP

SEQ ID NO: 14187 - protein, 477 aa, Yersinia pestis KIM
MTNPGDISMSAEHVLTMLNEHEVKFVDLRFTDTKGKEQHITIPAHQVNADFFEEGKMFDGSSIGGWKGINESDMVLMPDASTAVMDPFFADSTLIIRCDILEPGTMQGYDRDPRSISKRAEDFLKSSGIADTVLFGPEPEFFLFDDIRFGSSINGSHVSIDDVEGAWNSSTKYEGGNKGHRPAVKGGYFPVPPVDSAQDLRSAMCLTMEEMGLVVEAHHHEVATAGQNEVATRFNTMTKKADEIQIYKYVVHNVAHAFGKTATFMPKPMFGDNGSGMHCHMSLSKNGNNLFAGDKYGGLSEIALFYIGGIIKHAKAINALANPTTNSYKRLVPGYEAPVMLAYSARNRSASIRIPVVASPKARRIEARFPDPAANPYLCFAALLMAGLDGIINKIHPGDAMDKNLYDLPPEEEAEIPKVAGSLDEAMAALNEDREFLTRGGVFTDDAIDAYIELRREEMDRVRMTPHPVEFELYYSV

SEQ ID NO: 14188 - protein, 241 aa, Arabidopsis thaliana
MGTEVSTSPTSLIDQTVVPGDVVLDLSNMTNQTIKLGSGLRQDNEVISVMRAGKLRYSKPNKYWVESSHKRYVPRPEDHVLGIVVDCKGENYWIDIKGPQLALLPVLAFEGANRRNYPKFEVSTLLYTRVVKTNTGMNPELSCVDESGKAAGFGPLKDGFMFETSTGLSRMLLSSPTCPVLEALGKKLSFETAFGLNGRCWVHAAAPRIVIIVANALMNSETLSGTQQRIMVEKLLEKISD

SEQ ID NO: 14189 - protein, 203 aa, Shewanella sp. MR-4
MISILVSDVIENNELANLGAPNEKDIMMKLPLVIFASLLSTSAFAATCPSYLGVEVRKLHSDEKINLCELTQGKPVLLVNTASNCGYTPQFKALEALHKEYKDKGLVVIGFPSDDFFQEENDEKDTAKVCYINYGVTFTMLATSPVRGSDANSVFKYLGDKAGSPKWNFYKYVVSGDGNTVQQFNSKVKPDSAELKQAIESVL

SEQ ID NO: 14190 - protein, 1197 aa, Oryza sativa; identical to SEQ ID NO: 11231

SEQ ID NO: 14191 - protein, 528 aa, Oryza sativa Japonica Group
MAWWWWWSEAVVVGGGTGGGSSGTVVSICVFTAVLCVCLVAGHLLEENKWVNESITALLIGCVVGAIIFLLSEGKNSRILRFDEQLFFIYVLPPIIFNAGFQVKKKQFFHNFLTIMSFGIFGVFISVAIVSTGCYWLFPKVGFGDLGAVDYLDLILFTTTALGAIFSSTDTVCTLQVISQDETPRLYSLVFGEGVVNDATSVVLFNAIKNLDITQLKGGVALKVISDFLYLFFTSTMLGVTIGLSTAYALKALYFGRHSTDREVALMALMAYLSYMLAEFLDLSGILMVFFCGIVMSHYAWHNVTESSRITTRHIFATLSFIAETFIFLYVGMDALDIDKWKTSETSFKTSLGIFGIIISLVLLGRAAFVFPLSIMSNYMSGSSEKAPITFNHQFTFSGVTLDPVHATIITSTIIVVFFTTLVFGFLTRPLISAILPHQHRQSTTPGTGGGGRSTGSNSPKDDFIMPFLSPDEEASGSGSGFLQAKRSISMLLERPVHTVHIYWRKFDDRFMRPIFGGPMERDRGNCY

SEQ ID NO: 14192 - protein, 494 aa, Bacillus subtilis subsp. subtilis str. 168
MKLTKLLTYLTTEPSVNDSQDPEITSIEMDSREVKKGSLFVCVKGYTVDGHDFAQKAVENGAAAIVAEREVDVNVPVIIVRQSLRALSVLSDAFYGQPTKKLQLIGITGTNGKTSTTHMVDEILKKAGKRTGLIGTMYMKIGDETLPVKNTTPESVTLQKTFKKMNDKHVDTAIMEVSSHALSLGRVHGCDYDIAVFTNLTQDHLDYHKTMDEYRHAKSLLFSQLGGAFNHEHPKRAVLNADDEASAYFEKVTAAHISTYGIKNDADVMAKNISITAQGTSFDLVTNKGTKHITMSLVGQFNVYNVLAAVATCIAAGIPFEIITEAVEELHGVRGRFELVNQQQEFPVIVDYAHTPDSLENVLETCRDMTEGKLFVVVGCGGDRDKTKRPKMAKIAVELADEPIFTSDNPRSEDPRAILRDMEAGVENAYYHSIANREQAIFFAIANAKKGDVVLIAGKGHETYQQIGNETFDFDDAEVAARAIVELNKNKTNS

SEQ ID NO: 14193 - protein, 581 aa, Pseudomonas aeruginosa UCBPP-PA14
MSDSCLPIAMVQSAQSHRPGTKPEIPALMQTVYTVLTLLLVVGATRLAAQLLPLPLPLIQIAAGALLALPSLGLHIALDPELFLFLFIPPLLFVDGWRIPKREVWRMRWPILMMAFGLVFFTVVGAGYFIHLLIPEIPLAASFALAAVLSPTDALAVSAITQGRLPKRLMHLLEGEALMNDASGLVAFKFAIAAAMTGVFSLVDASLNFLLVAVGGLAIGVFLSWSLGRIRAWMISRGWDDPATHVVLMLLLPFASYMVAEHLGVSGILSAVAAGMMQSWVDLLPRQTSTRLLNRSVWSMLEFAFNGVVFLLLGLQLPDIMKSVANHHGDLLWRSSLLLAYVAAITAVLMLIRYGWVYGYWKLSLRIDRWRGKSPPGLSGISLRRLSALSALSGVRGAVTLAAVLSVPMSLMDGSAFPQRDLIIFIATSVILISLIGATIGLPLLLRGLPASNNGAHERERREAWRKTAEAAIRALESEELPQVEGNDAANTSRVAEARAQIMAEYRQSLDTAPTTDEARDQAQALEIADKALRLKALRAQRLELYRQRRNNEIDDETLGDILRELDQQESWLTNRFARWV

SEQ ID NO: 14194 - protein, 410 aa, Oryza sativa Japonica Group; identical to SEQ ID NO: 10847

SEQ ID NO: 14195 - protein, 475 aa, Mannheimia succiniciproducens MBEL55E
MANPNAIQRVAKLIEDNDVKFVLLRFTDIKGKEHGVSLPVNLVADELEDFFEEGKMFDGSSVEGWKAINKADMLLMPMPETAVIDPFAQITTLSIRCSVYEPNTMQSYDRDPRSIATRAENYLKSTGIADQALFGPEPEFFLFDDVRFSTEMNNVSYKIDDIEAAWNTNRKFEDGNNAYRPLKKGGYCAVAPIDNAHDIRSEMCLILEEMGLVIEAHHHEVATAGQNEIASKFNTLTLKADETQIYKYVVQNVALEYGKTACFMAKPFAGDNGSGMHCNMSLSKDGKNVFQGDKYAGLSETALYYIGGIIKHAKALNAFTNPTTNSYKRLVPGFEAPVLLAYSASNRSASIRIPAVTSPKAIRVEARFPDPLANPYLAFAALLMAGIDGIINKIHPGDAMDKNLYDLPPEELKEIPAVCSSLEEALDSLQADHEFLIQGGVFSKEFIDAFVAIKRKEVERVNMTPHPVEFEMYYA

SEQ ID NO: 14196 - protein, 417 aa, Rubrobacter xylanophilus DSM 9941
MWRTGITKRKRGRGPLVRVLLLAALLVAVGYGAYEYGKSQSPAGLSGPDRESLRLYAEALDAVRDGYVDREAIDPKKQTYGAIEGMLDSLGDEGHTRFLTPEERRENEQGLSGDYVGIGVQLEDRDGRVVVASPIEGSPADRAGIESGDVLVAVNGRSVSGQELDRIADRVKGPEGTRVKITVLRDGEERTFYLERAEIESPAVSWAMVPGTGVAHIRLSSFSDDSARELRAAFEEARLDGAERFVLDLRDNPGGRLEQAVEMAGFFLEPGSVVYIRRDASGERTPVRADGEAQLAEVPLAVLVNGGSASSAEILAGALRDNDRATVIGQRTFGTGTVLSEFVLSDGSAILLGVAEWLTPDGDFIRDTGIEPDIRVGLDEGEEPLSPSQTEGLSREEISRRDPQLWRAVRELAGGRV

SEQ ID NO: 14197 - protein, 216 aa, Zea mays
MKALQTLIPNSSKTDKASMLDDAIEYLKHLQLQVQMLSMRNGLYLPPGNLSGAPETLAPLEMCAALNQSGAKASNSGVVVLPGNKIPVARLLLDPPNHDQRHENPLVLQSVPSSSTAVEPRFLQQPAQPNLQSFQLAVPPEMIFDEADMMLKHRLASGRETTSLPVGHEAKPGRQEACMVNSDISNRGSLGKEVFMPYLHSLQSGDTEGGLRAGSN

SEQ ID NO: 14198 - protein, 164 aa, Populus trichocarpa
MEKSTAFREAYLNGNHHHSFSSSSASHRHVSYSCGICGYELNLSSSNRNTSTIGSKYGKSIKRGKISFFFIDESRFTQVDEFQCFPFFSKNSLGLFRQRTALLCRKCGNHIGIAYADEASAYPLVADGSDSSSVSEVFKRRKYDVKIRALQPSSAEQFSIPLYT

SEQ ID NO: 14199 - protein, 214 aa, Shigella flexneri
IGRGFIGKLLADAGIQLTFADVNQVVLDALNARHSYQVHVVGETEQVDTVSGVNAVSSIGDDVVDLIAQVDLVTTAVGPVVLERIAPAIAKGLVKRKEQGNESPLNIIACENMVRGTTQLKGHVMNALPEDAKAWVEEHVGFVDSAVDRIVPPSASATNDPLEVTVETFSEWIVDKTQFKGALPNIPSMELTDNLMAFVERKLFTLNTGHAITA

SEQ ID NO: 14200 - protein, 832 aa, Rhodobacter sphaeroides 2.4.1
MNIVLLVTALAVLFIVIAACEPVAARLRLPYSVVLAVVGAMLGTLALWLQRSGVAASFPPEVADLLALPIRSSVFLYIFLPTLLFQVSLSLNIRRMIDDWVPILVMAVVAVLVSTLAIGFALQPFSSMSLAACLLLGSIVSTTDPSAVVSIFRSIAAPQRLTRIVEGESLLNDAAAIALFGFFLTFVMAGVPDPTLRQALVEFPLLILGGLGLGYLMARIALFLMTRMASHPTAQLSLSLALPYLTYVLAEQGFHASGVIAVVTAGIAMNLTGPGRLSPATWKLLSDIWEMLSHWAGSLIFIVAALLIPRLIGRATGWDLLLIGVVALAAVVARGVMLSGLLPLLTRFNLSPRVERPYRVAILWGGLRGAVTLALALAVTENPMVPPHVKREVGILATGFVLFTLLAQGTTLRWVIRRLGLARLTPLDLALSNQVIAVALQNVREGVAETVRERELDPQIVRSEAKGFGQRLARAVELADDSADDIPDRDRITLGLVALAGRERDAILAAFRQQIISPRLAEAMLVDVDRLIERTRLQGRDGYRAAGRRALGLGRQHRIAVWAHNRLKITRWLSQLTSDRFEMLLTQRLILGDLHGLIDGKIRRIHGRRVAEILHEMLKRREEETEQALEALRLQYPGYSEEMVRSFIRRTALQLELREYEMLHDDGLIGQELFMTLRQRIQVARGKKERRPHLDLAVQKVELVRQFPLFAEMEEDQLRALERLLQTVYVRPGDVLLRRGDVPRKVFFIASGAVESDVAGQKVRLGRGEMFGQLAILTRKTRKAQVTAISHGTLLSLDEARFLELLRRNRTLQEAAVESAARRNVTIDLSAI

SEQ ID NO: 14201 - protein, 213 aa, Shigella flexneri
IGRGFIGKLLADAGIQLTFADVNQVVLDALNARHSYQVHVVGETEQVDTVSGVNAVSSIGDDVVDLIAQVDLVTTAVGPVVLERIAPAIAKGLVKRKEQGNESPLNIIACENMVRGTTQLKGHVMNALPEDAKAWVEEHVGFVDSAVDRIVPPSASATNDPLEVTVETFSEWIVDKTQFKGALPNIPSMELTDNLMAFVERKLFTLNTGHAIT

SEQ ID NO: 14202 - protein, 494 aa, Alkaliphilus metalliredigens QYMF
MKLMDLLEEIDTIEIKGEERINIENIYYDSRKVTPNSLFICIEGFQTDGHHFIDQAIKKGAIAIVAQKDMTGLDGVTWVQVKDTRQVMAQLGSTFYGRPSQHLELIGVTGTNGKTSTTYMIKKILENHERKVGLIGTIANWIGNTEVEAQRTTPESIDLQQIFKEMADEKVTECVMEVSSHALALERVAESEFKVGVFTNLTPEHLDFHENIDNYREAKKKLFYLTTVANVINIDDPHGAMIAEEVKKLKPSLITFGIKKQATVMAKNIATTLKDVTFDLVTPVGEARVTVKIPGIFSAYNALASIATSIAIGVPFDVIVQGIQSIPGVPGRFESVLGIKDFSVIVDYAHTPDAIENVIQAAKNVTEHRVITVFGCGGDRDRTKRSVMGEISGSLSDLSVITSDNPRTEDPYKILMMIEAGIKKTKGLYTIIEDRREAIRYAMKEAKKGDIVLIAGKGHEATQQIGSNVIIFDDCGVAREIAKEEGLDDSDIHS

SEQ ID NO: 14203 - protein, 240 aa, Zea mays
EYLAPRSYGPPPAPPPHPCLSASGSPPPLSRPPRPQFDPNFAWHQAKPLPPCCVKARAAAPESEAKCHATVVSGWFTETRSRCGKASKLQYYNNPMWPGETHSLKVDKILYQGKSPYQEVLIFESLTYGKVLVLDGIVQLTDKDECAYQEMITHLPLCSIPSPKKVLVIGGGDGGVLREIARHGSVESIDICEIDQLVIDVCKDFFPDLSVGFEDPRVRLHVGDAVEFLRNSPEGTYDAI

SEQ ID NO: 14204 - protein, 3543 aa, Arabidopsis thaliana
MTSSSHNIELEAAKFLHKLIQDSKDEPAKLATKLYVILQHMKTSGKENTMPYQVISRAMDTVVNQHGLDIEALKSSCLPHPGGTQTEDSGSAHLAGSSQAVGVSNEGKATLVENEMTKYDAFTSGRQLGGSNSASQTFYQGSGTQSNRSFDRESPSNLDSTSGISQPHNRSETMNQRDVKSSGKRKRGESSLSWDQNMDNSQIFDSHKIDDQTGEVSKIEMPGNSGDIRNLHVGLSSDAFTTPQCGWQSSEATAIRPAIHKEPGNNVAGEGFLPSGSPFREQQLKQLRAQCLVFLALRNGLVPKKLHVEIALRNTFREEDGFRGELFDPKGRTHTSSDLGGIPDVSALLSRTDNPTGRLDEMDFSSKETERSRLGEKSFANTVFSDGQKLLASRIPSSQAQTQVAVSHSQLTFSPGLTKNTPSEMVGWTGVIKTNDLSTSAVQLDEFHSSDEEEGNLQPSPKYTMSQKWIMGRQNKRLLVDRSWSLKQQKADQAIGSRFNELKESVSLSDDISAKTKSVIELKKLQLLNLQRRLRSEFVYNFFKPIATDVEHLKSYKKHKHGRRIKQLEKYEQKMKEERQRRIRERQKEFFGGLEVHKEKLEDLFKVRRERLKGFNRYAKEFHKRKERLHREKIDKIQREKINLLKINDVEGYLRMVQDAKSDRVKQLLKETEKYLQKLGSKLKEAKLLTSRFENEADETRTSNATDDETLIENEDESDQAKHYLESNEKYYLMAHSIKENINEQPSSLVGGKLREEQMNGLRWLVSLYNNHLNGILADEMGLGKTVQVISLICYLMETKNDRGPFLVVVPSSVLPGWQSEINFWAPSIHKIVYCGTPDERRKLFKEQIVHQKFNVLLTTYEYLMNKHDRPKLSKIHWHYIIIDEGHRIKNASCKLNADLKHYVSSHRLLLTGTPLQNNLEELWALLNFLLPNIFNSSEDFSQWFNKPFQSNGESSAEEALLSEEENLLIINRLHQVLRPFVLRRLKHKVENELPEKIERLIRCEASAYQKLLMKRVEDNLGSIGNAKSRAVHNSVMELRNICNHPYLSQLHSEEVNNIIPKHFLPPIVRLCGKLEMLDRMLPKLKATDHRVLFFSTMTRLLDVMEDYLTLKGYKYLRLDGQTSGGDRGALIDGFNKSGSPFFIFLLSIRAGGVGVNLQAADTVILFDTDWNPQVDLQAQARAHRIGQKKDVLVLRFETVNSVEEQVRASAEHKLGVANQSITAGFFDNNTSAEDRKEYLESLLRESKKEEDAPVLDDDALNDLIARRESEIDIFESIDKQRKENEMETWNTLVHGPGSDSFAHIPSIPSRLVTEDDLKLLYETMKLNDVPMVAKESTVGMKRKDGSMGGLDTHQYGRGKRAREVRSYEEKLTEEEFEKLCQTESPDSPQGKGEGSERSLANDTSNIPVENSSDTLLPTSPTQAITVQPMEPVRPQSHTLKEETQPIKRGRGRPKRTDKALTPVSLSAVSRTQATGNAISSAATGLDFVSSDKRLEAASHPTSSLALTSPDLSGPPGFQSLPASPAPTPIRGRGRGRSRGRGAGRGRRVEGVLHGSNSSITQRTETATSLASDAEATKFALPRSASEIVSRVPKANEGSTSNPDQVSPVHSATTALRSDKAADKDLDAPPGFDSGSHVQTLNVLENSSERKAFAVKKRPLIQGVSSQHPGPNKQPLDLPVSTSSTLLGGGPVQNQNAVSSVCDGSKSPSEGRTYTALQGVTTAPSDATLPMSSQPSDATLPMSSQPVGSTVEAQEANVPSLPAALPAKRRVRNLPSRGETPKRQGKRRGQPLPATDASSARSTGLTPQIEVKVGNLSGTKAKFDAVAKEQPHFSQSVAPDIHSSGSLSQEIRRDTSGTGGSARKQTADVTDVARVMKEIFSETSLLKHKVGEPSATTRTNVPDAQSPGEMNLHTVETHKAEDSSGLKNQEALYNLSKADKLVSDIPHPVPGDLTTSGSVANKDVDIGSSKVAAENELVKIPGGDVDSSVIQLSLGNTLTAKSSLEKCTADQLLGEKLSQEGETTPASDGETCHLAEETASSLSYVRSEPTASASTTAEPLPTDKLEKNISFQDEVKTLNGDKREAILLSSEEQTNVNSKIETNSEELQASRTDEVPHVDGKSVDVANQTVKEDEAKHSVEIQSSMLEPDELPNAGQKGHSSIDLQPLVLVTSNENAMSLDDKDYDPISKSADIEQDPEESVFVQGVGRPKVGTADTQMEDTNDAKLLVGCSVESEEKEKTLQSLIPGDDADTEQDPEESVSDQRPKVGSAYTQMEDTDEAKLLMGCSVESEEKEKTLQSHIPGDDADTEKNPEESVSVQGVDRPKVGTTDTQMEDTNDAKLLVGCSVASEEKEKTLQSHIPGDDADTEQNPEESVSVQGVNRPKVGNANTQMEDTDEAKVLVGCSVESEEKEKTLQSHIPGDDADTEQNPEESVSNFDRPKDGTADTHMEDIDDAKLLVGCSVESEEKEKSLQSHMPSDDAVLHAPFENTKDSKGDDLHGESLVSCPTMEVMEQKGFESETHARTDSGGIDRGNEVSENMSDGVKMNISSVQVPDASHDLNVSQDQTDIPLVGGIDPEHVQENVDVPASPHGAAPNIVIFQSEGHLSPSILPDDVAGQLESMSNDEKTNISSEQVPDVSHDLKVSQDQTDIPPVGGIVPENLQEIVDVPASPHGVVPDVVVSQSEEIQSPSILPDDVPGQPDDGNCEKMDTMQNNTSIDIGITSGKTCQPSSSTQPEDENRNSLSHCEPSEVVEQRDSRDQVCIGSVESQVEISSAILENRSADIQPPQSILVDQKDIEESKEPGIESADVSLHQLADIQAEPSNLVDQMDIEESKEPGTESADVSLHQLADIQPGPSILVDQMDTEKSKEPGTESADVSLHQLADIQPGPSILVDQMDTEKSKEPGTESADVSLHQLADIQPGPSILVDQMDTEEFKNPDVSLHQLADIEPSLSISAVQKNIEDKDQSHVETAGSELVDVSAECSTEPQVQLPPSSEPVGDMHVHLGASKSEIVAEGTDFSSSLPKTEEENAKSQLADTEPSSSLTAVQKNIEDQVETAGCEFVVVSTGCSTEPQVQLPPSAEPVVAEGTEFPSSLLMTGVDNSSHLMTGVDNAKTHLADVVPSSSPTTMEKNIEAQDQDQVTTGGCGLVDVLTECSSEPQLQLPPSAEPVISEGTELATLPLTEEENADSQLANIEPSSSPSVVEKNIEAQDQDQVKTAGCELVSTGCSSEPQVHLPPSAEPDGDIHVHLKETEKSESMVVVGEGTAFPSSLPVTEEGNAESQLADTEPFTSPTVVEKNIKDQEQVETTGCGLVDDSTGCSSEPQVQLPPSAEPMEVVQTNIEDQDQIETGGCDLINVPSGCSTEPQIQLSSSAEPEEGMHIHLEAAMNSETVVTEGSELPSSLPMTEDENADGQLAEVEPSVSLTVEQTNIEEKDHIETAECELVDVSPGCSSQPEVKFPPSPDAVGGMDVHLETVVTEDTDSNSSLPKTEEKDAENPSDRLDGESDGTTVATVEGTCVESNSLVAEESNIEVPKDNEDV

SEQ ID NO: 14205 - protein, 1343 aa, Physcomitrella patens subsp. patens
MGDNGRADARPRREAKSAVRHSKAELLQAIAARRQAQLLRSINTPSRRPDEVLNENGKHFYAEARKAASMILPESSDASELSGDDVDESDSSTSPAGSSYSNYVSDGRGSSDQRLNRKNSSSGATAVEDLSSVLDQISLKDESGGHSVDRSRLVEKQFERKPKDLILNIRKQMASKSTIVDLETDSEDESFASLDPAASSPSVDYTSADDGDVDSPFVSKTKSKINQPGVLSKTFPSWTTQFHRSSNYDDYHNDDDDAAFVSPPKIERRATAVTSGLQSPPATHTSNEGDRADNEEKDMVLIKGKHRFTLRAKIANMLYPHQRKGLEWFWSLHTKGMGGILGDDMGLGKTLQVASFLAGLFCTQNIKCALIVAPKTLIAHWVKELKVVGLSRKTQDYSGTSVKVRESALSHVLQMGGVLLTTYDMVRCNFKALRGDYNGRDGFGDASDDIITWDYIILDEGHLVKNPNTQRAKSLRAIPAAHRIVISGTPIQNHLQEMWALFDFCCPNLLGDRKEFREKYERQILAGTDKNASDRQKRIGIQVAEELRQKFAPYFLRRLKSEVFPESNNLEERKLSKKNDLIVWLPLSKCQERLYRAFLNSNAAEETLSTGTRVLSALTVMKKICDHPSLLTKRAAIDIAEGMEGYLDGEDIQAAEAMTRSLAGMVEDDRVHGASCKIDFLMALLENLVTEGHRTLIFAQTRKMLDIIQDEILDRGWIFRRIDGTIKAADREQCVQASGVHGAEIEARCELIVRPRVAVWEFQSDNDIPLFLLTSQVGGLGLTLTGANRVVIVDPAWNPSTDNQSVDRAYRIGQKKNVVVYRLMTCGTIEEKIYRKQVFKGHLMKVATEKKNQMRYFSQGELGEMFKVPEAGFRVSLTQQQLHKEHFRQYKIDEELGEHIHFLAELGIAGVSHHDLLFTKAEPLPPPGYDEDEDLKASWEPRNSSYVEQHFKAASKSEKYVQETSQAVGRSILSRSAPKGLQPRSNANDNLLKVQFLRSKLERLYRTLDDKALLSRVQVHGTSLDKKINETEHDLREAELIAGNKENIAVQWQSLSVVRTPVVDLSEDKPCIVLDSPEVITQRPKPLGINNNLVKVSPLPDKKFSSLQTPPTVRGVKSMVELPNWSLLSDSPATSHGSPAPTSRSPLEIGALIYSSKLLMLEVCLSVFRCKGQRRDRTQPAIPTPSLFRSKTTKDFFISAREEHRLRNGMRFRLPCESSSGVGIVGFFEENLRSQFRQSEVPSEEQALPHYYERGDMIRTILQQGQWKGMCPKWLTDIRKLEADRSMQLQQHNKFGSANVVTEEASWHLPESEEILADNINFADQDIFEVATSDLEIQENDSD

SEQ ID NO: 14206 - protein, 202 aa, Zea mays
MLKGLGHTKGRTKQYDAGGIKAKRQRRTAAWRAGHHGQPPDGDDGRPSVVGGEQDRLLPIANVGRIMKQILPPNAKISKEAKETMQECVSEFIGFVTGEASDKCHKEKRKTVNGDDLCWAFGALGFDDYVDPMRGYLHKYREVEGDRAAAAASSSRGGGDHHPASASTSTSPPAAAPPAGHFMFGAAAIDRPDNNTSSARPF

SEQ ID NO: 14207 - protein, 869 aa, Nostoc sp. PCC 7120
MININYITPQDMRVCSCIETYGDGSYYGKVEYMFNEKAICALIGHPLVFWEDTPNVRVEIVKGEPELLVKKEKLGRLTLEFSPKLPPSQNILNIKETPTRIKVIEITSEHRRITEILGKDNKLNVPAIAEKQVLAAINAVSGIVTVHSDIGGGSEGAEEVPAQTLPHIHLLPANTGLKVTLLSRPFAQGGPYYRPGAGGETVIAEIDGKRLQTRRNLPEEKQLAKNAVAACPSLTRTEERDGEWLIEDPEECLELLLELQALGSSVVMAWPEGEKLRVSHQADLKDFNLSIQRQQDWFAATGELKLNQDLVLDMQQLLALLEKTPSRFIPLGDGQFLALTQAFRKRLDELRLFSEKHSKGIRFHPLATLGLEDFVDEVGKVKTDKHWKTHIQRLQEMKNLQPELPSTFGAELRDYQMDGFCWLARLAHWGVGACLADQMGLGKTVQALAVILRNAHEGPSLIIAPTSVCMNWVSEAQKFAPTLNIIQFTGANRQKLLDGLQPLDMLVCSYGLLQQEEVAQMLSGVQWQTIVLDEAQAIKNMTTKRSQAAMNLKANFKLLTTGTPIENHLGELWNLFRFINPGLLGSFESFNQRFAIPIEKYQDKQARNKLKKLIQPFLLRRTKNQVLEELPSRTEILLHVELSREEKAFYEALRRQAISKLSDSNAEAGNKHLQVLAEIMKLRRACCNPSLVMPDTELSSSKLQLFGEVLGELLENRHKALVFSQFVDHLHIIRNYLDKQGINYQYLDGSTSVSERKKRVDAFQAGNGDVFLISLKAGGTGLNLTAADYVIHTDPWWNPAVEDQASDRAHRIGQQRPVTIYRLVAKDTIEEKIVELHHHKRDLADSLLEGADMSGKISTEALLQLISEG

SEQ ID NO: 14208 - protein, 578 aa, Prosthecochloris aestuarii DSM 271
MTKKLRSEEHLVPMQSPSMKSWGMPADLPKHNVVIECGWGRIIFGHTFHDNTKIAEILRDEKEGFRDIAFYLRDPQVVLSYAPQNLFIDPSYTFRLWLDEYTPLQEKSDMFSVRPLHPLKDIERVNWIYHVHNMVPADPDVLRDIREKQCIDYWVAAENETEEVIAVCMSIDHRTAFEDPENGSSLWALAVDPQAKHSGIGIQLVQSVAEHYKSKGRSFIDLSVLYSNKAAIDLYKKLGFVQVPVFSVKNKNAINEKLFSGPQPESSLNPYSTIIINEARRRGIRVDVLDPVDNYFRLSFGGASMICRESLTELTSAIAMSRCADKETTHRLLANAGIRVPEQQVAASPEENIRFLERHGNLVVKPADSEQGKGITVNISSPEELDPAIAKAANVCSKVLLEEMVEGADLRIIVIDYKVVAAAVRKPPKITGDGKHSIIELVKKQSRRREKASQGESSIPIDDELVRTVAMSGFRLEDTLPKGVELEVRKTANLHTGGTIHDVTTTLHPALAMAACKAAGILGIPVTGLDFIVDSPEKDHYVIIEANERPGLANHEPQPTAERFIDFLFPQSIARTLP

SEQ ID NO: 14209 - protein, 462 aa, Thermoplasma volcanium GSS1
MSYFKNKNINDECSYATMPEDVVEKTLKKLDQDKVEFLQMQFTDIVGNVKSLTVPKNRFENALTEGVVFDGSSVAGYAQIEESDMRAIPNLDSYTLLPDEFGKSRVVRFVCNVYSPDGSRFPGDPRYVLEKLLEKVHKEGNEFFVGPEFEFFLFKRDANGNPTTEPSDYGGYFDNTPLDSASDIRQQIVRELYELGYQPEAAHHEVAYGQQEIDLRYAPALKMADRIVMLKSIIKNVAERNGLYASFMPKPINGVNGSGMHIHQSIMSFDEKVNRFYDKNAKYGLSDYAMHYLGGILSHINEGSAILASTVNSYKRLIPGYEAPVYISWANKNRSALIRIPAGEGTRKRMELRCPDPAGNPYLQFAVILGMGLDGIEKKIDPPEPIEKDIFHMTKEERLQEGITSMPESLGEALHHLRNSKLMRDILGDHVYENFLTVKQREWDQFRSYVGEWEIKKYLPTL

SEQ ID NO: 14210 - protein, 641 aa, Methylovorus sp. SS1
MAKIIGIDLGTTNSCVAVMEGGKPRVIENAEGTRTTPSIVAYQDDGEILAGAPAKRQAVTNPKNTLYAVKRLIGRRFEEKEVQKDIGLMPYTITKADNGDAWVEVRGQKMAPPPNSAEVLRKMKKTAEDYLGEEVTEAVITVPAYFNDSQRQATKDAGRIAGLEVKRIINEPTAAALAFGLDKQEGDRKIAVYDLGGGTFDISIIEIAEIDGEHQFEVLSTNGDTFLGGEDFDNRLIDFLADEFKKEKRLDLRNDLLAKQRLKEAAEKAKIELSSAQQTEVNLPYITADATGPKHLVVKITRTKFESLVEDLIERSIKPCEVALKDAGVKPSDIQDVILVGGQTRMPKVQEKVKEFFGKEPRKDVNPDEAVAVGAAIQGGVLQGDVKDVLLLDVTPLSLGIETLGGVMTKLIKKNTTIPTKASQVFSTAEDNQNAVTIQVLQGEREMAAGNKSLGQFNLSDIPPAPRGMPQIEVTFDIDANAILHVSAKDKATGKENKITIKANSGLSEEEIKRMEEDAAAYADEDRKLRELVDARNSADGMVHSVKKSLSEHGDKLEAGEKEKIEAAIKDVEDAIKGDDKEAIEAKTNALMEASQKLGEKVYAEQQAQQGGAEEAQPQGEKTVDADVVDAEFEEVKDDKK

SEQ ID NO: 14211 - protein, 798 aa, Coccidioides immitis RS
MASSSVTVHALRAGRFTIPEHIFVTGASELDRKTVPSLAFLIQHHNISTGKTTRIVFDLGLRRDIRRYPAPIERHLRTRQPLETDPDVVKSLAAGGLSPNDIDYVHWDHVGEPRDFTRSTFVVGYGSLDLLRGKIPAPRGSHTIFEHDLIPHDRTVQLLDPGISDTGLNLNEPNSEESPGSPDFKQLWKSHSEGSVSCIAMDVFHDGSVYLIDAPGHLPGHTNLLARTDMGSIYLAGDACHDRGILRKERGISQWQDSTGHVCCIHADPKRTEETLELLRALERQGVEANLPVYLFTDAFLAARRGEETACDPKASRSWGNHMTSIHDPQTSPTSLASQFLKWDRLQQLFAPRRLYKRVDVEDTERDGVEEDVTQEEPIPSAFSWLEYGIFLWMGVSMLWAWNMFLAAAPYFQRRFASHPWIRTNFQSSILSVSCITNLTSVLVLAKRQKNASYPRRIRASMLLNICVFTLLALSTVLFRGVAVWVYFVFILVMVFAASMATGTNQNGVFAYVAGFGRNEYTQGIMVGQGVAGVLPCIVQVIAVLAVPDEPSDTVDEEKVQYQSAKSAFIYFATATIVSSIAFVAFLHLNGKHQSRILKSPGLPPFESDEEETPTKRSIPLLTLFRKVPWAASAMFITFAATMAFPVFTAEIHSVREAESPPPSRIFQAAAFIPLGFLFWNSGDLLGRMSAGLPMLNKLTRRPFLLFVSSLARILFVPLYLMCNIRGEGAKVNSDFFYLFVVQLLFGVTNGYLCSSSMVSAVEWVGENEREAAGAFMSLMLVAGLTMGSLLSFFVAKL

SEQ ID NO: 14212 - protein, 345 aa, Vitis vinifera
MQSNSKGPNQIGPPHTAPPSSVYSEPWWRGVGYNPISTTMTGGNTNNSPSSECPNGGSESNDGQSHSNGGLNEEDDDSIKESQATASSQSNGNYGQEHQNLQHIAPNIQIGSSECLTQPPQLELVGHSIACASNPYQDPYYGGMMTAYGPQPLVHPHLLGMHEARMPLPLEMTQDPVYVNPKQYHGILRRRQSRAKAELEKKLIKVRKPYLHESRHQHALRRARSSGGRFAKKSAAEASKHASEEKVTALGSAPSPQSVSSSGSERLPSDSTETWNSSSRQQEARGPQAHDTHEPPKYKNGSGYYQSPGDSQTTNHSHTSERGEEDQQWKSFSADQGSQRPHAFQ

SEQ ID NO: 14213 - protein, 634 aa, Haemophilus ducreyi 35000HP
MGKIIGIDLGTTNSCVAVMDGDKPRVLENAEGARTTPSIIAYTDKETLVGQPAKRQAITNPKNTLFAIKRLIGRRFTDNEVQRDIEIMPFEIAKADNGDAWVNVKGDKLAPPQISAEVLKKMKKTAEDFLGEPVTEAVITVPAYFNDAQRQATKDAGRIAGLEVKRIINEPTAAALAYGLDSKKENQIIAVYDLGGGTFDISIIEIDNFDGEQTFEVRATNGDTHLGGEDFDNRVINYLVEEFQKEQGVDLRNDPMAMQRVKEAAEKAKIELSSAQETEVNLPYITADATGPKHLNIKVTRAKLEALVEDLVSRSLEPLKTALADAGLSVSEINDVILVGGQTRMPLVQKKVADFFGKEPRKDVNPDEAVAIGAAVQGGVLAGDVTDVLLLDVTPLSLGIETMGGVMTSLIEKNTTIPTKKSQVFSTAEDNQSAVTIHVLQGERKRAADNKSLGQFNLEGINPAPRGMPQIEVTFDIDANGIINVSAKDKNTGKEQQIKIQASSGLSDEEVEQMVRDAEANAESDRQFEELVQTRNQADSIAHATRKQISEAGDALTAEDKAKIETALAELETAAKGEDKAEIEAKIEAVIKASEPLMQAAQAKAQTNQAGEQQSSAKDDSVVDAEFEEVKENK

SEQ ID NO: 14214 - protein, 453 aa, Xanthobacter autotrophicus Py2
MTSRTEFAREAEGRASVSAKVSLDLAKIAKERGIKYFLISYVDLFGGLRAKLVPASAIGPMQKEGAGFAGFATWLDMSPADPDLFAVPDPTSLIQLPWKEEIGWLAADLYMGGEEVAQGPRTVLKRQLAAAAALGYEVKTGVECEYFLITPDGKGISDTSDTAEKPCYDQSALMRRYDVIKDICDAMIKLGWGAYQNDHEDANGQFEMNWNYDNALLTADRHVFFKYMVKSIAEQHGLRATFMPKPFINLTGSGCHAHVSLWSKGKNAFSDPKGELGVSQLGYHFIGGLIHNADALCAITNPTVNSYKRINAPRTISGATWAPNTVTYTGNNRTHMIRIPDAGRFEFRLADGAANPYLLQAGLTAAGLDGIENQRDPGKRLDINMYTDGHKVKGAKRLPLNMLDALRALEKSRVLGERLGQPFVTGYLKLKNEEWNAYSRHLTQWERDNTLDI

SEQ ID NO: 14215 - protein, 657 aa, Pseudomonas aeruginosa
MSRPRLVNRTSATPSTLLQRAIFDGYDFGLKIPYIAGSNRALLELSGFFISAREHPLHRYWRVPKGKLLPELDSLYNRLAELAGGLHSQSWRDFSGMVESAQASLDRQAFTWGLLLRIAPLAEGGVLLSGEFHPGVVAVARRMRGVFLRPSSSWRIDATTELLRSNLILELGLAEEQFEILDTVQELLSDGSFAPATELPSMSIGGPQQEPAALSLEDESACDIYLAAVPEIERTEYSSADIEAALQGYSLLAHQPDGIAHLLQRTSALLADDMGLGKTRQAVIAASIRAAGRPILVITLATLLINWQREIQEVYPSATVAIQQDTPEAQWILVNYEQLSPFVANASRFAVMVIDEAQRMKEPTAQCTRHGFDIAAQVPNRYLLTGTPVLNRETELHTLLRLSGHPIGQLPLKEFCDRFAGNPEFRQSLRAELGDWMLRRRKDVLPSLKGKQRQLLKVALSTEERQQYDVLRLEDRPVFARLGALRRYLETVKVRVAMDLLSELDAEDKVILFCEFKPTVAALKELCEQAGLGCVTLVGNDSLTKRQKAIDRFQQDPDCRVFICTTAAAGTGNNLTAANYVFFLGLPWTPGQQEQAEDRAYRNGQLRMVVVKIPLVEGTIDEQLWQLLNAKRQVAQDLIEPEQVDGNRALLAASLTG

SEQ ID NO: 14216 - protein, 1050 aa, Cymodocea nodosa
MAAVEDGALPYRKLLEEVNGTVTGEGRSESTPQDGIIFVGVSLVLGIASRHMLRGTRVPYTVALLLLGIGLGALEFQTSNGLGKLGSGIRLWSHINPELLLGVFLPALLFESSFGMEVHQIKKCLAQMILLAGPGVIASTFCLGSLLKLTFPYNWDWKTSLLLGGLLSATDPVAVVALLKDLGASKKLNTIIEGESLMNDGTAIVVYQLFYDMVLGQEFSAGSIIKFLCEVSLGAVAVGLAFGIVSVLWLHYIFNDTVIEVTLTLAVSYIAFYTSQDAIKVSGVLSVMTLGMFYAVAARTAFKGETHESLHHFWELVSYIANTLIFILSGVVIGENVMSDKSSFESDGAKWGYLILLYVYVQLSRATVVGILFPFLRYFGYGLGLKEAAILIWSGLRGAVALALSLSVKRAGDSLESPSLKQDVGTSFVFFTGGIVLLTLIINGSTTQFLLHFFAMDKLPDAKIRILNYTKYEMLNKAMETFDDLGDDEDLGPVDWPTVKKYITCLNDLEGVQENPHTISESENQLHDMNLSDTRVRLLNGVQAAYWEMLEEGRITQTTGILLMQSVDEAMDTVSHETLCDWKALKAHVHFPKYYKFLQMSRIPQGLVTYFTVERLESACYISAAFLRAHRIARRQLREFIGESEIATAVINESEEEGQEARNFLEDVRISFPQVLCAVKAKQVTYSVLKNLSEYVQTLEKIGLLEEKEMLQLDDAVQTDLKKLLRKPPSVVMPKLKDLLDRHPLLGVLYKQVQVPFEKSTKEIMKTEGRTLYREGSKPKGIWLISSGVFKWASTTLSSRQSLHPDFLHGSPLGLYEVLAGKRFICDMVTDSLVHCFFIKAEKILPLLRSDPEVEELLWRESSIVIAKLLLPLVFENLPLQEVQGLLNERSRMDTYVSGESIEIPHNSVCILLEGSLESQDAHRSLIASPAVLLPSNVAPSFLNLESSGTVPASCCHRGNSYMVEAIARVVRFEIGANERRSPPQWRQSLCMPQSVGPQRLPVREQCGLLSWPENLQRARSHPQVLNAYGHQANNMSARGTGLHNFRSMV

SEQ ID NO: 14217 - protein, 163 aa, Clavibacter michiganensis subsp. sepedonicus
MTHPRLDEIPLTTLQGEATTFGAYADKVVLVVNVASRCGLAPQYEKLEQLQRTYGERGFTVIGFPSNQFLQELGSAEAIDEYCSTTWGVTFPMMEKVKVNGRSAHPVYAELTKTPDAEGKAGRVKWNFEKFVVTPSGAVHRFRPTVEPDAPEIVSLIEAELPA

SEQ ID NO: 14218 - protein, 614 aa, Staphylococcus xylosus
MSKVIGIDLGTTNSCIAVLEGDEPKVIQNPEGARTTPSVVAFKNDETQVGEVAKRQAITNPNTIQSIKRHMGTDYKVDVEGKSYTPQEISAMVLQNLKSTAEDYLGESVDKAVITVPAYFNDSERQATKDAGKIAGLEVERIINEPTAAALAYGLDKTDQDQKVLVFDLGGGTFDVSILELGDGVFEVLSTAGDNKLGGDDFDQVIIDHLVAEFKKENSVDLSKDKMALQRLKDAAEKAKKDLSGVSQTQISLPFISAGESGPLHLELTLTRSKFEELADSLIRRTMEPTRQAMKDAGLSSSDIDEVILVGGSTRIPAVQDAVKKEVGKDPHKGVNPDEVVAMGAAIQGGVITGDVKDVVLLDVTPLSLGIEIMGGRMNTLIERNTTIPTSKSQVYSTAADNQPAVDIHVLQGERPMAADNKTLGRFQLTDIPAAPRGVPQIEVTFDIDKNGIVNVTAKDLGTNKEQNITIQSSSALSDDEIDRMVKDAEENAEADKKRREESDLRNEADSLVFQVEKTITDLGENISEEDKTNAEDKKEALKSALEGEDTEDIKAKKEELEQVVQDLSTKVYEQAAQAQQQAQGEDANASQDSNVEDADFKEVKDDDSEDKQK

SEQ ID NO: 14219 - protein, 666 aa, Solanum lycopersicum
MAACSRRGNSLVVLAIVLLGCLSALSNAKEEATKLGTVIGIDLGTTYSCVGVYKNGHVEIIANDQGNRITPSWVAFTDNERLIGEAAKNLAAVNPERTIFDVKRLIGRKFEDKEVQRDMKLVPYKIVSKDGKPYIQVKIKDGEVKVFSPEEISAMILTKMKETAEAFLGKTIKDAVVTVPAYFNDAQRQATKDAGVIAGLNVARIINEPTAAAIAYGLDKKGGEKNILVFDLGGGTFDVSILTIDNGVFEVLATNGDTHLGGEDFDQRIMEYFIKLIKKKHGKDISKDNRALGKLRREAERAKRSLSSQHQVRVEIESLFDGTDFSEPLTRARFEELNNDLFRKTMGPVKKAMDDAGLQKNQIDEIVLVGGSTRIPKVQQLLKDYFDGKEPSKGVNPDEAVAYGAAVQGGILSGEGGDETKDILLLDVAPLTLGIETVGGVMTKFIPRNTVIPTKKSQVFTTYQDQQTTVSIQVFEGERSLTKDCRNLGKFDLTGIPPAPRGTPQIEVTFEVDANGILNVKAEDKGTGKAEKITITNDKGRLSQEEIERMVREAEEFAEEDKKVKEKIDARNALETYVYNMKNQINDKDKLADKLESDEKEKIETATKEALEWLDDNQSAEKEDYDEKLKEVEAVCNPIITAVYQRSGGAPGGGASEEEDDSHDEL

SEQ ID NO: 14220 - protein, 505 aa, Neisseria gonorrhoeae FA 1090
MYITFAIYLVAVLLIGLAAYFSTRNFDDYILGGRSLGPFVTAMSAGASDMSGWLLMGLPGAIYLSGLNEAWIAIGLLVGAYFNWLLVAGRLRVHTEYANNALTLPDYFFHRFGAGGHLMKVVSALIILFFFTIYCASGIVAGATLFQSLFEGMTYNQAMWLGAGATIAYTFLGGFLAVSWTDTLQASLMIFALILTPVMVYLGLGGAEQMSAAIQSVAAGTGKEYGSLFAGTTVIGIISTAAWGLGYFGQPHILARFMAAESAKSLVSARRIGMTWMALCLAGAVAVGYFGIAYFGANPDKVSSMSGNHERIFIALSTLLFNPWIAGIILSAILAAVMSTLSCQLLVCSSAITEDFYKGFLRKNAQQSELVWVGRLMVLAIAVISILIASDPNSKVLGLVSYAWAGFGAAFGPIVILSVLWKRITAYGALSGMVAGASTVVVWAEWVKKPARAAGESGLLTMYEIVPGFIVCLIVAVLVSLFNKEPSREIQERFEKADADYRAAR

SEQ ID NO: 14221 - protein, 577 aa, Shewanella sp. MR-7
MHESQITSSATQTVKTSRLSWFDDVLLLGIMAVLAGCGLIYEYLLSHYAGRILGALEAAIYTMIGLMIVSMGLGAFAARKIKDAFTGFVVLELTVALCGSLAILITAAVIGFGQQLPMLIASTLGLPPDQLPEGGMIGSLQKLSEYLPYVWGVLLGLMIGMEIPLIARVRQSLSDEHLLHNAGTIYGADYIGAGIGAAIWVGFMLAIDIQLAAALTASFNLLAGFVFIWRFWPKIQRAKLLLAGHFVVTGVLLLLAIQGPSWELQFNNLLYKDKVVYAKATRFQQLTFTERLRGNGLSPIYSLYINGRLQFSSIDEHIYHAFLVHPTLAASARHNKVLIIGGGDGLGLKQVLRWEPEQVTLLDLDAALVQLFKTPDTDMPKRLSQALLALNGNAFNDPRVKVIHDDAFNGVDKLIAAGDKYDAIIVDLPDPSHPDLNKLYSDYFYRKLKELMSSDGALTVQSTSPYHAQKAFISVAKTLALAGFDVKQYHHNVPSFGEWGWSIATLSGKDAQHRLGELTTLPIADDWLTLGLVKGAFEFPANFYQDAASIKPNELGSLQLYHYHQQAWSETQGLDLF

SEQ ID NO: 14222 - protein, 494 aa, Pasteurella multocida subsp. multocida str. Pm70
MRRLTALLGQVELAPNIELTEMILDSRAVKQGCLFVALQGHQVDGRQYIPQAIAKGASAVLAETEDAQQHLSTKIEQGVPIISFYQLGSHLSALAGLFYDNPSHKLTLVGVTGTNGKTTISQLLAQWTTLLGHRSAVMGTIGNGLLGQVKEATNTTGSAVEVQASLADFVKRGADFAAIEVSSHGLVQHRVEALAFDVAIFTNLSRDHLDYHQSMENYALAKKRLFTELNSRHQIINADDSVGQTWLQEQPNAVAVSCQTDFKPHQARWLKATAIQFSQKGARIQFESSWGKGELHSALIGQFNVSNLLLVFATLLSLGYDIEKLMKTVPQLTGVCGRMERLSASNQPTAIVDYAHTPDALEKALQAARLHCQGKLWCVFGCGGDRDRGKRPIMAKIAEQFADHVIVTDDNPRTESAAQIVQDILAGFEHPQHVEVCHARDQAIIQALQKADSDDVVLIAGKGHEDYQIIGTQKQHFSDQETVQQYFKVNHHHA

SEQ ID NO: 14223 - protein, 204 aa, Zea mays
KIQYFRLDGSSAISDRRDMVRAFQNRNDIFVFLLSTRAGGLGINLTAADTVIFYEIDWNPTQDQQAMDRTHRLGQTKEVTVYRLICKDTIEEKILQRAKQKNAVQELVMKGKHVQDDHLMRQEDVVSLLIDDTQIAHKLKEISMQAKDRQKRRRAKGIKVDKEGDLTLEDLDDATAEAVDQDKTTSKKKHRGTRIPGTQWPAHM

SEQ ID NO: 14224 - protein, 737 aa, Yarrowia lipolytica CLIB122
MIDVPLSQGTGYGVVLGAGLGFSVVMVFITWALRRYQREVMSSEEFSTASRSVKAGLIAASVVSSWTWAATLLQSSSQAYKNGVSGPLWYATGATTQVVLFATLAIELKRRAPGAHTYLEVVKMRFGPAGHAVFMVFALMTNTLVTLMLLTGGSAVVNDLTGMHVAAACILLPLGVVLFTLFGGIKATFITDYINNIVLLIMIILFAFTTYSNHEVLGSPGKVYDLLVERALQLPVKGNEQGSYLTIKSYDGAIFFVMNIIGGFGTVFLDNGYWNKAIAASPAAALPGYVLGGLAWFAIPWLCATTMGLACLALEGTPSFPGYPGRLSAEDVNAGLTLPAAAVALLGKAGAGCALVMVFMAVTSAYSSELISVSTIFTYDIYKGYINPKATGKKLIMASHAAVVVFGVATACFAIGLYYIGVSMGFLYLLMGSIISAAVIPAVLTLLWSGLNFWAAVLSPPLGFCFAITAWLVTTKSLEGEINVETAGTNLPMLAGNVVALLTPAITIPLFTLIFGMDNYDFEKFKQITRADDSEFWKVDAVEELGGSDEVASIREKKQANAPNKSTGESSAPENGMVAEYEVDDSLSDEAPIHIEELDPAEKALLDKYAKISRIITIVMAVCLLVLWPMTMYGTGYVFSKKFFTGWVAVGFVWIFFSTIMVIIYPLWESRQGIFETLRGLYWDCTGQTWKLRRWQSQTENKQMAAHGVTRTISHIERLQGEEVESEEGVQVTKVDN

SEQ ID NO: 14225 - protein, 369 aa, Malus sylvestris
MEDGAGRGLECQKTMDGKGSNGNGSEKAIPSCCLKAMASTPEAEAKCHSTVVSGWFSESQSRSEKDCKKVYFNNPMWPGEAHSLKVENILYRGKSEYQEILVFESSIYGKVLVLDGIIQLSEKDECAYQEMIAHLPLCSISSPKTVLVVGGGDGGVLREVSRHPSIEHIDICEIDKMVIDVSKKFFPQLAVGFQDPRVHLHVGDATEFLRLAPEGKYDAVIVDSSDPVGPAQELVEKPFFETIARALRPGGVLCNMTESMWLHTHLIQDMISVCRQIFKGSVNYAWASVPTYPSGVIGFLLCSTAGPPVDFKNPVNSIEKLERALKHKRELKFYNSEMHSAAFALPPFLRREVSALRESSTPARQIGEK

SEQ ID NO: 14226 - protein, 481 aa, Heterosigma akashiwo
  misc_feature (266)..(266): Xaa can be any naturally occurring amino acid
  misc_feature (292)..(292): Xaa can be any naturally occurring amino acid
  misc_feature (314)..(314): Xaa can be any naturally occurring amino acid
IGIDFGTTYSCVGVWQNDRVEIIANDQGNRTTPSYVAFTETERLIGDSAKNQVAMNASNTVFDAKRFIGRKFDDPATQEDMKHLPFTLVNGPGGKPLIQVEFKGETKTFMAEEISSMVLTKMKEIAEAYLGKDVKNAVITVPAYFNDSQRQATKDAGTISGLNVLRIINEPTAAAIAYGLDKKGEEKNVLIFDLGGGTFDVSLLTIEEGIFEVKATAGDTHLGGEDFDNRLVEYFLTEFKRKFKKQLNTNQRALRRLRTACERAKXTLSSSTQAHIEIDSLFEGIDFNSTIXRARFEDLNMDYFRKCMEPVEKXLRDSKLSKSQVHEVVLVGGSTRIPKVQQMLQDFFNGQAPCKSINPDEAVAFGATVQAAILSGQDQSEKLQDLLLLDVTPLSLGLETAGGVMTVLIKRNTTVPAKKSQVFSTYADNQPGVLIQVYEGERSMTRDNNLLGKFNLDGIPPMPRGQPQIDVTFDIDANGIV

SEQ ID NO: 14227 - protein, 161 aa, Pseudomonas fluorescens Pf-5
MTDSLLTIPCTTIKGEQKTLADFAGKAVLVVNTASKCGFTPQYKGLEELWQTYKDQGLVVLGFPCNQFGKQEPGNEGAISEFCELNYGVSFPLFKKVEVNGAGAHPLFAQLKKRAPGVLGSQGIKWNFTKFLIGQDGKLVKRFAPATKPQDLSREIEALLK

SEQ ID NO: 14228 - protein, 350 aa, Malus sylvestris
MGEAVEFYHANGNGFSKFSEKFDPKAVVLLNGSNHIERDIDSSWYEETIDDDLKWSFALNVNGVLHKGTSEYQEIALLDTKRFGKVLIIDGKMQSAEVDEFIYHECLIHPALLCHPKPERIFIMGGGEGSAAREALKHKLLDKVTMCDIDQEVVDFCRRHLTVNQEAFSHHKLNLIINDAKAELEKSCEKFDIIVGDLADPVEGGPCYQLYTKSFYDKILKPKLNHGGIFVTQAGPAGIFTHKEVFTSIYNTVKQVFKYVVPYAAHIPSFADTWGWVMASDEPFFINAEKMDRRIEERIDGELNYLNGAQFMSSATMNKTVSLSLLNETHVYTEEDARFVHGHGVAYRIY

SEQ ID NO: 14229 - protein, 1146 aa, Thellungiella halophila
MATVIEAVMPYRLLEDETGSPEGESSPVDAVLFVGMSLVLGIASGHLLRGTRVPYTVALLVIGIALGSLEYGTHHNLGKLGHGIRIWNEINPELLLAVFLPALLFESAFSMEVHQIKRCLGQMVLLAGPGVLISTFCLASLVKLTFPYDWDWKTSLLLGGLLSATDPVAVVALLKELGASKKLSTVIEGESLMNDGTAIVVFQLFLKMVMGHSSGWSSIITFLIRVALGAVGIGIAFGIASVLWLKFIFNDTVIEITLTIAVSYFAYYTAQEWAGASGVLTVMTLGMFYAAFARTAFKGDSQRSLHHFWEMVAYIANTLIFILSGVVIAEGILDSDKIAYQGSSWGYLFLLYLYIQLSRCVVVGVLYSFLCRVGYGLDWKEAIILVWSGLRGAVALSLSLSVKQSSGNSFLSTETGTMFIFFTGGIVFLTLIVNGSTTQFALRLLRMDGLPASKIRILDYTKYEMLNKALQAFEDLGDDEELGPADWPTVESYISSLKDSEGEQVHPHSGSKPGNLDHTSLKDIRIRFLNGVQAAYWEMLDEGRISESTANILMRSVDEALDHISTEPLCDWRGLKSHVKFPGYYNFLHSKIIPGKLVIYFAVDRLESACYISAAFLRAHTIARQQLYDFLGESNIGSTVIKESETEGEEAKEFLEKVRSSLPQVLRVVKTKQVTYSVLSHLLDYIQNLEKIGLLEEKEIAHLHDAVQTGLKKLLRNPPIVKLPKLSDLITSHPLSGALPSAICEPLKHSKKETMKLRGVTLYKEGSKPTGVWLIFDGIVKWKSKGLSNNHSLHPTFSHGSTLGLYEVLTGKPYMCDVITDSVVLCFFINSERILSYVQSDSTIEDFLWKESALVLLKLLRPQTFEKVPMHELRALVSAESSKQTTYVSGESIEIDHNSVGLLLEGFIKAVGIQEELLIASPAALLHSNENQSFRNSSEASGILRVSFSRQAARYSVETRARVIIFNHGAFGAHRTLQRKPSTLASPRATSSDHQLKRSASKEHRGLMRWPENIYKAGQEEEMNGKTLNLSERAMQLSIFGSTENLYKRSVSFGGLNNNKAQDNLSYKKLPSTSAQGLFSAKSEGSMATTKQVESRKFVSQLPPLAASAEGSSRRETMAEESSDDEGEGIIVRIDSPSTIVFRNDL

SEQ ID NO: 14230 - protein, 350 aa, Malus sylvestris
MGEAVEFFHTNGNGFCKFSEKFDPKTVVILNGSNHVERDRDSSWYEETIDDDLKWSFALNVNGVLHKGTSEYQEIALLDTRRFGKVLVIDGKMQSAEVDEFIYHECLIHPALLCHPKPKNVFIMGGGEGSAAREALKHKLLDKVTMCDIDQEVVDFCRRHLTMNQEAFSHHKLNLVINDAKTELEKSCEKFDIIVGDLADPVEGGPCYQLYTKSFYEKILKPKLNHGGIFVTQAGPAGIFTHKEVFTSIYNTIKQVFKYVVPYAAHIPSFADTWGWVMASDEPFSINGEKMDRRIEERIDGELNYLNGALFISSATMNKTVSLSLLNETHVYTEEDARFIHGRGVACRIN

SEQ ID NO: 14231 - protein, 1151 aa, Mesembryanthemum crystallinum
MAALTDFQLPLRLAEEVAANATSAAAAVAAESETNPTDAVIFVGVSLVLGIACRHFLRGTKVPYTVALLIIGIGLGSLEYGTKHGLGRFGDGIRLWEHIDPELLLAVFLPALLFESSFSMEVHQIKRCIIQMLILAGPGVLISTFCLGSALKLSFPYDWNWKTSLLLGGLLSATDPVAVVALLKELGASKKLSTIIEGESLMNDGTAIVVYQLFFQMVLGRSFNVAQIIKFLVQVSLGAVGIGLAFGVVSVLWLGFIFNDTIIEISLTLAVSYVAYFAAQEAADVSGVLTVMTLGMFYAAAARTAFKGESQESLHHFWEMVAYIANTLIFILSGAVIAEGVLNSGHIFENNGISWGYLVLLYVYVLASRAVVVTVLFPFLRYFGYGLEWKEAVILTWSGLRGAVALSLSLSVKRSSGDASLLSAQTGTLFVFFTGGIVFLTLIVNGSTTQFVLHFLGMDRLSAAKRRILEFTKFEMEKRALEAFGDLGEDEELGPADWPTVKRYIKSLNSGGEQIHPHDNSTSGGDLDPMSLTDIRVRLLNGVQAAYWVMLDEGRISQSTANILMQSVDEALDSVTHEPLNDWNGLKRNVHFPNYYRFLQGSSMWPRKLVTFFTVERLESGCYICAAFLRAHRIARRQLYDFIGESEIATAVINESETEGEEARKFLEDVRITFPEVLRVVKTRQVTHSVLKHLIDYIHSLEKAGLLEEKEIHHLHDAVQTDLKRVLRNPPLVKLPKAKDLVSTHPLLGALPATARDVLVNSTKEVVKVRGLTLYKEGSRPNGIWLISNGVVKWGSKSRVIKHAFHPTFTHGSTLGLYEVLIGKPYLCDMITDSVVVCFFVEAEKILSVLGSDFEMENFLWKESVIGLAKILLPQIFEKMSMHDLRLLIERSTMNTYLSGENVEVPPHAIGFLLEGFIKCHSLHEELITSPAALWPAQGNSSFLSQDGTGYKSTSFYSQGCSYYVETRARVIVFDINSFQHDKTLMRRKSSLLLHDQSTISLTSRDHGGLVSWPENARPEREGEDEEEIDEHEQNMSARARQLSIYGSMLKEKDPLLKTVSFHESVLNKPSSHSLSYPTVPDAQGRSLTTVKSEGSHTIRKRLEGDLPDIPSVPHSRRPSQLPESSDESGGEEDVIVRIDSPSRLSFRHAP

SEQ ID NO: 14232 - protein, 880 aa, Triticum aestivum
  misc_feature (855)..(855): Xaa can be any naturally occurring amino acid
CYEPARPGILADEMGLGKTVQAMAFLSHLAEDKNIWGPFLVVAPASVVNNWAEEVIRFCPDLKILPYWGPERVVLRKNINPKRLYRRDASFHILITNYQILVNEEKLLRRVKWQYMVLDEAQAIKSSSSQRWKTLLSFNCRNRLLLTGTPIQNNMAELWALLHFIMPTLFDSHEQFNEWFSKGIEGHAEHGGTLNEHQLSRLHAILKPFMLRRVKIDVIAEMTEKKEEIVPCRLSSRQQIFYQAIKNKISLNELLDGSRGNLNDKKLLSLMNIVMQLRKVCNHPELFERNEGSYYFYFAEIPNSLLPPPFGELQDIHYAGKRNPIVFEIPKLVYEGIICNTEIPVDGCGFRNGYINRLFNIFLPSNIHNSAVPESTSRTTSILPSGAFGFTRLTNLSPVEASFLVTSSLFERLVFSATRCKMEYVDEIVDLFLDSEGSDLQLSQYDATKVRAVTRLLLSPKRADSSLLRTKFEIGLSDNPCEALVLSHHDRLVSNIRLLRSTYGFIPPARAPPINVCCSDRNFAYKLTDEMHDPWIKKLFLGFARISEFNGPRIPNGHNTLIQEVCTDLPIPEPMLQLPYRIFGSSPPMSNFDPAKMLTDSGKLHTLDKLLRQLRAENHRVLLFAQMTKMLDILEDYMNFRKFKYFRLDGSSAISDRRDMVRNFQNRNDIFVFLLSTRAGGLGINLTAADTVIFYEIDWNPTQDQQAMDRTHRLGQTKEVTVYRLICKDTIEEKILQRAKQKNAVQELVMKGKQVQDDHLMRQEDVVSLLLDDTQIAHKLKEISMQAKDRLKKRRAKAIKVDKEGDLKLEDLDDPTEEPVEQDNTTSKKKKGSHKKPPKSQDNNGADGGVPESGXVEDEEHIASLRPKRSKRLVGSPGED

SEQ ID NO: 14233 - protein, 814 aa, Ustilago maydis 521
MFTRCMMLLAGAAGAATAIVSAASTSNGTNSLTTAIATATPTKPAAPALPVPDAEQQERFSSLALFLVLSLLIMSFWTSYYLKVKRITAVHETIVGLFAGMFVGVCLRVGPGEQVQNMLSFSNTIMLNVLLPPIILASGYDLRQENFFRNFGTILIFAFAGTFISAIVVGVIVYLWSLLHLESISLTLLECLIFGSTLSATDPVTILAIFNTYKVDPKLYSVIFGESILNDAVSIVMFDTLSTFRGKDIYISSIFHGIGLFLVVFTLSMLLGVCFGLGCSLLLKHSRLSSYPQLESCLVALIAYTSYFFSNGVTMSGIVSLLFCGITLKHYAYHNMSRRTQRTTRYTFQTLANLSENFIFIYLGLSLFTQEILVYKPLFIIVTVVAVVASRYCAVFPIASVVNAFKRARNNRRARATGGGGVPRGSGSGSGEEELPRQYQIMLFWAGLRGAVGFALSAGIEGQNAIALQTTVLVTVVLTVIVFGGTTAQMLEILGIRTGVQDDEGDSDDEEDEDDVMRLRGMQRRGYMDAANYRDASERAGLTRPGNRYASGGKSGYRDASANSSPRASLSHANSVYARAQGGGGKAGNQRGGFADDLDEEEDVSSLSSDMLPSRSSTPGPTSGLGPLSTSSGGPGFASARSPSNAGSLPSLSEIRRAVIEASSADGSTSSPAKQLLDRAGLVMKDGQWFQAIDQKYLLPLFSNSVASRKHEEKKIARLAARDAAASQLDLSLQVGDASAGGSAAGGRKNFFSVEEDGDADLYPAERDAVVVDEDDEDTGVPVFDATSFASGRRSTSGRNTPTRRTFSQNDEGL

SEQ ID NO: 14234 - protein, 320 aa, Oryza sativa Indica Group
MMDGRGSQEEEHLDLIMRHHASMGLDRCESEEALGSSESEQPTRPARPRGKRSRAAEVHNLSEKRRRSRINEKMKALQSLIPNSSKTDKASMLDDAIEYLKQLQLQVQMLSMRNGLYVPPVNLSGAPEHLPIPQMSAALDQNSAKASDPSVVLQPVNQTSGALLPFELASQHKPLFLPGVPNATALEPRFLVESSRSNLQSLRFTEPAEMIYPDEMMLKHRLTSASESTIVPGTDEKSVRQNTYMMNADRFDRYALSKDQLQHIMPKNTESVLDMPHLQRILTKVLIVSDYKLTIQLPILDRLQTSDTKVRVEGRIKVNP

SEQ ID NO: 14235 - protein, 459 aa, Pseudomonas sp. KIE171
MSEENKKQILKVRDFIEKHNIDTIRLGAVDIDGVWRGKQVGAEYFLNKAALDGTQISNILFGWDVADHLVDGLEFTGWDSGYPDIALIPDLSTLSLVPWQEKTASVLCDIQHLNGEPLNLSPRNLLRKAIEKAEQLGYKCYAAYEFEFYLLNDSIASISADQWRSINPVEKSGHCYSMLHHSSSSDIMGEVRKYMRDAGIVLEATNSEHGPGQYEINIKYDDALKAADDAIFVKNGIKEIAAKHGMTATFMAKPSAEWSGSSGHVHMSLSDLAGTPVFANPENPGALSEVGYNFLAGMVALAREMSAIYLPNINSYKRTAGASWAGGNSSWGFDNRTVSHRAITSAGSAARVENRIPGADTNPYLVIAASLLSGLYGIENKLKPKDPILGNAYKVSPELARPLAASLEEAAGIFRESEMARVIFPNEFVEHYAQMKVWEIKQSNSFVNNWELARYLDII

SEQ ID NO: 14236 - protein, 545 aa, Solanum tuberosum
MPMDTETKQSGDLIFRSKLPDIYIPKHLPLHSYCFENLSEFNSRPCLIDGANDRIYTYAEVELTSRKVAVGLNKLGIQQKDTIMILLPNCPEFVFAFIGASYLGAISTMANPLFTPAEVVKQAKASSAKIIITQACFAGKVKDYAIENDLKVICVDSAPEGCVHFSELIQSDEHEIPDVKIQPDDVVALPYSSGTTGLPKGVMLTHKGLVTSVAQQVDGENANLYMHSDDVLMCVLPLFHIYSLNSVLLCALRVGAAILIMQKFDIAQFLELIPKHKVTIGPFVPPIVLAIAKSPLVHNYDLSSVRTVMSGAAPLGKELEDAVRAKFPNAKLGQGYGMTEAGTVLTMCLAFAKEPFDIKSGACGTVVRNAEMKIVDPDTGCSLPRNQPGEICIRGDQIMKGYLNDPEATARTIEEEGWLHTGDIGFIDDDDELFIVDRLKELIKYKGFQVAPAELEALLINHPDISDAAVVPMIDEQAGEVPVAFVVRSNGSTITEDEVKDFISKQVIFYKRIKRVFFVETVPKSPSGKILRKDLRARLAAGISN

SEQ ID NO: 14237 - protein, 1050 aa, Debaryomyces hansenii
MNRVSKLWHSYKRHRVHGDTGLKIRNAIHRTTEKVYPYVKVVIPNFRAAHYTYILFMTFLGSVIFYPIRNIRYIDALFFTGCASTQAGLNTVNLNRLALYQQILIYIITTLTTPIFIHGSLLFIRLYWFERHFDNIKESSKLNNKMRRNATLAARTQSLDPTRLNTEVNRGLGLNNPQSSGPEPVIDEVAFSNSSSTSPASKHSSPPQNPSINSNNVNHISEPSDTDISSGVAPDSRNPINLSRPESPPRSLDGIRFGNLPQPSKIRQKEIEPSDMYMSIAMLQDNHKSERKDNGDEDDVLIIKSPNEIEKDSQNPIFTKKSQIHFNVNDKPIRKWKKKRRFSRGRQPWSKLKKTFSNSGVSPRKHVRSLSFTSLSNDDDDQSIDSETNNRTTDTDADDDNAIIDDDDDDDEDDGDDDDEDDGDDEDEDDDDEDDEDDDQDDEEDEYNRQNRHDDNLDDIERAQSNLVIPSSDATGGKKFTKRSNTLDVTPGENHELSHSPTFEKMIKSKMKKKKKPKQTKKQKLKYMKSPTVGLNSSLFSPNYNNGSDYDDSDDSDEDDDDEEEDGKSLSKVMSTNYLSWVPTVGRNSTFVHLSEEQKEELGGVEYRAIKLLIKIIVIYYIGFHILAFTCLLPYILYQPVYKADVINVGITPTWWAFFTAQSAFNDLGHTLTPNSMQSFDKSVYVMVIVAFFIVIGNTGFPVMLRFIIWVLFKLSKPMSLFNESLGFLLDHPRRCFTLLFPSVPTWWLFIILVVLNAVDLILFIVLDLNNKYLESTPIGLRVMDGLFQAFSTRTAGFAVVDLSELHPAVQVSYMLMMYISVLPLAISIRRTNVYEEQSLGVYLKDNNDDNDDAPDDKTPRNFIGAHLRNQLSFDLWFIFLGLFIICIAEGPKLNKNNYRFSIFTILFEIISAYGTVGLSLGYPGVDVSLSGEFTVLSKLVMIAMVIRGRHRGLPYALDRAIMLPDDNMQKRDNLQENHAIRRHQTMETSNSLDDGNAFRRAFTRRASSFGFDNTNILGRRKSSVRSSKPKPETPHYIVTTESHEMDDLA

SEQ ID NO: 14238 - protein, 441 aa, Vibrio campbellii AND4
MSVYHTLCFLSAAAMVIAFVNSKIGKMQTTIAITAGSMILSLLILIAGQNDWFHLNEIATETVTSINFEDFLLKGILGFLLFAGGLGIKLPNLKDQKWEITVLALGATLFSTFFIGFVLYGFCQVIGIQFDLVYCLLFGALISPTDPIAVLAIVKKLNAPRRISTQIEGESLFNDGFGLVIFVTLFTIAFGTEAPTVGSVTHLFIQEAIGGIVYGFVLGLIFHYLISATDDHSMELLLTIGVPTAGYAFAEYLHVSGPLAMVVSGIMIGNWTRFIGFSKESEDHLDHFWELVDEFLNGVLFLLIGMSMLLFEFHKEDWIMMAISVPLVLAARYLSVFISYIGFKRYRKYNPWSVKILTWGGLRGGLALAMALSIPSGILVIPEKLIDVKEIIMVMTYSVVVFSILIQGSTITPMIEKAKQAEKEMEQEASSETQESKASQE

SEQ ID NO: 14239 - protein, 538 aa, Cyanothece sp. PCC 8801
MLQLLGQWVFANSSSVNSQSYGDLEGLAIILIILLLVATTVALITQKLRIPYVTGLVIAGLPITDVLSRQIGLDPALVLNLFLPILIFEAAINTDVSRLRSTFKPIALLAGPGAVFSAAIIAGLVKFGLGLAWIPVLLIGVILANTDTVSMIAVFKEIRVPSRLSSIVEGETLFNDAAALISFNLLLTIHGTGSLTFLEGVQEFLIVALGGSLIGAILGYLSLPIFARLDDPLSSLLLTVAVALGTFQVGQFLGVSGAVAVVVCGLIFGNLGLSQTTSASERITLLSFWEYASFIVNTFIFLLIGIEIDPLTLWRTLPAILLVVVAYQLARILSVYFLLPILRWIDRPIPLRWQHVLVLGNIKGSLSMALALTIPLTLPGREEIITLVFGAVLFSLVGQGLILPWLVKGLNLSNFSKLREEIETLQIQLMTSKAAQGELENLLKSGILPKAIYEEMRSAYQVKVAASEHRLRDLYNQSSDQSSNSAGERTKLDAIRRRLLLAEKGVVNDALRKRVISENLAQAYLTELDEQLLKLEDD

SEQ ID NO: 14240 - protein, 577 aa, Synechococcus sp. WH 7803
MALAELQQRLQQAQALELLLAFEPQRVLGGKEAAIFEAAEPRGLYCALWCGVWASSALGLGYPAITPDHQGIRMLCKAFVGSPVYVELMATALNLAADLLEACIEEPNSVATRLQPRVQAIRELASIRRGHGFSNALIRAATQRGIPCFPRWLEPGPNPPLLQFGVGEASRLIRSSANDADSLIGAQVAQRKPITLQWLQQLGFPTPRTIVLPVKSGQCSRSQALNAAVKVGWPCVVKPDAAELGCGITVNINTPRAFVAAVAKAIPFAHREVQVQAHCKGAYVRMAVINHTLVRALCCEPPFVIGDGSASIGRLIEVRAENWREPDAITREYFLERPQASPAIEQYLAHAGLTLKSVPEDGERVVISSDLENRMDWVYSELLDVVHPSVQWMAESISHSMALPNAGIDVITTDLAAPLHEGKTQLIEVNFMQRLQRAQAAQYLDTYFPATTSGWIPIEVIVCLSSNAAATHLRNDPVVAGSVVGISPALQADDIGLLETSIKECMVVGYFKPEQLLYNRSICHLKFLLSWQEFLDQGLPCERVSRVDLVGELSSADAERWRGFVDQLKVLGRLFQA

SEQ ID NO: 14241 - protein, 162 aa, Debaryomyces hansenii CBS767
MDKTSFYDFKPLDVYGEVYDFSQLKGKVVVIVNVASLCGFTLQYKDLEYLYKTYKERGFVVLGFPCNQFGSQEPYTEREILQICEKKFGVTFPIMDKIEVNGECEDPLYGYLKNEQRTSLGFKGIKWNFEKFLISRSGRVVKRYDSTVAPLNFEKAIVELLE

SEQ ID NO: 14242 - protein, 145 aa, Debaryomyces hansenii CBS767
MSDYPSSSGEDLSLPKATAQKIIGEILPKDIAISKEAREAITECSIEFIMILSTQLNDIAEKEAKKTIASDHVVKALEELGFHNYLEIINRILDEHKELLKGKEKKNNKFQNSGLTEEELLKQQEELFKKSRDRLHSTSEVKNES

SEQ ID NO: 14243 - protein, 1154 aa, Oryza sativa Indica Group
MHGDWPESPSQAVLYADEIAAVRAVLGAGLDKSRVVAALSRCGGNTERAINALLDDDATAAGVEDESKKGKGAKPAAPPVKAERDAGGAAPKPPPPPVKVEVLDDEPLGSQESNGCSARVKKEREDELLVKAPPPPTPDRVKKEEDYRCDGVAAKRGAATANAAGISLVPRPKKRSRVDDEAETIDLTATHPVPYLNPRPIRAVPPPEAMEMLESRRVRARPPPPSSDLRMVVAPPDAEFGEFPEERDWFLVGRSYVTGLSTNRGRRRLDAGELVHFSFPSLERTYGGIKVSNKKAAALAEIVRFSTNRAGEIGKLSTEWTKCLVPLVNSSKVKIQGKIVFPTVELRLMEEILLYVSFYIHRSVFTASGNNSSWDLLAPANVDYSTNPLCRLFRLLKLRAFTKADITPEELAAGKRPRNLRGDDNDEDEPMAIVGLENRHTAGQTFPEQGTDEQAISEAALNKIVGTAETYDLEEAEPPSTLVSVLKPYQKEALFWMSQLEKGIDADQAKKTLHPCWSAYKIVDKRAPAVYVNVFTGEATTQFQSVTQSARGGGKFLLEYEYLHLPNLMILADAMGLGKTVMTIALILSNPRGEIEQDKRGTRDRDTMAQTSRSSVRGGTLIICPMALLGQWKDELEAHSAPGALSVFVYYGGDRTTDLRFMAQHSVVLTTYGVLQSAHKNDGSSIFHRIDWYRVVLDEAHTIKSPRTKAARAAYELTSHCRWCLTGTPLQNNLEDLFSLLCFLHVEPWGDASWWNKLIQRPYENGDERGLKLVRAILRPLMLRRTKETKDKMGNPILVLPPANIEIVECEQSEDERDFYEALFRRSKVQFDKFVAQGSVLNNYANILELLLRLRQCCDHPFLVISRADTQKYTDLDELAQRFLDGVQRDSARRSAPPSQAYVEEVVEEIRQGATTECPICLESASDDPVLTPCAHRMCRECLLSSWRTPSGGPCPLCRSPITKSELITLPSQCRFQVDPENNWKDSCKVIKLIKILEGLQEKREKSIVFSQFTSFFDLLEVPFNQKGIKFLRFDGKLSQKHREKVLKEFSESKDKLVLLMSLKAGGVGLNLTAASNVFLMDPWWNPAVEEQAIMRIHRIGQKRAVQVRRFIVKDTVEERMQKVQACKQRMISGALTDDEVRSARIEQLKMLFT

SEQ ID NO: 14244 - protein, 473 aa, Synechococcus sp. WH 5701
MANPAQDLLRRIRDEGIELIDLKFADLHGQWQHLTVCTDLLNEESFQSGLAFDGSSIRGWKAINESDMVMVPDPATAWIDPFLRHKTLSLICSIQEPRSGEAYGRCPRSLAQRALAHLAGTGLADTAYFGPELEFFLFEDVRYGSSEGGSFYSVDSIEAPWNSGRLEEGGNLAYKMNAKEGYSPVPPSDTFQDIRSEMLLTMGQLGVPIEKHHHEVAASGQQELGIRFAELISAADNVMIYKYVVRNVARKYGRSATFMPKPVFADNGSGMHVHQSLWRDGQPLFFGLGTYADLSQTARWYIGGLLRHAPSFLAFTNPTTNSYKRLVPGFEAPVNLVYSQGNRSAAVRIPLSGENPRAKRLEFRSGDAMANPYLAFSAMLLAGLDGIRQQIDPGDGMDLDLFELPPEDLEQIATLPSSLEGVLAALEADHEYLLAGEVFSEDFISNWIALKSEELQQLRQRPHPYEFSLYYDG

SEQ ID NO: 14245 - protein, 654 aa, Paracoccidioides brasiliensis
MAPAIGIDLGTTYSCVGIFRDDRIEIIANDQGNRTTPSFVAFTDTERLIGDAAKNQVAMNPSNTVFDAKRLIGRKFADPEVQSDMKHFPFKVIDKAGKPVISVEFKGEEKQFTPEEISSMVLTKMRETAESYLGGTVNNAVVTVPAYFNDSQRQATKDAGLIAGLNVLRIINEPTAAAIAYGLDKKAEGERNVLIFDLGGGTFDVSLLTIEEDIFEVKSTAGDTHLGGEDFDNRLVNHFVNEFKRKHKKDLSSNARALRRLRTACERAKRTLSSAAQTSIEIDSLYEGIDFYTSITRARFEELCQDLFRSTMDPVERVLRDAKIDKSSVHEIVLVGGSTRIPRIQKLVSDFFNGKEPNKSINPDEAVAYGAAVQAAILSGDTTSKSTNEILLLDVAPLSVGIETAGGVMTPLIKRNTTIPTKKSETFSTFADNQPGVLIQVFEGERARTKDNNLLGKFELTGIPPAPRGVPQIEVTFDVDANGIMNVSALEKGTGKTNKIVITNDKGRLSKEEIERMLAEAEKYKAEDEAEASRISAKNGLESYAYSLRNTISDSKVDEKLDASDKEKLKTEIDKTVSWLDENQTATKEEFEAQQKELESVANPIMMKFYGAGGEGGAPGAGFPGAGGPGGFPGAGAGGAHSGGDDGPTVEEVD

SEQ ID NO: 14246 - protein, 682 aa, Saccharomyces cerevisiae
MFFNRLSAGKLLVPLSVVLYALFVVILPLQNSFHSSNVLVRGADDVENYGTVIGIDLGTTYSCVAVMKNGKTEILANEQGNRITPSYVAFTDDERLIGDAAKNQVAANPQNTIFDIKRLIGLKYNDRSVQKDIKHLPFNVVNKDGKPAVEVSVKGEKKVFTPEEISGMILGKMKQIAEDYLGTKVTHAVVTVPAYFNDAQRQATKDAGTIAGLNVLRIVNEPTAAAIAYGLDKSDKEHQIIVYDLGGGTFDVSLLSIENGVFEVQATSGDTHLGGEDFDYKIVRQLIKAFKKKHGIDVSDNNKALAKLKREAEKAKRALSSQMSTRIEIDSFVDGIDLSETLTRAKFEELNLDLFKKTLKPVEKVLQDSGLEKKDVDDIVLVGGSTRIPKVQQLLESYFDGKKASKGINPDEAVAYGAAVQAGVLSGEEGVEDIVLLDVNALTLGIETTGGVMTPLIKRNTAIPTKKSQIFSTAVDNQPTVMIKVYEGERAMSKDNNLLGKFELTGIPPAPRGVPQIEVTFALDANGILKVSATDKGTGKSESITITNDKGRLTQEEIDRMVEEAEKFASEDASIKAKVESRNKLENYAHSLKNQVNGDLGEKLEEEDKETLLDAANDVLEWLDDNFETAIAEDFDEKFESLSKVAYPITSKLYGGADGSGAADYDDEDEDDDGDYFEHDEL

SEQ ID NO: 14247 - protein, 158 aa, Neurospora crassa
MDEYSGYRYAYASEPWIVSGSGVSPPPSNDDLSLPKATVQKIVSEILPSSTGLSFAKEARDLLIDLCVEFISLVSSEANEISEKESKKTIACDHITQALERLGFADYVPAVLEAAAEHKEVQKGREKKANKFEQSGLSLEELERIQREQFADAAARHT

SEQ ID NO: 14248 - protein, 285 aa, Methylococcus capsulatus str. Bath
MCDAQDWFTESYPDNGSALSLKIRAKLHEEQTPFQRIEIYDTESFGKLMVIDGCTMVSDRDNFLYHEMMTHPVLYTHPAPKTVWIIGGGDCGSLREVLKHSEVEKAVQIDIDERVTRLAERYFPELCEANGDPRAELLFIDGIQWVKEAPDGCVDVIIVDSTDPVGPAEGLFNEAFFRQCHRCLRTDGILVQQSESPLFHLPLIASMHRIMRQAGFAQTRTLFFPQFIYPSGWWSATMAGKGDLNRFRADAAEAKLFPTRYYNADIHRAAFAVPEFFGDALRELV

SEQ ID NO: 14249 - protein, 246 aa, Vitis vinifera
  misc_feature (68)..(68): Xaa can be any naturally occurring amino acid
MASMPFSVSFTAHSPGFAQTKAAHHHSWPSSPYPSMAFLMPSTKSSFGASNSAFLRTGFSLCSSEIPXVSLKSRFSGGVYARAATEKSLYDYTVKDIEKKDVPLSKFKGKVLLIVNVASKCGLTASNYSELSHIYEKYKTQGFEILAFPCNQFGGQEPGSNPEIKQFACTRFKAEFPIFDKVDVNGPTTAPVYQFLKSNAGGFLGDLIKWNFEKFLVDKNGKVVERYQPTTSPFQIEKDIQRLLAA

SEQ ID NO: 14250 - protein, 181 aa, Arabidopsis thaliana
  misc_feature (96)..(96): Xaa can be any naturally occurring amino acid
MASSMLSSAGVVTSPGQATMVAPFTGLKSSASFPVTRKGNKDITSITRNGGRVSCMKVWSPIGKKKVETLYYLPDLTDVQLGKEVDYLLRNEWIPXVGFEWEHGFVYREHGNTPGYYDGRCWTMWKLPLFGCTESAPELNEVEECKNEYPERFIRIIGFRQNPCSAAAIVSLAEKPPSIHG

SEQ ID NO: 14251 - protein, 1126 aa, Physcomitrella patens subsp. patens; identical to SEQ ID NO: 7386

SEQ ID NO: 14252 - protein, 416 aa, Sinorhizobium meliloti 1021
MHAKMPGGLLAGFLLLLVPTQGFGLDLPRSGHPIFDRVVTLVADNFHDPSALDGFGAAVRQELDGGDPLNAKSTEPRVDAAIERILASLDASHTARFTQDSIAYYELADIFRYAIRHDMKRLFPPDGRASYAGVGMVTRMENGLPFVSDVYDGSPADKAGIRVGDEVLSVDGAPYREIESFRGRTGQKVEIRLRRNAGAQPFTTSVAVERLRPLPTFEKAIENSVSVNVSDGRRIGYLRLWTLSSPDGLDIAARELATGRLKDADGVVVDLRGRWGGGPPDAAELFVGDTPNFRLISRSGKDMLANVRWRRPVVAIIDEGSRSGLELFAYALKANGIPLVGTRTAGALLAGRAYLLPDDSMLELAVSDAVIDDGVRLEGRGVEPDVPVPFALPYAGGRDPQREAAMEEMRRILAKG

SEQ ID NO: 14253 - protein, 613 aa, Thermobifida fusca YX
MARAVGIDLGTTNSVVAVLEGGEPTVIANAEGARTTPSVVAFAKNGEVLVGEIAKRQAVTNVERTIRSVKRHMGTDWKTHIDGKDFTPQQISAFVLQKLKRDAEAYLGEEVTDAVITVPAYFSDAERQATKDAGKIAGLNVLRIINEPTSAALAYHLEKEGEATILVFDLGGGTFDVSLLDVGDGVVEVKATHGDNHLGGDDWDQAVVDWLVERFKSSNGIDLSKDKMAMQRLREAAEKAKIELSSSTETSINLPYITASAEGPLHLDEKLTRAEFQRLTSHLLERTKGPFFQVIKDAGISVDQIDHVVLVGGSTRMPAVVDLVRELTGGKEPNKGVNPDEVVAVGAALQAGVLKGDVKDVLLLDVTPLSLGIETKGGVFTKLIERNTAIPTKRSEIFTTAEDNQPSVQIQVYQGEREIAKYNKKLGVFDLTGIPPAPRGVPQIEVTFDIDANGIVNVTAKDLGTGKEQSVTITGGSALPKEDIERMIREAEEYAEQDRKRREEAETRNNAESLVYQTEKVISENEDKIPEDVKNETKEALDGLKKALEGSDIEAIRSASEKVALASQKIGSAIYSQSQQASGAAAGGQQNAEDAEVVDAEIVDEEPKREGNS

SEQ ID NO: 14254 - protein, 517 aa, Cyanothece sp. PCC 7424
MNVSQLVSVLVILLLVATGIALVSQWLRIPYVTGLVLAGLAIAELLPAKIGLDDSVILNVFLPILVFEAAINTDISRLRSTVKPIVVLAGPGVLLSSGITAILLKWGLGLTWMPALLAGVILAITDTVSVIAVFKEVPVPSRLTTIVEGESLFNDGVALVLFSLILETHEVGTISFVGSLQEFIVVILGGTLVGLGLGYLSTVLIVRSDEPLRNILLTWAVALGAFQIGQILGVSGVVAVVVAGLIVGTVGLSGSVSASTRLTLLSFWESASFGVNSLIFLLIGLEINLFTLWQTLPAVLLAIVAYQIGRLLSVYPLLALISRFDRPIPLRWQHVLFLGNIKGSLSMALALSIPFSFQGREQLIALIFGAVLLSLVGQGISLPWFVKRLKLFQVSLPNQQVEDWQSQLITAKAAQDELESLFKSGVLPKAIYEEMRSLYQVKVAAAEKALREFYNRRPDNLGSTQTQQTKLDAIRRRLLLAEKSALNEARRKRILSDQTVQERLKTLDEQLLNLDDH

SEQ ID NO: 14255 - protein, 536 aa, Solanum lycopersicum
MASVLASLFPKLGSLGTSDHASVASINLFVALLCACIIIGHLLEENRWVNESITALIIGLGTGVVILLVSGGKSSHLLVFSEDLFFIYLLPPIIFNAGFQVKKKQSFVNFMTIMLFGAIGTLVSCAIISLGAIQTFKKLDIEFLDIGDYLAIGAIFAATDSVCTLQVLHQDETPLLYSLVFGEGVVNDATSVVLFNAIQNVDLTSLNPSIALSFLGNFFYLFLASTLLGAGTGLLSAYIIKKLYFGRHSTDREVALMMLMAYLSYMLAELFYLSGILTVFFCGIVMSHYTWHNVTESSRVTTRHTFATLSFLAETFLFLYVGMDALDTEKWKFVGDRPGLSISASSILMGLILSGESCFCFSIIILIQLNEEILGRKNTFRQQVIIWWAGLMRGAVSMALAYNKFTHGGHTQLQDNAIMITSTITIVLFSTMVFGLMTKPLISLLLPPQRQLSTVSSGANTPKSLTAPLLGSREDSEGDLNVPDLPHPPSLRMLLTAPSHKVHRYWRKFDDAFMRPMFGGRGFAPPAPRSPTEHGP

SEQ ID NO: 14256 - protein, 861 aa, Acidovorax sp. JS42
MQITRIRALRGPNLWSRNTAIEAVVHCEPQECGYADIAGFEDRLRARFPKIGALQPHGADQRLSLAHVLEVAALSLQAQAGCPVTFSRTHATLEEGTYQVVVEYTEEAVGRLAMEHAGALLQSALADTPFDADAVVAELRELDEDERIGPSTGSIVDAAVARGIPFRRLTSGSLVQLGWGSKARRIQAAELDTTSAVAESIAQDKDLTKRLLHAAGVPVPLGRPVVDVEDAWVVAQEVGLPVVVKPQDGNQGKGVVVNITTREGLEAAYKTAREFGDEIMVERFLPGHDFRLLVVGHQLVAAARREPPQVLGDGQHTIRELVDIVNQDPRRGSGHGTALTKVRLDDIAIARIASEGLTPDSVPVQGQRVVLRNNANLSTGGSATDVTDDVHPEIAARAIEAAQTIGLHICGVDVVCETMLKPLEEQNGGIVEVNAAPGLRMHLAPSFGKPRNVGVPMVDELFAPGQDGRIPLVAVTGTNGKTTTTRLIGQLFAAHGLRVGMTNTDGVYVNGRQIDSGDCSGPKSARNVLFHPEVDAAVLECARGGILREGLGFDRCQVAVVTNVGAGDHLGLNFITTVEDVAVLKRVIVQNVAADGYGVLNAADPHVAAMASVCPGKVIFFAADRHHPVMATHRAQGNRVVYVDGDSIVAAEGSWRETISLREIPITRGGTIGFQVENVMAAIGAAWGVGLPWQTIRRGLAGFMNDSDNAPGRFNVMDYRGATVIADYGHNPDAMRALVQAVQAMPARQRSVVISGAGDRRDQDIVEQTQILGQSFDDVVLYQDACQRGRADGEVLALLRQGLQGAPRTRYVTEIHGEFLAIDHALERLQPGDLCLVLVDQVEEALAHLAQRCSEASAVAP

SEQ ID NO: 14257 - protein, 426 aa, Alkalilimnicola ehrlichei MLHE-1
MRMIRPLYSTAILLILAAGLGLGQTVWAERQQANADLPLEELQAVAEVYARIRSHYVDEVDDKALLEAAVRGMVSSLDPHSTFLDSSEFQALQEGTRGEFGGLGIEVGQEDGFIKVIAPIDDTPASRAGLRPGDLITRIDDKPVKGMSLTEAVKQMRGEPGSQITLTVVREGEDRPLTFEITRAVIQVESVRARMLEPGYGYLRISQFQERTGRDVREALSELKREADGSLRGLVLDLRNNPGGVLDGAVSVADVFLSNGRIVYTEGRDERAEMSFSATPVDMLHGAPLVVLVNQGSASASEIVAGALQDHGRAVVMGSPTFGKGSVQSILPLGRGAAVKLTTARYYTPGGRSIQDKGIQPDILSEELRVARVEREDMSPAELERHGLRQRPDVDRDDETESLAQRDFTLYEALNLLKGVGIFTGR

SEQ ID NO: 14258 - protein, 727 aa, Acidovorax sp. JS42
MAKFNDIQLLRTTYLRGPSVWTYRPVLEVWLDLGELEDYPSNKIPGLNERLTTWLPDLVEHHCGVGERGGFLLRLKEGTWMGHVLEHVVIELLNLSGMPAEFGQTREISRRGVYRMVFRCPEEAVARVALEHGHRLLMAAINDEAFDLKAAIHAIKTAINDRYLGPSTGCIVDAASARRIPHIRLNDGNLVQLGYGAAQRRIWTAESDQTSAIAEGIAQDKDFTKRLLASCGVPVPEGQIVRNADEAWEVAQEIGLPVTVKPSDGNHARGVTLELSREADIKAAFALAEPEGSDVIVEKFIDGVEHRLLVVGGKVVAATKGETVSVHGNGQSTLRELVAVLNEDPRRGPEQEYPLDWIDVEKGAVQLELKRQGVTPDTVVPSGQAILLQRNGNMAIDCTDDVHPDVAYYAQLAAKIVGLDIAGMDMILQDVSKPMKEQGGAILEVNAGPGLLMHLKPTSGAPRPVGQAIVEHLFPVTDEGAGTGTGAGRIPIVGIAGTRHNAFTARFVGWLLQLSGKLTGVASSEGMFLNNRRTQKSATAHWAGAHRLLTNRLAQAAVIQTTARSILEEGLAYDRCLVGVVTDMDGFETLADHDVLEQAQMTRVLRTQIDVVLDEGAGVLNADIEQVADLARLCDGEVLLYSLSPDNPFVAAHRAEGEGRAVFVRGEQVVLATGASERVLGTLDALSLPGGHRPDTAAMLAAIAAAWSMDIGPDLIAAGIKTFDYAA

SEQ ID NO: 14259 - protein, 168 aa, Triticum monococcum
MAAASSATSVHDFTVKDSSGKDVDLSVYKGKVLLIVNVASQCGLTNSNYTELSQLYPKYKDQGFEILAFPCNQFGGQEPGTNDEIVQFACTRFKAEYPIFDKVDVNGNNVSPLYKFLKSSKGGLFGDSIKWNFSKFLVDKEGHVVDRYAPTTSPLSIEKDIKKLLGSS

SEQ ID NO: 14260 - protein, 980 aa, Oryza sativa Japonica Group
MPSTSKCNRISRVADEEEEEEIVAVSSDADESESESEVGSGAEEEDDDYVGESSDSAGGSGSGSGDGDGDEEGGRSDIGDGEGEGGGRRVRSACRGVRANDRERKSQNVDALVRGNLVVRRQPLIPRILSVSDAAAIARKPFKPPCQNGYSENNEQLARRLSARKRFVPWGSVQPFAVTNILPQSPAVSSDDSVENEESLPPGIEPLILWQPEGRDKENSNFSAIKVDHLLVRYLRPHQREGVQFMFDCVSGLLNDDGISGCILADDMGLGKTLQSITLLYTLLCQGFDAKPMVKRAVVVTPTSLVSNWESEIIKWLKGRVQLLALCESTRADVLSGIESFLKPLSRLQVLIVSYETFRMHSSKFERPGSCDLLICDEAHRLKNDQTLTNKALAALPCKRRILLSGTPMQNDLEEFFSMVNFTNPGVLGDATYFRRYYEAPIICGREPTASAEEKNLGSERSAELSAKVNLFILRRTNALLSNHLPPKIVEVVCCKLTALQTALYNHFIHSKNVKRLISEGTKQSKVLAYITALKKLCNHPKLIYDTIKSNNSGGSGFDDCLRFFPPELFSGRSGSWTGGGGMWVELSGKMHVLARLLGHLRLKTDDRIVLVSNYTQTLDLFAQLCRERRYPYIRLDGATSINKRQKLVNQFNDPSRDEFVFLLSSKAGGCGLNLVGGNRLILFDPDWNPANDKQAAARVWRDGQKKRVYIYRFLSTGTIEEKVYQRQMSKEGLQKVIQQEQADGKMQGSSLSTEDLRDLFTFHEQIRSEIHENLKCNRCNKDGCMVLDGSKFDSAATEHEASNSGENSYIDIGGFGAISGCVQKMNSSNQQIGSPSEEDLGSWGHHSDPSTVPDTILQCSSGDEVSFVFTNQIDGKLVPVESMARAATHRTHEVTVNAEKEVGKINSSNVPGTERQSLLGKNLKMMGFNLKNSSMKFPTKSRRMLPNCLQGMNKTSTSSDHQQTKKLHVISDASDDDFV

SEQ ID NO: 14261 - protein, 548 aa, Herminiimonas arsenicoxydans
MHTVTIALILLLAVLASGFFARLLPIKVPLPLVQIAVGAGLAYGFGISVPLDPEFFFLFFIPPLLFLDGWRIPKSAFFRDVRPITTLAIGLVLFTVLGMGYFIHWMIPSVPLAAAFALAAILSPTDPVAVSAIASQSPIPPRLMHILEGEALLNDASGLVCFRFALAAVITGTFSLLDASMEFLWAAGGGLLVGALVAWLIGVANKWLVVAVGEDPGSQILISLLLPFAAYLLAEHLQVSGILAAAAAGITTHYTDMVGRRLATTRMQRRAVWDTIQMALNGVIFVILGAQIRTTMDGLPMVASSMGLSSAWWLSLYVIAIGVALTCLRFLWVWSTLRVTLFKKRRDQASDTKPSLRILMLTACSGVRGAITLAGILTLPLLMPDGSAFPARDLLIFLAKGVILLSLLSASVALPLLSKDMKFAPEPALGMDEGHARVAAAEAAIRHIKSLCDAAPENAEDNGQTEAAMRVTELYRRRLDYGLSEGEEAAHIQLLAEKERELRLSAIRAERDELFQMWLHNKLDDTLHQRLLRELDLIEGALTRNVQH

SEQ ID NO: 14262 - protein, 535 aa, Oryza sativa Japonica Group
MALELSLVSASPPGGLAASPPPPAAIPGKEQQVAGVGILLQISMLVLSFVLGHVLRRHRFYYLPEASASLLIGLVVGGLANISNTETNTRMWFNFHDEFFFLFLLPPIITQSGFSLSPKPFFANFGAIVTFAILGTFIASVVTGVLVYLGGLTFLMYKLPFVECLMFGALISATDPVTVLSIFQELGTDVNLYALVFGESVLNDAMAISLYRTMSLVRSQAAAGENFFMMVFQFLETFVGSLSSGVGVGFISALLFKYAGLDIDNLQNLECCLFVLFPYFSYMLAEGLGLSGIVSILFTGMVMKHYTFSNLSNNSQRFVSAFFHLLSSLAETFVFIYMGFDIAMEEHSWSHVGFIFFSIIFIIIARAVNVFSCAYLVNMSRPEHRRIPLKHQKALWFSGLRGAMAFALALQSANELPGGHGKTIFTTTTAIVVLTVLLIGGSTGTMLEALDVIGDENRSIENYDDNNGYIPPTYEEGSSSGGGLRMKLKEFHKSTTSFTALDRNYLTPFFTSQTDEDDDVFGEQPQNQRRGFYDQ

SEQ ID NO: 14263 - protein, 314 aa, Mesorhizobium sp. JX2B5
VMFDGSSIAGWKAINESDMVLMPDPDTVHMDPFFAQSTMVILCDILDPVSGESYNRDPRGTAKKAEAYMKSEGIGDQIFVGPEAEFFVFDDVKYKADPYNTGFKLDSTELPSNDDTDYETGNLGHRPRIKGGYFPVPPIDSAQDMRSEMLTVLAEMGVRVEKHHHEVAAAQHELGIKFDTLVRNADKMLIYKYVVHQVANAYGKTATFMPKPIFGDNGSGMHVHQSIWKGGKPTFAGNEYAGLSESCLFYIGGIIKHAKAINAFTNPLTNSYKRLVPGYEAPVLLAYSARNRSASCRIPFGSSPKAKRVEVRFP

SEQ ID NO: 14264 - protein, 314 aa, Mesorhizobium sp. JS5A15
VMFDGSSIAGWKAINESDMVLMPDPDTVHMDPFFAQSTMVILCDILDPVSGESYNRDPRGTAKKAEAYMKSEGIGDQIFVGPEAEFFVFDDVKYKADPYNTGFKLDSTELPSNDDTDYETGNLGHRPRIKGGYFPVPPIDRAQEMGSEMLTVLAEMGVRVEKHHHEVAAAQHELGIKFDTLVRNADKMLIYKYVVHQVANAYGKTATFMPKPIFGDNGSGMHVHQSIWKGGKPTFAGNEYAGLSESCLFYIGGIIKHAKAINAFTNPLTNSYKRLVPGYEAPVLLAYSARNRSASCRIPFGSSPKAKRVEVRFP

SEQ ID NO: 14265 - protein, 314 aa, Mesorhizobium sp. HN14A16
VMFDGSSIAGWKAINESDMVLMPDPETVHMDPFFAQSTMVILCDILDPVSGESYNRDPRGTAKKAEAYMKSEGIGDQIFVGPEAEFFVFDDVKYKADPYNTGFKLDSTELPSNDDTDYETGNLGHRPRVKGGYFPVPPIDSAQDMRSEMLTVLAEMGVRVEKHHHEVAAAQHELGIKFDTLVRNADKMLIYKYVVHQVANAYGKTATFMPKPIFGDNGSGMHVHQSIWKNGKPTFAGNEYAGLSESCLFYIGGIIKHAKAINAFTNPLTNSYKRLVPGYEAPVLLAYSARNRSASCRIPFGSSPKAKRVEVRFP

SEQ ID NO: 14266 - protein, 221 aa, Actephila lindleyi; identical to SEQ ID NO: 7407

SEQ ID NO: 14267 - protein, 437 aa, delta proteobacterium MLMS-1
MKNISKLSYKFTLPLLGILLFGAVAAWQLPDGVAANSKHDAYYEQLEIFANILHIVQQSYVDEVDAEEAMEGAIRGMLKSLDPHSSFLRADDFRDLQMETRGTFTGIGIEITMRDGVLTVVSPIEGTPAFKQGLRAGDQIVRINGETTKDISLLEAVRELRGPKGSEVEVSIMREGWSEFRDITIVRDVIPIHSVKSNWLEPGYAHIRISNFQAKTTRDFKAALKEFQDEQQIKGLILDLRNNPGGLLDQAVQLSDVFLEEGIIVSTKGRIQEQNMVFEAKKDALEIDFPVVVLVNEGSASASEIVAGALQDHQRAMVIGAPTFGKGSVQTIIPLDDGSGLRLTTARYYTPSGISIQAKGIVPDLEVQSELHDPDEQDEQEQPPHGFFREQDLPRHLENDQEREISEEERRLREQLARDRQLQAGLLLLKGLEVFKR

SEQ ID NO: 14268 - protein, 225 aa, Androstachys johnsonii; identical to SEQ ID NO: 7412

SEQ ID NO: 14269 - protein, 648 aa, Chlamydophila pneumoniae CWL029
MFVMKKLVRLCVVLLSLLPNVLFSSDLLREEGIKKMMDKLIEYHVDAQEVSTDILSRSLSSYIQSFDPHKSYLSNQEVAVFLQSPETKKRLLKNYKAGNFAIYRNINQLIHESILRARQWRNEWVKNPKELVLEASSYQISKQPMQWSKSLDEVKQRQRALLLSYLSLHLAGASSSRYEGKEEQLAALCLRQIENHENVYLGINDHGVAMDRDEEAYQFHIRVVKALAHSLDAHTAYFSKDEALAMRIQLEKGMCGIGVVLKEDIDGVVVREIIPGGPAAKSGDLQLGDIIYRVDGKDIEHLSFRGVLDCLRGGHGSTVVLDIHRGESDHTIALRREKILLEDRRVDVSYEPYGDGVIGKVTLHSFYEGENQVSSEQDLRRAIQGLKEKNLLGLVLDIRENTGGFLSQAIKVSGLFMTNGVVVVSRYADGTMKCYRTVSPKKFYDGPLAILVSKSSASAAEIVAQTLQDYGVALVVGDEQTYGKGTIQHQTITGDASQDDCFKVTVGKYYSPSGKSTQLQGVKSDILIPSLYAEDRLGERFLEHPLPADCCDNVLHDPLTDLDTQTRPWFQKYYLPNLQKQETLWREMLPQLTKNSEQRLSENSNFQAFLSQIKSSEKTDLSYGSNDLQLEESINILKDMILLQQCRK

SEQ ID NO: 14270 - protein, 181 aa, Brassica napus; identical to SEQ ID NO: 13807

SEQ ID NO: 14271 - protein, 966 aa, Oryza sativa Japonica Group
MPPLTGPKSGDALFGSVERVNAELFTLTYGAIVRQLLTDLEEVEEVNKQLDQMGYNIGTRLVDEFLAKSNVSRCVDFKETADVIAKLGFKMFLGVTATVTNWDAEGTSCSFVLEDNPLVDFVELPDTCQGLQYCNVLSGVIRGALEMVSMKTEVTWVRDMLRGDDAYEMRVKLTKQYYQGGRAITRRESVGLVREPHNPHDANAIRVDNARGEKIGHIGRRAAAALAPLLDAGHVAAAHGIVPKPASKRLYSLPCQVHLFARPPHAALVAAALAASGIDLIHVDHPEFALSESAIVQEQQTKRSRGDVDRLFSHVGKGGRARIAPMEAPRDVVVSELFEHQKAALGWLVHREESCDLPPFWEEDNDGGFKNVLTNQKTNERPPPLKGGIFADDMGLGKTLTLLSLIGRSKARNVGGKKARGAKRRKVEEAVEEESRTTLVVCPPSVFSSWVTQLEEHTKTGSLKVYLYHGERTKEKKELLKYDIVITTYSTLGQELEQEGSPVKEIEWFRVILDEAHVIKNSAARQTKAVIALNAERRWVVTGTPIQNSSFDLYPLMAFLRFQPFSIKSYWQSLIQLPLERKNNGIGLARLQSLLGAISLRRTKETESGSKSLVSIPPKTVLACYIELSAEEREYYDQMELEGKNKLREFGDRDSILRNYSTVLYFILRLRQLCNDIALCPLDLKSWLPGSGSSLEDVSKNPELLKKLASLVDDGDDFECPICLAPPAKTVITSCTHIYCQTCIMKILKSSSSRCPICRRSLCKEDLFIAPEIKHPDEDSSVNLDRPLSSKVQALLKLLRRSQSEDPLSKSVIFSQFRKMLILLEGPLKAAGFNILRLDGSMTAKKRSEVIRQFGCVGPDSPTVLLASLKAAGAGVNLTAASTVYLFDPWWNPGVEEQAMDRVHRIGQTKEVKVVRLIVKDSIEERMLELQERKKKLISGAFGRKKGGKEHKEIRVEELQMMMGMK

SEQ ID NO: 14272 - protein, 273 aa, Aspergillus nidulans FGSC A4
MSSPLILLPGDEVPSEYLPNNSAPLRLGQGLRLLSQPPGTTPSSHVLTATQAGVLSTDNKRNAVSILSSSNRRYVPTTNDLVIAQVHHSSADYFHCMITPQSPHALLGQLSFEGATKKTRPMLKGGDLVYARVLSTGLGPGAEVELTCVNPATGKAEPGGLGPLTGGMVFDISTGMAARLIKASSSSSDQQEGVAGLVVLDELGKKLEKVGGFEIAVGRNGKVWVDCSNSEEDAIKATVAIGRCITMIDEHNLVPTDQRKLVTRILREMKIDS

SEQ ID NO: 14273 - protein, 542 aa, Ipomoea tricolor
MAFGLSSLLQNSELFTSDHASVVSMNLFVALLCACIVLGHLLEENRWVNESITALIIGLCTGVVILLLSRGKSSHLLVFSEDLFFIYLLPPIIFNAGFQVKKKQFFVNFMTIMLFGAIGTLISCSIISFGAVKIFKHLDIDFLDFGDYLAIGAIFAATDSVCTLQVLSQDETPLLYSLVFGEGVVNDATSVVLFNAIQSFDMTSFDPKIGLHFIGNFLYLFLSSTFLGVGIGLLCAYIIKKLYFGRHSTDREVALMMLMSYLSYIMAELFYLSGILTVFFCGIVMSHYTWHNVTESSWVTTRHSFATLSFVAETFIFLYVGMDALDIEKWKFVKNSQGLSVAVSSILVGLILVGRAAFVFPLSFLSNLAKKNSSDKISFRQQIIIWWAGLMRGAVSIALAYNKFTTSGHTSLHENAIMITSTVTVVLFSTVVFGLMTKPLINLLLPPHKQIASGHSSMTTSEPSSPKHFAVPLLDNQHDSESDMITGPEVARPTALRMLLRTPTHTVHRYWRKFDDSFMRPVFGGRGFVPFVAGSPAEQSPR

SEQ ID NO: 14274 - protein, 224 aa, Apodiscus chevalieri; identical to SEQ ID NO: 7417

SEQ ID NO: 14275 - protein, 340 aa, Arabidopsis thaliana; identical to SEQ ID NO: 13033

SEQ ID NO: 14276 - protein, 475 aa, Leifsonia xyli subsp. xyli str. CTCB07
MIALTLSEIAAATRGRLLLEGTDATPRTVVDGLSTTDSREVVPGSIFFAKPGETTDGHLFVPQALDSGAALVVVDRELDVAGPQLVVEDTVVALGELAADVIARVRALGNLRIVGITGSNGKTTTKNLLRAILEQSGPTIAPRASFNNEVGAPVTMLEVSERTQYLVAEMSASGIGEIARLVGMARPDIGIVLKVGLAHAGEFGGIEKTLAAKTEMVSDLLESDVAVLNLDDPRVASMADKTAAHVLWFGLDDRAAVRASDIRSTSRGTSFVLRLPGADGGDAASRPVRFHVLGEHHVMNALAAAAAAHTLGIGIDRIVGGLEAVQRAERWRMEVLGGAGGVTVINDAYNASPDSMSAALKTLAQIAGPGERTIAVLGEMSELGEFSGEEHDRVGLLAVRLGIDQLVVVGPPARRMHITAINEGSWDGESLYFESQDAAYDHLKETLRAGDTVLVKSSNSAGLRFLGDRLGELFS

SEQ ID NO: 14277 - protein, 619 aa, Vitis vinifera
MYEPRNTKDREPTDDPSDGLRFSEHSLIVTEIHAHPRHSMQMKPHQVEGFNFLVSNLVADNPGGCILAHAPGSGKTFMIISFMQSFLAKYPQARPLVVLPKGILATWKKEFLTWQVEDIPLYDFYSVKADSRPQQLEVLKQWVAEKSILFLGYKQFSSIVCGDGASKAAMACQEILLKAPQILILDEGHTPRNENTDVLYSLAKVQTPRKVVLSGTLYQNHVKEVFNILNLVRPKFLKLESSRAIVKRIMSKVDIMGVRKQLKSNAADAFYDLVENTLQKDDNFRRKITVIQDLREMTSKVLHYYKGDFLDELPGLVDFTVLLNLSARQKKEVGNLNKFERKFKKNSVGSAVYLHPQLKYFAEKLAANESKTDEMTYQKKMDEILEQLDVREGVKVKFFLNVLALCQSAGEKLLVFSQYLLPLRFLEKLTMKVNGWSSGKEIFVISGESSSEQREWSMERFNTSPDARVFFGSIKACGEGISLVGASRVLILDVHLNPSVTRQAIGRAFRPGQKKKVHVYKLVAADSPEEEDHNTCFKKELISKMWFEWNEYCGNHEFEAETVNVSDSGDLFLESPLLREDVTVLYKRLVIHHSSVLSPSSSVQISQLFSLIYYLKIFR

SEQ ID NO: 14278 - protein, 405 aa, Bacillus thuringiensis serovar konkukian str. 97-27
MPKHRKQSKIKIYRITSYKKDKRSELDSDKFELEQQEVENKQGKHSKQDKQDKQDNLDKQDNLDKQDNLDKQDNLDKPDNLDKPDNLDKQDNLDKQVQSENVVIVPTDSHNLDIWDEISLKEIQAGEHTNLFAEQSNYQNINLLQVSDIRLYLDKQLQFSSIDEQIYHEALVHPIMSKVIDPKRVLILGGGDGLALREVLKYETVLHVDLVDLDGSMIDMARNVPELVSLNKNAFFDNRVNTHVCDAKEFLSSPSSLYDVIIIDFPDPATELLSTLYTSELFARIATFLTEDGAFVCQSNSPADAPLVYWSIGNTIEHAGLTVKSYHTIVPSFGTDWGFHIAANSADVLDQIEQLYVVPTPRTLPSLLFPLFQFKEEHLEQRNFALLNSESNLILHQCYKKEMEF

SEQ ID NO: 14279 - protein, 388 aa, Scenedesmus obliquus
  misc_feature (1)..(1): Xaa can be any naturally occurring amino acid
  misc_feature (43)..(43): Xaa can be any naturally occurring amino acid
  misc_feature (56)..(56): Xaa can be any naturally occurring amino acid
  misc_feature (134)..(134): Xaa can be any naturally occurring amino acid
  misc_feature (253)..(253): Xaa can be any naturally occurring amino acid
XVTSEQLLFLEAWRAVDRAYVDKSFNGQSWFKLRETYLKKEPXDRRAQTYDAIRKXLAVLDDPFTRFLEPSRLAALRRGTAGSVTGVGLEITYDGGSGKDVVVLTPAPGGPAEKAGARAGDVIVTVDGTAVKGXSLYDVSDLLQGEADSQVEVVLHAPGAPSNTRTLQLTRQKVTINPVTFTTCSNVAAAALPPGAAKQQLGYVRLATFNSNTTAAAQQAFTELSKQGVAGLVLDIRNNGGGLFPAGVNVARXLVDRGDLVLIADSQGIRDIYSADGNSIDSATPLVVLVNRGTASASEVLAGALKDSKRGLIAGERTFGKGLIQTVVDLSDGSGVAVTVARYQTPAGVDINKIGVSPDVQLDPEVLPTDLEGVCRVLGSDAAPRLFG

SEQ ID NO: 14280 - protein, 380 aa, Zea mays
MYGSPVSKDLNLPAQPPPMASSGLLRYRSAPSAVLGGLCEDQLQLPAAAPSAADNVFSRFLPDHHIRDDKPSPAHFPSAADMASHHQQEQMMFHSQSQSQHQQETGRSGGGLYRTVSSGMEAGGTGVGAASSLIRQSSSPAGFLDHFGMDNGYGAMLRASMGMGFQDGGASDSLAGGGGGSGRLGGQLSFSSRQGSLMSQISEMDSQEDVVGASSPDAGGGGDAAYMPGYPMSSGGWDDSSSALLPDSLPATNKRPRDSLEHGGGLAHQFSLPKTSSSEVAAIEKFLQFQDAVPCKVRAKRGCATHPRSIAERVRRTKISERIRKLQELVPDMDKQTNTSDMLDLAVDYIKDLQKQVKALNESRASCTCPASKHQQRFSG

SEQ ID NO: 14281 - protein, 388 aa, Scenedesmus obliquus
MVTSEQLLFLEAWRAVDRAYVDKSFNGQSWFKLRETYLKKEPMDRRAQTYDAIRKLLAVLDDPFTRFLEPSRLAALRRGTAGSVTGVGLEITYDGGSGKDVVVLTPAPGGPAEKAGARAGDVIVTVDGTAVKGLSLYDVSDLLQGEADSQVEVVLHAPGAPSNTRTLQLTRQKVTINPVTFTTCSNVAAAALPPGAAKQQLGYVRLATFNSNTTAAAQQAFTELSKQGVAGLVLDIRNNGGGLFPAGVNVARMLVDRGDLVLIADSQGIRDIYSADGNSIDSATPLVVLVNRGTASASEVLAGALKDSKRGLIAGERTFGKGLIQTVVDLSDGSGVAVTVARYQTPAGVDINKIGVSPDVQLDPEVLPTDLEGVCRVLGSDAAPRLFG

SEQ ID NO: 14282 - protein, 807 aa, Yarrowia lipolytica CLIB122
MRRNKAPSQIREHGLPAERPRDPMDVLHKPFKRPAPSSGSSYNSNWQPSRRARTAVNYTEGDPDAPVYRSDDPEKRGGGAVVRRDPLAVLNQNFRVPFKNRNDDFVESFPALGMRKPVDFVPRPLHDPAGEFAIVLYDPTVDGVKDAVTEEDIQTATEMTLSQSETDVETVEEMRTIPKKLTLAEILGISPRDKQKPKEYPEVPVVIDPKLAKILRPHQVEGVKFLYRATTGLINPKAHGCIMADEMGLGKTLQCIALLWTLLKQSPQGKGTISKAIVVCPSSLVRNWAAEFVKWLGEGVVVPYAVDGSQKPAELTAGLRQWAEAEGRKVTRPVLIISYDTLRRQVGAIADSEVGLLLADEGHKLKNGDSQTFTALNQLNVKRRVILSGTPIQNDLLEYFSLLNFSNPGLLGTKGEFRKNYEIPILKGRDADGTDKDVEKAEAKLLEMASIVSPLIIRRTNDILSKYLPVKYEHVVFCNLAPFQKSLYVQFRTSKEARSLLKGEKSSEGTTTLNAIGILKKLCNHPDLLKLPDEIEGCRKVFPDDYAPPDERGSRDRDIYPHFSAKFLILERMLRSINAETNDKIVIISNYTATLDLIEKMCRQRRYGCLRLDGTMNINKRAKLVTQFNDPEGQEFIFLLSSKAGGCGLNLIGANRLILMDPDWNPAADQQALARVWRDGQKKDCFVYRLIATGTIEEKIFQRQSMKQSLSTCVVDEVQDVERHYSMSNLRELFSYDDATPCNTHDMYECKRCRGGKQYQRAPAMLYGDATTWNHYYKGTMGKIEDLLLRQEEEFDEVSFVFQYISH

SEQ ID NO: 14283 - protein, 283 aa, Prochlorococcus marinus str. MIT 9215
MTNITTWIDEYHKGSRFGLNGKILIKKTSKYQEIILIENEYYGKALMLDGCWMTSLKDEKYYHECLVHPALSSIEEKSNILIIGGGDGGTVRECVKYSQISKIDLVEIDEEVIKISKKFLKEIGGEAWNDKRLEIHVDDGVKWVKKTRDNFYDVIFIDSSDPSEFSNLLFSDSFYKECKRILTPSGILATQSESPESFKNIHINILKTLKNIFKSSETMYSFVPIYPSGIWSWTFASSKNLNLSKQNYDEVKKIEKGCEIWNLNFQNAAFKMMPNKIVKELDS

SEQ ID NO: 14284 - protein, 159 aa, Listeria monocytogenes str. 1/2a F6854
MNVHDFSEKAMNGKEIALSDYKGKVLLIVNTASKCGLTPQLEGLEAMYKKLGGDNFEILGFPCNQFLRQDPGSDEEILEFCQMNYGVTFQMFSKIKVKGKDASPLYKYLTEQTGGKKVEWNFAKFLIDENGEVVERFPSKMKPEDFEDKVEALVAKVNN

SEQ ID NO: 14285 - protein, 563 aa, Salmonella enterica subsp. enterica serovar Typhi str. CT18
MMPFSIIKNIANRERMEIFFTILIMTLVVSLSGVFTRVLPFQLPLPLMQIAIGALLAWPTFGLHVEFDPELFLVLFIPPLLFADGWKTPTREFLEHGREIFGLALALVLVTVVGIGFLIYWLVPGIPLIPAFALAAVLSPTDAVALSGIVGEGRIPKKIMGILQGEALMNDASGLVSLKFAVAVAMGTMVFTVGGATLEFFKVAIGGILAGFVVSWLYGRSLRFLSRWGGDEPATQIVLLFLLPFASYLIAEHIGVSGILAAVAAGMTITRSGVMRRAPLAMRLRANSTWAMLEFVFNGMVFLLLGLQLPGILESSLAAAEADPNVETWMLFTDIVLIYAALMLVRFGWLWTMKKFSLRFLKKKPMEFASWTSREILIASFAGVRGAITLAGVLSIPLLLPDGSGFPARYELVFLAAGVILFSLFVGVIMLPLLLQHLEVADHAQQLKEERIARAATAEVAIVAIQKMEERLAADTEENIDNQLLTEVSSRVIGNLRRRADGRNDVESSIQEENLERRFRLAALRSERAELYHLRATREISNETLQKLLHDLDLMEALLIENQ

SEQ ID NO: 14286 - protein, 169 aa, Oryza sativa Japonica Group; identical to SEQ ID NO: 14114

SEQ ID NO: 14287 - protein, 163 aa, Azoarcus sp. BH72
MTTPLYDIPLQRLDGSAATLADYAGKVLLIVNTASQCGFTPQYAGLEMLYRNYKDRGLVVLGFPCNQFGAQEPGDASEIADFCERNYGVSFPMFAKLDVNGDNAHPLYVALKQQAPGVLGTEAIKWNFTKFLVDRHGEVIERYAPTTTPQDLAGDIEAQLARA

SEQ ID NO: 14288 - protein, 394 aa, Vitis vinifera
MSLMYSSNFKHSGEEETEKTRAVFMDSNTNYHHQQNQNQPPNSGLLRFRSAPSSLLANFTDSGDGVHKGANLCDDFESERFMPCGGFQDSAMSCQSQLPPQYPRQSSSTSSSAMDGSYGVVNSNNMEAKQGSSLVRQSSSPAGLFSHLSGQNGYAIMRGVGNFRPGNVGNGEISPSTSRLKPQVSFSSGLPSSLGLLPQISEIGSECIQASSPNDRKLANSNGDARFYSPGFPYGSWNDSAHFENFSGMKRDQDNDGKLYSGSNTSGIRNEEFGHRSQILSHHLSLPKTSAEMAAMEKFLQFQDSVPCKIRAKRGCATHPRSIAERVRRTRISERMRKLQELVPNMDKQTNTADMLDLAVEYIKDLQKQYNTLTDNRAHCKCLGKQKPVPNQTV

SEQ ID NO: 14289 - protein, 444 aa, Moorella thermoacetica ATCC 39073
MDDKEKRAAVLQQAEEWGVKFVRLQFTDIFGVLKNVAIPVDQLPKALNNELMFDGSSIEGFVRIEESDMYLRPDPDTFVVFPWRPHEGSVARLICDVYNPDGTPFAGCPRSTLKRVMAEAAEMGFTMNAGPEAEFFLFHTDADGRPTLETQDRAGYFDLTPVDLGEDARRDMVLTLEQMGFEIEASHHEVAPGQHEIDFKYAEALTTADRIATFKFVVRTIAQRHGLHATFMPKPIYGINGSGMHANLSLSKDGKNAFDDPSDELGLSQVAYHFIAGIMAHARALTAVTNPTVNSYKRLVPGYEAPVYIAWSPRNRSPLIRVPAKRGASTRIEVRHPDPSCNPYLALAVLLKAGLDGIKKGLTPPPPTDKNIFAMTPAELKAEGIGVLPGSLEEALAALEQDEVIREALGPHIYERLTLAQKMECEEYRTRVHQWEIDQYLTKF

SEQ ID NO: 14290 - protein, 510 aa, Idiomarina loihiensis L2TR
METGTLISLALYFIVMLGIGLYAYKKSTDSVSGYMLGGRGLGPAVTALSAGASDMSGWMLMGLPGAIYVSGVSQLWIAVGLVIGAFLNYVIVAPRLRTYTEVANDSITIPGYFSNRFNDKGRRLRIFSSVVIIIFFTLYTSASLVAGGKLFDSSFGMDYTTGLWVTAGVVCAYTLFGGFLAVSMTDFVQGCIMFVALVLVPIVAFVDLGGYSSVVGQVNDIDTNFLDFFYNVDKGEAIGFLGIVSLLAWGLGYFGQPHIIVRFMAIRSVSDVKAARRIGVSWMVVSIIGAMATGFVGIAYVATQPMGIADAETIFIEFSQVLFHPLIGGFLLAAILAAIMSTISSQLLVSSSSLTEDFYKAFLRKDASERELVMVGRLSVLVVTLVAIYLAYGETETVLALVSKAWAGFGAAFGPVVILSLFWKRMNRNGALAGMLTGAITVLLWIFSPILFGIDLSDEVVYEMVPGFILSTLAIIIFSKLTDEPAQELQDKFVEMESVIDGYYHGDKKG

SEQ ID NO: 14291 - protein, 549 aa, Escherichia coli O157:H7 EDL933
  misc_feature (12)..(12): Xaa can be any naturally occurring amino acid
MEIFFTILIMTXVVSLSGVVTRVMPFQIPLPLMQIAIGALLAWPTFGLHVEFDPELFLVLFIPPLLFADGWKTPTREFLEHGREIFGLALALVVVTVVGIGFLIYWVVPGIPLIPAFALAAVLSPTDAVALSGIVGEGRIPKKIMGILQGEALMNDASGLVSLKFAVAVAMGTMIFTVGGATVEFMKVAIGGILAGFVVSWLYGRSLRFLSRWGGDEPATQIVLLFLLPFASYLIAEHIGVSGILAAVAAGMTITRSGVMRRAPLAMRLRANSTWAMLEFVFNGMVFLLLGLQLPGILETSLMAAEIDPNVEIWMLFTDIILIYAALMLVRFGWLWTMKKFSNRFLKKKPMEFGSWTTREILIASFAGVRGAITLAGVLSIPLLLPDGNVFPARYELVFLAAGVILFSLFVGVVMLPILLQHIEVADHSQQLKEERIARAATAEVAIVAIQKMEERLAADTEENIDNQLLTEVSSRVIGNLRRRADGRNDVESSVQEENLERRFRLAALRSERAELYHLRATREISNETLQKLLHDLDLLEALLIEENQ

SEQ ID NO: 14292 - protein, 443 aa, Moorella thermoacetica ATCC 39073
MNEQLTKEDVLQMVEEMNVRFIRLQFTDIFGVLKNVAITPAELEKALDGELMFDGSSIHGFVRIEESDMYLRPDPTTFAIFPWRPMDGAVARLICDVYNPDGTPFAGCPRGVLKRVLAEAEAMGYTMYAGPEAEFFLFHTDGQKPTLVTHDQAGYFDLSPVDLGEDARRDMVLSLEAMGFEVEASHHEVAPGQHEIDFKYDNALATADKIATFKFVVRTIAQRHGLHATFMPKPVAGINGSGMHTHQSLFKEGQNAFYDPDDPLQLSKVAYYYIGGLMHHARALAAITNPTVNSYKRLVPGFEAPVYIAWSPRNRSPLIRVPAKRGASTRIELRNPDPSCNPYLALAVMLKAGLDGIKKQIQPPAPTERNIYEMTPAERRDLGIGSLPGDLKDALAELSRDEVIREALGDHIYQHFVEAKEKEWEQYRIQVHQWEIDHYLTLF

SEQ ID NO: 14293 - protein, 223 aa, Baccaurea javanica; identical to SEQ ID NO: 7445

SEQ ID NO: 14294 - protein, 385 aa, Haemophilus somnus 2336
MNALHFGAGNIGRGFIGKVLADSGVQVTFADVNEAVIDLLKRHQSYNVKIVGDSINAMESVRHVTGVDSKDTKALIELFKTVDLVTTAVGPTVLKIISGTIAKGIEARLAAGNFKPLNIIACENMVRGTTFLKEQVFTHLTEELQADAEKYVGFVDSAVDRIVPPVQEDISDPLLVTVEEFCEWIVDNTQFKGDIPNIQGMELTDNLMAFVERKLFTLNTGHAVTAYFGKRKGYQFVKESIEDPDIKEFVAAVMQESGAVLIQRYGFEPQAHAAYIEKILKRFANPYLVDNVERVGRQPLRKLSYNDRLIKPLRGTIEYNLANQHLIRAIAYALTFRCEDDPQAVELAQSLAEIGVTETLKKYTELQDVVIIEQIAQAYNEVNKS

SEQ ID NO: 14295 - protein, 223 aa, Baccaurea lanceolata; identical to SEQ ID NO: 7448
  misc_feature (47)..(47): Xaa can be any naturally occurring amino acid

SEQ ID NO: 14296 - protein, 676 aa, Bremia lactucae
MAQSVSGYSVGIDLGTTYSCVGVWQNDRVEIIANDQGNRTTPSYVAFTDTERLIGDAAKNQVAMNAHNTVFDAKPLIGRKFSDPIVQADIKHWPFKLTSGWRQAQIVVQFKGESKTFQPEEISSMVLIKMREVAEAFIGKEVKNAVITVPAYFNDSQRQATKDAGAIAGLNVLRIINEPTAAAIAYGLDKKGGERNVLIFDLGGGTFDVSLLSIEEGIFEVKSTARDTHLGGEDFDNRLVDHFTQEFKRKHRKDITENQRALRRLRTACERAKRTLSSSAQAYIEIDSLFDGIDFNSTITRARFEDMCGDYFRKTMEPVAPVLRDAKLSKSQVHEVVLVGGSTRIPKVQQLLSDFFNGKEPNKSINPDEPVAYGATVQAAILSGNDSSQKLQDLLLLDVTPLSLGLETAGGVMTTLIARNTTVPTKKSQTFSTYADNQPGVLIQLFEGERSMTRDNNLLGKFNLDGIPPMPRGVPQIDVTFDIDANGIFNVSAVEKSTGKENKITITNDRVVCRRHDIDRMVSEAEKYKSEDEANKIRIEAKNGLENYSYNLRNTLNDEKLKDQIPEDDKKAIEDKVTETINWLDANQSAEKEEYEGKQKELEGIANPILQKMYAAAGAAGGMPGGMPGMPGGMPGMPGGMPGMPGGMPGGMPGGMPGGWPPCWSSDQGPKIEEVD

SEQ ID NO: 14297 - protein, 483 aa, Legionella pneumophila str. Lens
MKLTQLLEPWIKRDIIDGTVSDIKNDSRLVKEGDLFAAYPGAASDGRLYIEKAVASGAAAVVYEPNNLPQGITLPTAIPCIAIPQLAEKLGEIAKRFFNNPSQFLGLTGVTGTNGKTTIAYQLAQAHDLLGQHSAYIGTIGQGKVDALKPLENTTPDALCLQRLMHQYKEEGIKQVCMEVSSHALSQHRVDSLEFSQAIFTNLTLDHLDYHQTMQAYGAAKSRLFERSELQWAIINQDDDCQDLMSNVLKTHVKKVTYGMHQNCDVKAIQWNMDITGTEIEVKSPWGHHLLKIKALGKFNIYNSLAVYSSLLASGYNPEKVVQIMAELKAAPGRMEIVAQSPYVLVDYAHTPDALENVLITLKQIKKGRLWVVFGCGGDRDKTKRPIMGKAASMYADNIVITSDNPRSEDPEIILNEIACGMPASAPVSKLVNREEAIAYALRKAEHNDIILIAGKGHESYQQIGNTKHVFSDQEVVRRLMNN

SEQ ID NO: 14298 - protein, 486 aa, Bacillus halodurans C-125
MVKLVSLLDSLYGYKMIHEGNPDIHSIHMDSREVVEGGLFFCIKGYTVDGHDYAQQAVSNGAVAVVSERPLELSVPVVVVRDSRRAMAQVATKFYGEPTNDLQLIGVTGTNGKTTITHLIEKIMQDQGKMTGLIGTMYTKIGHELKETKNTTPESLVLQRTFADMKKSGVTTAMMEVSSHALQSGRVRGCDFDVAVFSNLTPDHLDYHGTMERYKFAKGLLFAQLGNTYQGKVAVLNADDPASADFAEMTIAQVVTYGIENEADFQAENVRITSTGTTFELAAFEERMELSIHLIGKFSVYNVLAAAAAAYVSGVPLQEIKKSLEEVKGVAGRFETVKHDQPFTVIVDYAHTPDSLENVLKTVGELAKGDVRVVVGCGGDRDKTKRPVMAEIATTFANQAIFTSDNPRSEEPMDILRDMEQGAKGDSYLMIEDRKEAIFKAIELAKEDDIIVIAGKGHETYQQFRDRTIDFDDRIVAQQAIKERWT

SEQ ID NO: 14299 - protein, 468 aa, Alteromonadales bacterium TW-7
MSQSVLDFIKENDVKFIDLRFTDTKGKEQHVSIPHHQVDEDFFEDGKMFDGSSIAGWKGINESDMVLMPVAESVKLDPFTEETTLIVRCDVVEPSTLQGYERDPRSVAKRAEDYMRSTGIADTVLFGPEPEFFLFDDVKYKSDMSGSMYKVDAVEAAWNSDKDYEGGNTGHRPGVKGGYFPCSPVDSSQDWRSATCLVLEELGQVVEAHHHEVATAGQNEIATRFNSMVLKADEIQEMKYVIHNMAHLYGKTATFMPKPIVGDNGSGMHCHQSLAKDGVNLFAGDKYGGLSEEALYYIGGIIKHAKAINAFANASTNSYKRLVPGFEAPVMLAYSARNRSASIRIPVVPSAKGRRIEVRFPDPTANPYLAFSAMLMAGLDGIKNKIHPGDAMDKDLYDLPAEEAAEIPQVASSLGEALDALSADREFLTQGGVFTDDLIDAYIALKGQEVEKLNMTTHPVEFEMYYSC

SEQ ID NO: 14300 - protein, 299 aa, Bacillus sp. SG-1
CDFDIAVFTNITQDHLDYHRTMEEYRSAKSLLFSQLGNSYDEKKLKYAIINNDDPSAGFFIHSTAAHVVTYGVSQDADFYAEDIELRHNGSSFTMVTPSERIKMDIQLAGRFNIYNVLAAAASANISGVPLKNIKAALQSINGVSGRFEQVEAGQDFSVIVDYAHTPDSLENVLKTIETITDENVIVVVGCGGNRDRTKRPIMAEIACKYGDQVVFTSDNPRNEDPNAIIADMTTGLKHTNYIVIIDRQEAINHAVSLAGKGDVVLIAGKGHETYQIIGDAVTSFDDREAAKAAIKRLN

SEQ ID NO: 14301 - protein, 655 aa, Daucus carota
MASKGGKAIGIDLGTTYSCVGVWQNDRVEIIANDQGNRTTPSYFAFTDTSRLIGDAKNQVAMNPSNTVFDAKRLIGRRFNHPSVQSDMKLWPLQVIPGPGEKPMIVVNYKGESKQFAAEEISSMVLIKMLEIAEAFLGHSVNDAVVTVPAYFNDSQRQATKDTGVIAGLNVMRIINEPNCAQIAYGLDKKSSNPPEQNVLIFDLGGGTFDVSLLTIEEGIYEVKAPKSDTHLGGEDFDNRLVNRFVTEFLTNNKKDIRWECEALRRLRTACERAKRTLSSSTAQTTIEIDSLYEGVDFYTTITRARFEELNMDLFKKCMDPVEKCLRDSKIDKAQVHEVVLVGGSTRIPKVQQLLQDFFNGKELCKSINPDEAVAYGAAVQAAILSGEGNERSDLLLLDVTPLSLGLETAGGVMTVLIPRNTTIPTKKEQIFSTYSDNQPGVLIQVYEGERARTRDNKLLGKLLGKFELTGIPPAPRGVPQINVVFDIDANGILNVFAEDKTAGVKNKITITNDNGRLSKDEIEKLVKEAEKYKAEDEEVKKKVEAKNALENYAYNMRNTIKDDKIPGKLDAGDKEKIETAVNEAIEWLEKNQLAEVDELEDKLKELEGLCNPIIARLYQGRGDVPIGGPGDMPGGGYGGSRGSSGAGPKIEEVD

SEQ ID NO: 14302 - protein, 879 aa, Bordetella bronchiseptica RB50
MRNHSSITMKKKDIEFLDVVTLRGPNIWTYRPVLEAWVDIGELEDFPSNTIPGFYERLSGWLPTLIEHRCSPGVRGGFLQRLREGTWPGHILEHVTLELQNLAGLPGGFGKARETSRRGVYKVVVRAWHEQVTRAALQEGRDLVMAAIEDRPFDVPAAVARLRALVDSLCLGPSTACIVDAADDRDIPYIRLFEGNLVQFGYGSRQRRIWTAETDRTSAIAEGISRDKDLTKELLSTCGVPVPEGRLVQSAVDAWEAAQDIGLPVVVKPYDGNHGRGVFTNLLTRDEIESAYAVAVDEGSGVIVERFITGNEHRLLVVGDRMVAAAAGEPAWVTGDGVSTIEDLIGSQINTDPRRGRTENHPLNPVRLDSAARLEIARQGMTATSVPAAGRNVLIQRSGNVAFDVTDRVHPSVAATVALAARVVGLDVAGVDLVTDDISRPLDQTRGAIVEVNAGPGLLMHLKPADGPPRPVGRAIVDHLFPADDDGRIPIVGVTGTNGKTVVARLVARLLHLSGKQTGLACSEGLYLNKRLVQKGDCANWAAGRRVLMNRSVDAAVIENDSGVILGQGLAYDRCLVGVVTNIDDGDHLGDFDINETDRLVDVFRTQIDVVLPGGAAVLNARDPRVVRMAELCDGEVLYFGLDPALPTLAAHLADGRRAVYLRAGRIVLARGRDEEALADIAAVPLTHGGRVAFQIENVLAAVAAAWALDIPVELIRAGIETFDIDQADAPWQFTLFERNGACVVVDDVHNPSALRALLAAIEQFPARRRAAVYSAGADRNDDALVEQGRLLGTAFDQVVLYDDATVASKRPAGQARGLLRQGLRQSARATAIADEADHARAIARVLDDLREGDFALLQSDEAFSGPTIDLVRRWIEQG

SEQ ID NO: 14303 - protein, 443 aa, Carboxydothermus hydrogenoformans Z-2901
MSPTKEDILKIVEEKGIRFIRLQFTDIYGIPKNVAITAEQLEKALDGELMFDGSSIDGFVRIEESDMYLKPDPSTFMILPWADQRYAEARLICDIYTYDGKPFSGCPRGNLKRILQEAKQMGIDEMYVGPEAEFFLFQTKEDGTLTTVTHDEAGYFDLAPVDRGENARRDMVLALEQMGFEVEASHHEVAPGQHEIDFKYDSAVRTADKVITFKTVVRKIAKKHGLHATFMPKPVYGIAGSGMHLNISLAAKGQNIFYDPSTPHQLSDIALYFIGGLLKHARAISAITNPLVNSYKRLVSGFEAPVYIAWSFRNRSPLIRIPAKRGPSTRIELRSPDPSANPYLAFAVCLKAGLDGIKNKIMPPPPCDRNIYHMDEEERKAWGIGNLPASLGEALKELEQDEVIREALGEHIFERYMEGKRLEWDTYRMQVHEWELKEYLVKY

SEQ ID NO: 14304 - protein, 469 aa, Rickettsia conorii str. Malish 7
MTLCLKNTHIWSIMLLRLIITLFFIINSICAFAEGEKETENKISNQEAYKQFQDVFERIEKAYVQVPDRQKMIDEAINGMLNSLDPHSSYYTDEDLEDIVTFTKGEFGGIGVEIMYDSGAIKIISPIDDLPAFKAGLKGGDYIVGVNDELVSTLGPNKAIKEMRGTPGTKVKLLIIKEEEAKPQELELTREIVKIKPIKAHLEKNNIAYIRITTFNESTISELKAAVKKLKTESKDDLKGIILDLRNNAGGILDQAIAVSDYFIDSGVIVTTKGRTTSSNSEIKANEFSLKAPKVPMIVLINGNSASASEIVAGALQDHKRAIILGTKSFGKGSVQALTQINSRAAVKLTISKYYTPSGRSIQAEGIEPDILIEPAKVEYPEVKKIDKRFSESSLKNYLKNDNEKNKDNASKNKDSQKETKAKNNKQEENELSELYKKDYQFARAYDVITGLIINKKLETKERVKQEDK

SEQ ID NO: 14305 - protein, 124 aa, Glycine max
MCKGAEGEKQHGFCSSYLHKECATRSATCCELCGLQASLYCQADDAYLCRKCDKRVHEANFLALRHIRCFLCNTCQNLTRRYLIGASIEVVLPANINWTIGNLPSNRGIHRKCSRMHNNLSLLL

SEQ ID NO: 14306 - protein, 116 aa, Salmonella enterica
GMHCHMSLAKNGTNLFSGDKYAGLSEQALYYIGGVIKHAKAINALANPTTNSYKRLVPGYEAPVMLAYSARNRSASIRIPVVASPKARRIEVRFPDPAANPVSVLCRPADGRSGRD

SEQ ID NO: 14307 - protein, 325 aa, Agrobacterium tumefaciens
IAGWKAINESDMVLMPDPATAHIDPFFAQSTLVVLCDILDPVSGEAYNRDPRGTAKKAEAYLKASGIGDTVFVGPEPEFFVFDDVKYKADPYNTGFKLDSSELPSNDDTDYETGNLGHRPRVKGGYFPVPPIDSLQDMRSEMLTVLAEMGVVVEKHHHEVAAAQHELGVKFDTLVSSADKMQIYKYVVHQVANAYGKTATFMPKPIFGDNGSGMHVHQSIWKGGKPTFAGDEYAGLSENCLYYIGGIIKHAKAINAFTNPTTNSYKRLVPGYEAPVLLAYSARNRSASCRIPFGSNPKAKRVEVRFPDPTQNPYLGFAAMLMAGL

SEQ ID NO: 14308 - protein, 325 aa, Agrobacterium rubi
IAGWKAINESDMVLMPDTGTVHMDPFFAQSTMVIICDILDPISGESYNRDPRGTAKKAEAYLKASGIGDTVFVGPEPEFFVFDDVKYKADPYNTGFKLDSSELPSNDDTDYETGNLGHRPRVKGGYFPVPPVDSLQDMRSEMLTVLGEMGVVVEKHHHEVASAQHELGVKFDTMVSSADKMQIYKYVVHQVANAYGKTATFMPKPIFGDNGSGMHVHQSIWKGGKPTFAGDEYAGLSETCLYYIGGIIKHAKAINAFTNPTTNSYKRLVPGYEAPVLLAYSARNRSASCRIPFGSNPKAKRVEVRFPDPAQNPYLGFAAMLMAGL

SEQ ID NO: 14309 - protein, 136 aa, Salmonella enterica
MPKPMFGDTGSGMHCHMSLAKNGTNLFSGDKYAGLSEQALYYIGGVIKHAKAINALANPTTNSYKRLVPGYEAPVMLAYSARNRSASIRIPVVASPKARRIEVRFPDPAANPYLCFAALLMAGLVGINNKIHPGEA

SEQ ID NO: 14310 - protein, 325 aa, Rhizobium giardinii
IGGWKAINESDMVLMPDPATVHMDPFFAQSTMVIVCDILDPVSGEAYNRDPRGIAKKAEAYLKASGIGDTVFVGPEPEFFVFDDVKYKADPYNTGFKLDSSELPSNDDTDYETGNLGHRPRVKGGYFPVPPVDSCQDMRSEMLTVLTEMGVTVEKQHHEVAAAQHELGVKFDTLVRNADKIQIYKYVVHQVANAYGKTATFMPKPIFGDNGSGMHVHQSIWKDGKPTFAGDEYAGLSETCLFYIGGIIKHAKAINAFTNPTTNSYKRLVPGYEAPVLLAYSARNRSASCRIPFGTGPKSKRVEVRFPDPLANPYLGFAAMLMAGL

SEQ ID NO: 14311 - protein, 366 aa, Vitis vinifera
MASGGTEDSSSHTVMNMRQNSQAMAPESVVVVSQQNQFMASMKHGAEVLQQQQNGYASGSQMMYQTSSPMPHHNSAAPGTVENSYSAVSSMGMDQSQQIKIGGGNNSNLIRHSSSPAGLFSHLNVENGYAIMRGMGNFGSGSGTNGEPSFSSASRLKGQINFSSGPPSSSGLVTPISEMGNKSMGTGSPDNGSFGEGHSNSGGFITGFPIGSWDDSAIMSESFSSLKSVRDDEAKTFSGLNASEAQKGEPANRPPVLAHHLSLPTKTSADLTTIEKYLQFQDSVPCKIRAKRGCATHPRSIAERVRRTRISERMRKLQELVPNMDKQTNTSDMLDLAVDYIKDLQKQVKTLSDNRAKCTCSNKQKP

SEQ ID NO: 14312 - protein, 458 aa, Triticum sp.
MSGGGRPPAAQKILQSLRPPPVFSTPSRPPFASPDDYHRFHAPTTPSATGSGGIGSGGVGGDIDEGLVIRTQLKRKATREENNAAESSDCMIVTTGVTGNPLLTPVSGKAVKNSKSKTKNNKAGPQTPTPNVGSPLNPSTPAGTCRYDSSLGLLTKKFINLLKQAEDGILDLNNAAETLEVQKRRIYDITNVLEGIGLIEKTLKNRIRWKGLDDSGVELDNGLSGLQTEVENLNLQEQALDERISDMREKLRGLTEDENSQRWLYVTEDDIKGLPCFQNETLIAIKAPHGTTLEVPDPDEAGDYLQRRYRIVLRSTLGPIDVYLVSQFDDGFENLGGAATPPRHTNVPKPGPCEDLHATNATQSSKSINVEYNIQHRQNTPQDPSSSNDYGGMTRIIPSDVNTDADYWLLTEGDVSITDMWETAPEVQWDTAVFLPEDVSIPHAHHSPRMQVPSMDQP

SEQ ID NO: 14313 - protein, 636 aa, Neorickettsia sennetsu str. Miyayama
MAGEIAIGIDLGTTNSCVAIKDKVIENAEGARTTPSVVAFTSDGQTLVGAPAQRQAVTNAKNTIVASKRLIGRRFKDNVIKGIQRDYPYKIIEAKNGDAWIEAGGKSYSPSQIGANVLIKLKEAAETYTGKKVTKAVITVPAYFDDAQRQATKDAGRIAGLEVLRIINEPTAAALAYGLDKTATTKNIAVFDLGGGTFDVSILELGDGVFEVKATNGDTHLGGEDFDRMILNFLVEEFKKENGMDLKNDPLALQRLKEAAEKAKKELSSTQETDINLPYITADAAGPKHLNVKFTRAKLESLVSDLIDRTIEPCKKALKDSGLKREEINEVVLVGGMTRMPAVVKKVTEFFGKEPHKGVNPDEVVAIGAAIQANILAGGSDAQDIVLLDVTPLSLGIETLGGVFTKLIDRNTTIPTKRSQTFSTAEDNQSAVTIRVFQGERQMASDNKLLGQFSLEGIPPAPRGMPQIEVTFDIDANGIVHVSAKDKGTGKEQTVKIQASGGLTEEEIKKMVDEAASKADEDKKRRELVEAKNSAESLIHSTEKSLSEYGSKISSSDKQSIDDAISDLKSVLAKDDASLIKEKTDALSKVSMKLGEAMYKESQSASNDPSPKNDSTEEGERVVDPEYEEVKDEDSK

SEQ ID NO: 14314 - protein, 126 aa, Salmonella enterica
MPKPMFGDNGSGMHCHMSLAKNGTNLFSGDKYAGLSEQALYYIGGVIKHAKAINALANPTTNSYKRLVPGYEAPVMLAYSARNRSASIRIPVVASPKARRIEVRFPDPAANPYLCFAALLMAGLDG

SEQ ID NO: 14315 - protein, 325 aa, Rhizobium gallicum
IGGWKAINESDMVLMPDTETVHMDPFFAQSTMVIVCDILDPVSGEAYNRDPRGTAKKAEAYLKASGIGDTIFVGPEAEFFVFDDVKYKADPYNTGFKLDSSELPSNDDTDYETGNLGHRPRVKGGYFPVPPVDSAQDMRSEMLTVLAEMGVVVEKHHHEVAAAQHELGIKFDTLVRNADKMQIYKYVVHQVANAYGKTATFMPKPIFGDNGSGMHVHQSIWKGGKPTFAGDEYAGLSETCLYYIGGIIKHAKAINAFTNPSTNSYKRLVPGYEAPVLLAYSARNRSASCRIPFGSNPKAKRVEVRFPDPTANPYLAFAAMLMAGL

SEQ ID NO: 14316 - protein, 187 aa, Brassica napus
  misc_feature (149)..(149): Xaa can be any naturally occurring amino acid
KFLVFTQWTKILDIMDYYFSEKGFEVCRIDGNVKLDERRRHIDEFNDEKSSCRIFLLSTTAGGLGINLTAADTCILYDSDWNPQMDLQAMDRCHRIGHTKPVYVYRLATAHSLEGRVLKRAYSKLKLEHVVIGKGQFHQERAMSSIPLXEEDILALLKDDETAEDKLIQTDISEEDLDRMLDKSDLM

SEQ ID NO: 14317 - protein, 533 aa, Streptomyces avermitilis MA-4680
MDVLPLLLLVAGSAAVAGAARRTPVPAPLLLVAAGLIASYIPGVPEYTLDPEVVLPLVLPPLLYTAASDSSYLDLRAQLRPVALLSIGYVLFATLVVGWAAYLLVPGLPLPAALVLGAVVAPPDAVAATAVARRVGLPSRITTILQGESLVNDATAITAYKVALAAAVGEGATWAHGVGEFLLAAVGGVAVGLLLMVPLHWLRTHLKEALLQNTLSLLIPFVAYGLAEWAHASGVLAVVVVALYLGHRNYEVDFATRLQEEAVWKMVAFVLESAVFALIGLQLQVVLKGLGEYRGVDAAWYAVAVFLVVVLARFVWVYPATFLPRLLSARIREREENPTWKAPFIIGWAGMRGVVSLAIAFSIPLTVHGQGKGPFPGRNLILFLTFTTVIGTLVVQGLTLPPLIRLLRLPGRDAQAETLAEANAQAQASRVAELRLNDLLDDERNALPPPLADRLRDVLERRRNAVWERLGAVNPVTGESVDDTYRRLSREMIAAERSVFVRLRNGRYIDDEMLRTLLRRLDLEEAAAFREAT

SEQ ID NO: 14318 - protein, 325 aa, Rhizobium leguminosarum
IGGWKAINESDMVLMPDTETVHMDPFFAQSTMVIVCDILDPVSGEAYNRDPRGTAKKAEAYLKASGIGDTVFVGPEAEFFVFDDVKYKADPYNTGFKLDSTELPSNDDTDYETGNLGHRPRVKGGYFPVPPVDSAQDMRSEMLTVLSEMGVVVEKHHHEVAAAQHELGIKFDTLVRNADKMQIYKYVVHQVANAYGKTATFMPKPIFGDNGSGMHVHQSIWKGGKPTFAGDEYAGLSESCLFYIGGIIKHAKAINAFTNPSTNSYKRLVPGYEAPVLLAYSARNRSASCRIPFGSNPKAKRVEVRFPDPTANPYLAFAAMLMAGL

SEQ ID NO: 14319 - protein, 263 aa, Zea mays
MSSMESRPGRTNLVEPIGHGAALPSGGQAVQPWWTSSGAVLGAVSPAVVAVAPGSGTGISLSSSPAGGSGGGGAAKGAASDESSEDSRRSGEPKDGSAIQEKNHATSQIPALAPEYLAPYSQLELNQSIASAAYQYPDPYYAGMVAPYGSHAVAHFQLPGLTQSRMPLPLEVSEEPVYVNAKQYHGILRRRQSRAKAELEKKVVKARKPYLHESRHQHAMRRARGNGGRFLNTKKSDSGAPNGENAEHLHVPPDLLQLRQNEA

SEQ ID NO: 14320 - protein, 454 aa, Glycine max
  misc_feature (46)..(46): Xaa can be any naturally occurring amino acid
  misc_feature (176)..(176): Xaa can be any naturally occurring amino acid
  misc_feature (361)..(361): Xaa can be any naturally occurring amino acid
  misc_feature (382)..(382): Xaa can be any naturally occurring amino acid
FFPPPLKEEIFGPRPPPPKINNKRDPPILRMLMLRRTKETKDKRGXTFLPPPIDIQLIECEQSESERDFYEALFERSEVQFDQYVAQGKVLHHYANILDLLMQLRRCCNHPFLVMCGSDTQKRADLSRHARRFLQTNTECPEESNQNDPRQQAELNKLASRLLLKSASSSHSFNLXAYIAEVLEDIQKGDIVECSICMESPEDPVFTPCAHKFCRECLYSCWGTSAGGKCPICRQLLQKDDLITYSSESPFKLDVKNNVTESSKVSKLFEFLQRILNTSSEKSIVFSQWTSFFYLLENSLRRKGIGFLRYDGKLTQKQREKVLDEFNQTREKRVMLMSLKAGGMGLNLTAASNVFIMDPWXNPAVEEQAIMRIHRIGQNRRXVVVRRFIVKDTVEDRLQQVQARKQRLISGTLTDDEVRTARIQDLKMLFTREFIYLEGDLFVYFFRSRKANFV

SEQ ID NO: 14321 - protein, 185 aa, Oryza sativa; identical to SEQ ID NO: 11688

SEQ ID NO: 14322 - protein, 182 aa, Brassica napus
  misc_feature (126)..(126): Xaa can be any naturally occurring amino acid
MASSMLSSAAVVTSPAQATMVAPFTGLKSSSAFPVTRKANNDITSIVSNGGRVSCMKVWPPVGKKKFETLSYLPDLTEVELGKEVDYLLRNKWIPCVEFELEHGFVYREHGSTPGYYDGRYWTMWXKLPLFGCTDSAQVLKEVQECKTEYPNAFIRIIGFDNNRQVQCISFIAYKPPSFTGA

SEQ ID NO: 14323 - protein, 162 aa, Corynebacterium efficiens YS-314
MEAMTSIHDIPVTLTDGTETTMADWAGHLVMVVNVASRCGLTPQYEGLQRLFEDYQDRGFFVIGVPCNQFMGQEPGTDAEICTFAQEKYDVTFPLLAKTDVNGENEHPLYTELKRFGEGGDIEWNFEKFLINADGETIARFGPRMDPEDDEVTSVIEDNLPV

SEQ ID NO: 14324 - protein, 287 aa, Prochlorococcus marinus subsp. marinus str. CCMP1375
MFENENPNGSWLDEYQNDVRYGLKGKKIIEEISNFQKITIFESNRYGKALLLDNCWMTAEYQEKQYHECIVHPALCGSKEINKVLIIGGGDGGSARECLKYQELKNLDLIEIDKRVVELSQQYLSVIGGNCWKDQRLNLKLTNGINWVKDAKDNSYDVIIIDGSDPKGPAKGLFNKDFFKDCHRILKPDGVLGAQTESPESFEDIHINTVKMIKEVFKYADPLYGYVPIYPSGIWSWTFASIKKPRHLYPIISRANTISKTCQVWSPRWQRGGFDAIPANIERKLQQ

SEQ ID NO: 14325 - protein, 283 aa, Clostridium difficile 630
MELWYTEEWTENVRFSIKVNKHLFEGKSQFQRIDVFDSDEFGKFLTIDGLMMVTYKDEFIYHEMITHVPMATNLNIKKVLVIGGGDGGTVRELSRYPQIEKIDMVEIDKMVVDVSKEYMDICSCKLDDKRVSLYFEDGVNFVKCAHDKSYDLIIVDSTDPIGPGEGLFSTDFYKDCYRILTDDGILVNQSESPYFDFNAKEMKRANKKLKQIFPISEVYQAHIPTYPSGHWLFGFASKKLNPVKNQDRNGWEKLSLKTKYYNSDIHLGSFMLPQYVKEMLDEE

SEQ ID NO: 14326 - protein, 236 aa, Juglans nigra
QQVDGENPNLYFRSEDVILCVLPLFHIYSLNSVFLCGLRAGAAILLMQKFEIVSLLQLIQKYKVSIMPVVPPIVLAISKSPDLDKYDLSSIKMLKSGGAPLGKEIEETVKAKFPNAKFGQGYGMTEAGPVLSMCLAFAKEPFEVKSGACGTVVRNAEMKIIDPETGSSLPRNQPGEICIRGDQIMKGYINDPEATDRTIDREGWLHTGDVGFIDDDDELFIVDRLKELIKYKGFQV

SEQ ID NO: 14327 - protein, 857 aa, Bordetella bronchiseptica RB50
MEVSRIRALRGPNLWSRNTAIEAIAACSDAECAINGMPDFEARLRARFPQLGVLQPEGQRDAISMAHVLQATALGLQAHAGCPVTFGRTSPTIEPGVFQVVVEYSEEDVGRLAFELAEALIRSAQDDTPFDLPQALQRLRDLDEDTRLGPSTGSIVNAAVARSIPYHRLTQGSMVQFGWGSKQRRIQAAETDMTSAISESIAQDKDLTKMLLDAAGVPVPMGSSVDSAAAAWQAAQALGGPVVVKPRDGSQGRGVAVNIETRDRIESAFEAAAEISSEVIVERYIPGHDFRLLVVGNTLVAAARRDPPQVTGDGTHTIAELVAQVNADPLRGDGHATSLTKIRFDDIAIATLRKQGYEADSVAAAGALVVLRNNANLSTGGAATDVTDEVHPELAARAVTAARMIGLDICGVDVVAETVHLPLEDQHGGVVEVNAAPGLRMHLNPSFGKGRAVGEAIISHMFAERDDGRIPVVAVAGTNGKTTTVRLTAHILDCAGHRVGMTNSDGVYVGKQRIDTGDCSGPRSARRLLLHPDVDAAVLETARGGVLREGLAFDRCNVAIVTNIGMGDHLGLGYISTVEDLAVVKRVIVQYVQPDGMAVLNAADPMVAEMASACPGSITYFAEDRNHPVMATHRAQGHRVVYRDGDSLVAAQGGAEVAFALADIPLTRGGAIAFQVENTMAALAAAWALGIDWDTIRHALAIFVNDAQTAPGRFNVFDFRGATLIADYGHNPDAIQALVRAIDTMPARRRSVVISGAGDRRDEDLRQQTEILGGAFDDVILYQDQCQRGRADGEVVALLRQGLQQAPRTRHIDEIQGEFVAIDAALQRLAPGDLCLILVDQVEEALAHIASRVAGQP

SEQ ID NO: 14328 - protein, 224 aa, Cleistanthus perrieri; identical to SEQ ID NO: 7467

SEQ ID NO: 14329 - protein, 846 aa, Oryza sativa Japonica Group
MSEVRSVPGMKVEASPAAAAAATVDSPTSVLEDDEKISECKNGDVLDTTEAIKQEEDHLDVLIEEKVDGFVDASSSLNVEPAANNSDLSPLTVPVKEEGQLLEPVKEEKADDFVDAVPSLPIDLEAKNGDASLITDAMKEEEEKLHDARVKAEEEEVARKREEAARLAFDPNARFNKLDELLSQTQLYSEFLLEKMETIADVEGVQTHAEEEPVEEKKNGRGRKRKATSAPKYNDKKAKKAVAVMLTRSHEDCSPEDCTLTEEERWEKEQARLVPLMTGGKLKSYQIKGVKWLISLWQNGLNGILADQMGLGKTIQTIGFLAHLKGKGLDGPYLIIAPLSTLSNWVNEISRFVPSMTGLIYHGDKAARAEIRRKFMPKTTGPDFPLIVTSYEMAMSDAKHLAHYKWKYVIVDEGHRLKNSKCLLLRELKRLPMDNKLLLTGTPLQNNLAELWSLLNFILPDIFSSHQEFESWFDFSAKGGEEEQEDSEEKRKVDVVSKLHAILRPFLLRRMKEDVEHMLPRKKEIIIYANMTDHQKQIQNHLVEQTFDQYLHEKSEIVLRKPGIKAKLNNLLIQLRKNCNHPDLLESAYDSSGLYPPVEKLLEQCGKFQLLNRLLSLLLARKHKVLIFSQWTKVLDIIEYYLETKGLQVCRIDGSVKLEERRRQIAEFNDLNSSMNIFILSTRAGGLGINLTSADTCILYDSDWNPQMDLQAMDRCHRIGQTRPVHVYRLATSHSVEGRIIKKAFGKLRLEHVVIGKGQFEQDRAKPNALDEAELLALLRDEQGDEDRMIQTDISDEDLLKVMDRSDLTGPPANADAAPLVPLKGPGWEVVVPTKSGGGMLTSLTS

SEQ ID NO: 14330 - protein, 168 aa, Dimocarpus longan
MASQSKTGSVYDFTVKDARGNDVDLSSYKGKVLLIVNVASQCGLTNSNYTELNQLYEKYKSQGLEILAFPCNQFGGQEPGNNEQILETACTRFKAEFPIFDKVEVNGDNAAPLYKHLKSSKGGLFGESIKWNFSKFLVDKEGNIVDRYAPTTSPLSIEKDVKKLLGIA

SEQ ID NO: 14331 - protein, 224 aa, Cleistanthus oblongifolius; identical to SEQ ID NO: 7469

SEQ ID NO: 14332 - protein, 493 aa, Chromobacterium violaceum ATCC 12472
MKSRLTALPDWDPALLQQLGLPIKRVEADSRRVLPGDVFLACRGEYADGRDFIPAALEKGAAAVLWDEADGFAWKAEWQAPNLAVPNLRERAGIVAAHVLGLPSRDLTVVGITGTNGKTSISHWLAQAFSLLGQKAALIGTVGNGFYGHLTETTHTTPDPVTVQQKLAEYRRQGAHVVTMEVSSHGLDQFRVNGVEFATAVFTNLTRDHLDYHGSMEAYGESKKKLFFWEGLKHAVINADDAFGRQLAAGIDPKQTRVVTYGLEQGDVRPLALAATLEGLQLTVATPWGTVDVRTGLVGRFNAANLLACLATLCVNGVSLQDAAAVMARIQPARGRMQSVGGAHEPLVVIDYAHTPDALEKALATLSEIRPAGGRLFCVFGCGGDRDPGKRPMMGAIAEKHADVAVLTSDNPRSEDPQAIIRDVLAGMDAARAHVEADREAAIHWAVAQARVGDVVLVAGKGHEEYQDIAGVKRPFSDFRVAEEALTAWGKRP

SEQ ID NO: 14333 - protein, 204 aa, Drypetes madagascariensis; identical to SEQ ID NO: 7470

SEQ ID NO: 14334 - protein, 544 aa, Vitis vinifera
MEKSGYGRDGIYRSLSPPLVLPKDPNLSLVSFLFRKASSYPRRPALIEAHSGETVNFAQFKSMVIKVSHGLTRLGLKKNDVVLIFAPNSIQYPLCFFGVIAIGAIATTANPLYTVAEIQKQVKDSNAKLVITIPQLWEKVKALNLPAVILDSADTSKDTIQSPLKITYFSDLVKMAGEVSHFPKVSITQGDTAALLYSSGTTGASKGVILTHGNFVAAALMVTMDEELMGEMHNVFLCFLPMFHVFGLAVVMCAQLQMGYTIVSMPKFDLDVALKSIEKYRVTHMWLVPPVMLALVKQGKLDRYDISSLKHIGSGAAPLGKELMEECAKSLPHVAVGQGYGMTETCGIVSKEIPKIGIQHTGSTGPLVSGVEAQIISVDTLKPLPPNQLGEIWVRGPNMMKGYFNNPQATKLTIDKKGWVHTGDVGYFDEQGKLFVVDRIKELIKYKGFQVAPAELEALLVSHPEILDAVVIPFPDAEAGEVPIAYVVRSPNSSLTEEDVKTFIANQVAPFKKLRRVSFINTVPKSASGKILRRELIEKVRAKL

SEQ ID NO: 14335 - protein, 173 aa, Triticum aestivum
  misc_feature (84)..(84): Xaa can be any naturally occurring amino acid
  misc_feature (146)..(146): Xaa can be any naturally occurring amino acid
MPESDNDSGGPSNTGGEGELSSPREQDRFLPIANVSRIMKKALPANAKISKDAKETVQECVSEFISFITGEASDKCQREKRKTXINGDDLLWAMTTLGFEDYVDPLKHYLHKFREIEGERAAATSTSTTPHLPDNNATGYADYGGXMSPPPAPGGMKMMGHPIYRSTPPQHPP

SEQ ID NO: 14336 - protein, 371 aa, Berberidopsis corallina; identical to SEQ ID NO: 7472

SEQ ID NO: 14337 - protein, 391 aa, Carallia brachiata; identical to SEQ ID NO: 7473

SEQ ID NO: 14338 - protein, 472 aa, Clostridium difficile 630
MTELMIISGLVLLICITSSKVLYKFGVPILLIFILLGMLFGSDGMVGIYFDNYELTKQLCSIGLIFIMFFGGFGTNWNMAKPVAIPSILMSSLGVIITAGVTGMFCHMVIGTSLLEGLLIGAIAASTDAASVFAVLRSQKLNLKGSLASLLEVESGSNDPIAYMLTLILLTLMNNSGVELIAPMVIKQIAFGLAIGFILAKLSVYILRHSNFEIEGFYTIFITAIAILSYAFSEYLGGNGYLSVYISGIIIGNSRIPLKKSLVHFFDGISWIMQIMLFFMLGLLSFPSKLPNVFGIAMAISIFMIVIARPLATFIVLAKFKFSNKEKLFISWVGLRGAASVVFAIYAVTQGVAIENDIFHIIFFIALLSVGIQGSLIPTVARKLDLVDDNTPVLKTFNDYDGEISSKLIEVNVDEGNKWANKSIIDSNIPDDILIVMIKRKEQVLIPKGSTIIKTGDILVLSGDRIEELIQL

SEQ ID NO: 14339 - protein, 391 aa, Celastrus scandens; identical to SEQ ID NO: 7478
  misc_feature (303)..(303): Xaa can be any naturally occurring amino acid
  misc_feature (389)..(389): Xaa can be any naturally occurring amino acid

SEQ ID NO: 14340 - protein, 138 aa, Salmonella enterica
LGDNGSGMHCHMSLAKNGTNLFSGDKYAGLSEQALYYIGGVIKHAKAINALANPTTNSYKRLVPGYEAPVMLAYSARNRSASIRIPVVASPKARRIEVRFPDPAANPYLCFAALLMAGLDGIKNKIHPGEAMDKNLYD

SEQ ID NO: 14341 - protein, 394 aa, Glycine max
MTPSCEGSFNAKSARLSSLYSLMDFPVQRDSALDNSQPNSHQSNDQNSGKFAKAANSSSKGLDRSLVINSPKGSPGRQKNPLNSDTSNMVPRSEETTPPDEQSEAVGHDSIHGSRGQYFNQTSSSARHRAKGKAHDTKQKYCDEGLLESSSLCSIGASNNRNVCSRTHDDIDDSTYLSNNDEEPEDVVKEKPAWEGTGVKRSRNAEVHNLCERKRRDKINKRMRILKELIPNCNKTDKASMLDDAIEYLKTLKLQLQMMSMGAGFCMPFMMLPNAAHHMMNTPHLHQLMGLGMGFRPGTAMPCSLPQFPITPLHGITDNRVHMFGFPNQVPPMPISHAPFIPMLGNPFTQPTPLATSTNINLAENPASSQLTTLMASSPKNLFISGQAEYATKQ

SEQ ID NO: 14342 - protein, 392 aa, Cissus sicyoides; identical to SEQ ID NO: 7479

SEQ ID NO: 14343 - protein, 1090 aa, Arabidopsis thaliana; identical to SEQ ID NO: 12790

SEQ ID NO: 14344 - protein, 294 aa, Cyanothece sp. PCC 7424
MLVSAIMLQLEKQLQETKMPPSTTSAILVIGGAEDKVHGREILHTFWNRAGSSEAIIGIIPSASREPVLIGERYQRIYEEMGAKLVKVLDIRDRAQGEDPTFQEYVEECTGIFLTGGDQLRLCGLLADTPLMERIRQRVQLGEMTIAGTSAGAAVMGHHMIAGGSSGECPNRALVDMAMGLGIIPEVIVDQHFHNRNRMSRLLSAISGYPERLGIGIDEDTCALFEKDGRIQVIGRGTVTIVDAREMSYTNQSEVGACDPLSLHNLRIHILSYGDCYYLHQHQAIAKHEQNLNL

SEQ ID NO: 14345 - protein, 122 aa, Salmonella enterica
GMHCHMSLAKNGTNLFSGDKYAGLSEQALYYIGGVIKHAKAINALANPTTNSYKRLVPGYEAPVMLAYSARNRSASIRIPVVASPKARRIEVRFPDPAANPYLCFAALLMAGLDGIKNKIHP

SEQ ID NO: 14346 - protein, 325 aa, Agrobacterium rhizogenes
IAGWKAINESDMVLMPDTETVHMDPFFAQSTMVILCDILDPVSGEAYNRDPRGTAKKAEAYLKASGIGDTAFFGPEAEFFVFDDVKYKADPYNTGFKLDSSELPSNDDTDYETGNLGHRPRVKGGYFPVPPVDSAQDMRSEMLTVLGEMGVTVEKHHHEVAAAQHELGIKFDTLVRNADKMQIYKYVVHQVANAYGKTATFMPKPIFGDNGSGMHVHQSIWKAGKPTFAGDEYAGLSESCLYYIGGIIKHAKALNAFTNPSTNSYKRLVPGYEAPVLLAYSARNRSASCRIPFGTNPKAKRVEVRFPDPTANPYLGFAAMLMAGL

SEQ ID NO: 14347 - protein, 803 aa, Cyanothece sp. PCC 7424
MGHIVEHVALELQELAKMPVGFGRTRETSTPGVYNVVYEYVEEQAGRYAGRAAVRLCRSIVDTGTYPSEELAQDLADLKDLHTNAALGPSTETIITEAEARKIPWILLSARAMVQLGYGVYQKRIQATLTEHSGILAVELACDKEGTKTILQDAGIPVPKGTVIQYVDELAEAIEDVGGFPIVVKPLDGNHGRGITIDVNSWEEAEEAYDLASTASKTRSVIIERYYRGSDHRVLVINGKLVAVAERIPARVIGDGRSTIQELIEITNQDPNRGEGHDNVLTKITVDKTSLSVLSRQGYTLESVLKEGEIAYLRATANLSTGGIAIDRTDDIHPENIWIAERVAKTIGLDIAGIDVVTPDITKPLREVDGVIVEVNAAPGFRMHVAPSQGLPRNVAAPVLDMLFPPGTPCRVPIISITGTNGKTTTTRLTAHIYRQTGKVVGYTTTDGIYVGEFLVEKGDNTGPYSASVILKDPTVEIAVLESARGGILRSGLAFDTCDVGVVLNVAADHLGIGDIETVEQMAKVKSVVAEIVHPDGYAILNADDPLVVQMAERVKGKVAYFSMNPDNPIIHDHLRRNGLAAVYENGYLSIMEGKWTLRIEEAVNVPVTMGGMAPFMIANALAACLAAFAHGVDIEIIRQGVRTFKPSENQTPGRMNLFNLGSYHALVDYAHNPAGYEAVGGFVRNWRGERLGVVGGPGDRRDEDLILLGQLSAQIFDRIIVKEDDDTRGRERGEVADLIVKGITQENPHVKYEIILNEVTAIEEGLAQVAQNGLVVIFPESVSRSISLIKKHNPISDNGLGG

SEQ ID NO: 14348 - protein, 90 aa, Salmonella enterica
SLAKNGTNLFSGDKYAGLSEQALYYIGGVIKHAKAINALANPTTNSYKRLVPGYEAPVMLAYSARNRSASIRIPVVASPKARRIEVRFPD

SEQ ID NO: 14349 - protein, 325 aa, Rhizobium galegae
IGGWKAINESDMVLMPDPATVHMDPFFAQSTMVIFCDILDPISGEAYNRDPRGTAKKAEAYLKASGIGDTVFVGPEPEFFVFDDVKYKADPYNTGFKLDSSELPSNDDTDYETGNLGHRPRVKGGYFPVPPVDSLQDMRSEMLTVLAEMGVVVEKHHHEVASAQHELGVKFDTLVRNADKIQIYKYVVHQVANAYGKTATFMPKPIFGDNGSGMHVHQSIWKDGKPTFAGDEYAGLSESCLFYIGGIIKHAKAINAFTNPTTNSYKRLVPGYEAPVLLAYSARNRSASCRIPFGTGPKSKRVEVRFPDPLANPYLAFAAMLMAGL

SEQ ID NO: 14350 - protein, 479 aa, Polaromonas sp. JS666
MGQKLKIAGWISIGAVAGALTTVQLQAVARGGLTPLPLEELQQLAAVFGMVKTDYVEPVDEKKLITDAISGMVASLDPHSVYFDKKSYKEFREGTSGRFVGVGIEISQEDGLVKVVSPIEGSPADRAGLKPNDLITRIDDTAVKGLSLNDAVKKMRGEPKTKVLLTIFRKDENRTFPVTITREEIRTQSVRSKVVEPGYAWIRLSQFQERTVEDFVTKLEQIYKQEPNLKGLVLDLRNDPGGLLDAAVAVSAAFLPENVTVVSTNGQLAESKFTYKASPEFYQRRNGADPLKRLPAAIKKVPLVVLVNEGSASASEIVAGALQDYKRATIMGNQTFGKGSVQTVRPLGPDTGIKLTTARYYTPSGKSIQARGIVPDVMVDDTAEGSPFAALRTREADLEKHLNSGQGSEVKDASREKAREEALKRLEEEAKKTPEQRRPPELGSDKDFQLAQAINQLKGRPVLVSKTAVVEPKNEKKEN

SEQ ID NO: 14351 - protein, 333 aa, Anabaena variabilis ATCC 29413
MPLVTSIIQKIAPQIGAVVVVDPEYELVGHITFKNGKKSFFSTTKLNINGFGSAEIAKDKGYSKFFLKHFGYHVTEGQTFFNQKLCKKIGNERDIDAGFEYAKLIGFPVIIKPINLSQGKLVTKIHNKTEYYQVAKKILRANAGLIIERFYLGKDYRIVVIDDEIIAAYQRLPLSVIGDGKSNVTELIQRKQDGFIQNLGKKIIDVDDFRIKRKLQKQSLNLNSVIPNGKVVYLLDNANLSSGGEAVDVTENIHPDFQKLALNVTKDMGLRLMGLDIITQDITRPMVDYVIIEVNGSPGLTHYASIGDIQTKRVEDLYLKVLKALETEYNSEN

SEQ ID NO: 14352 - protein, 469 aa, Bradyrhizobium sp. ORS278
MKTAKDVLKAIKDNDVKYVDLRFTDPRGKWQHVTFDVSMIDEDIFAEGTMFDGSSIAGWKAINESDMCLMPDPVTATIDPFFAETTMIITCDVLEPTTGEPYNRDPRGIAKKAEAMVKSMGVGDSVFVGPEAEFFVFDDVRYSSSPYNTGFRLDSSELPTNSDTEYEGGNLGHRIRTKAGYFPVPPQDSVQDMRSEMLGAMARMGVKVEKHHHEVASAQHELGMKFDTLTLMADQMQIYKYCIQQVAHIYGKTATFMPKPVYGDNGSGMHVHQSIWKDGKPVFAGNKYSDLSETCLSYIAGIIKHAKAINAFTNPSTNSYKRLVPGYEAPVLLAYSARNRSASCRIPYTSSPKAKRVEVRFPDPLANPYLGFAAMLMAGLDGIKNKMDPGPAMDKDLYDLPKEELKQIPTVCGSLREALENLDKDRAFLKAGGVFDDDFIDSYIELKMTEVARFEMTPHPVEFDMYYSG

SEQ ID NO: 14353 - protein, 125 aa, Salmonella enterica
MSLAKNGTNLFSGDKYAGLSEQALYYIGGVIKHAKAINALANPTTNSYKRLVPGYEAPVMLAYSARNRSASIRIPVVASPKARRIEVRFPDPAANPYLCFAALLMAGLDGIKNKIHPGEAMDKNL

SEQ ID NO: 14354 - protein, 325 aa, Rhizobium huautlense
IGGWKAINESDMVLMPDPATVHMDPFFAQSTMVIFCDILDPISGEAYNRDPRGTAKKAEAYLKASGIGDTIFVGPEPEFFVFDDVKYKADPYNTGFKLDSSELPSNDDTDYETGNLGHRPRVKGGYFPVPPVDSLQDMRSEMLTVLAEMGVVVEKHHHEVASAQHELGVKFDTLVRNADKIQIYKYVVHQVANAYGKTATFMPKPVFGDNGSGMHVHQSIWKDGKPTFAGDEYAGLSESCLYYIGGIIKHAKAINAFTNPTTNSYKRLVPGYEAPVLLAYSARNRSASCRIPFGTGPKSKRVEVRFPDPLANPYLGFAAMLMAGL

SEQ ID NO: 14355 - protein, 118 aa, Salmonella enterica
GSGMHCHMSLAKNGTNLFSGDKYAGLSEQALYYIGGVIKHAKAINALANPTTNSYKRLVPGYEAPVMLAYSARNRSASIRIPVVASPKARRIEVRFPDPAANPYLCFAALLMAGLDGI

SEQ ID NO: 14356 - protein, 325 aa, Sinorhizobium arboris
IAGWKAINESDMVLMPDPETAHMDPFFAQSTMVIFCDILDPVSGEAYNRDPRGTAKKAEAYLKASGIGDTVFVGPEAEFFVFDDVKYKADPYNTGFKLDCSELPSNDDTDYETGNLGHRPRVKGGYFPVPPVDSSQDMRSEMLTVLSEMGVTVEKHHHEVAAAQHELGVKFDALVRNADKMQIYKYVVHQVANAYGKTATFMPKPVFGDNGSGMHVHLSIWKDGKPTFAGDEYAGLSETCLYFIGGIIKHAKALNAFTNPSTNSYKRLVPGYEAPVLLAYSARNRSASCRIPFGTNPKAKRVEVRFPDPTANPYLAFAAMLMAGL

SEQ ID NO: 14357 - protein, 1457 aa, Arabidopsis thaliana
MEANEESLKGKIEKLEGKEVIVESKEDEMDIIIEENREAEQEVMEVKARDGRGEQNDVLMEENNNQGEQKDEEMQDASSRSESSDFNSDEDEQILSRRDDELDLEKPLSEEEIDELISDLLAVESKLDEAVAAEMMTFKDEWEATLDELETESATLLEQLDGAGIELPKLYEMIESQAPNGCYTEAWKQRAHWVGTQVTKETVESLANAERFLHTHRPVRKRHGKLLEEGASGFLEKKLADGAVKESLAGTSELDWSSLNKVFSEKRDESVSFGSKQWASVYLASTPHQAAAMGLEFPGVNEVEEIEEIDASLADPFLADAIDNERELALTEEQKTNYIRVKEEDDITCDRVLQLRLKRKRRKKRSKQVIRCAAENMDDDSVYLDGNNTTPNFAKDQVKSPETSTQVHNSEVNIEENGNFSNSDVDKMTPSTHINVDAKRDDSQNPANNFRCTACNKVAVEVHSHPLLEVIVCMDCKRSIEDRVSKVDDSLERHCEWCGHIADLIDCRTCEKLFCASCIKRNIGEEYMSEAQSSGWDCCCCSPIPLQRLTLELEKAMRDKKSIELSSDSSSDSSSDNNSVDTDADVNVTISSKKKSKKKIRRIIDDAELGKDTRTKIAIEKARQERLRSLQFSARYKTISSMGDVKSIPEGAEVEVLGDAHSGYIVNVVREIGEEAVRVPRSISAKLKVHQVTGIRFMWENIIQSISRVKSGDKGLGCILAHTMGLGKTFQVIAFLYTAMRCVDLGLKTALIVTPVNVLHNWRSEFEKWMPSEVKPLRIFMLGDVSRERRFDLLTKWRKKGGVFLMGYTNFRNLSLGRGVKDLNAARGICNALRDGPDILVCDEAHIIKNTKADTTQALKQVKCQRRIALTGSPLQNNLMEYYCMVDFVREGFLGSSPEFRNRFQNPIENGQHMNSTAEDVKIMNQRSHILYEQLKGFVQRMDMNVVKKDLPPKTVFVISVKLSPLQRILYQRFLELYGFSDGRTDERMRKNFFAAYQVLAQILNHPGIPQLRSEDSKNGRRGSIVDIPDDCSSDENIDYNMVTGEKQRTMNDLQDKVDGYLQKDWWVDLLQKNNYKVSDFSGKMILLLDILSMSADVGDKALVFSQSIPTLDLIELYLSRVPRHGKQGKFWKKGKDWYRLTLTSLDGCRIDGKTESSERQKLVDRFNEPDNKRVKCTLISTRAGSLGINLYAANRVIIVDGSWNPTYDLQAIFRAWRYGQKKPVFAYRLMARGTIEEKIYKRQVTKEGLAARVVDRQQVHRTISKEEMLHLFEFDDDDEKSEAVTEISKQNEAGHSNLVEQAILWTKKATLSRVGGDKLMENLLQRHGPNWISSFHEHETLLQENEEERLTKEEKDMAWEVYRRALEWEEVQRVPFSESPVVPKPSPSTQTEPLPQPKGFNRSRFVNRNCTRIAHQLTLISQGLKVGSSTVCGECGRVIRWEDVIPASKLSAVIVN

SEQ ID NO: 14358 - protein, 417 aa, Arabidopsis thaliana; identical to SEQ ID NO: 12565

SEQ ID NO: 14359 - protein, 252 aa, Ashbya gossypii ATCC 10895
MVVHHYHCLSSCSSSPEKISRNAQTNFTTEQPIDLQSDMSLGILSHVDGSSKFSTAAASAICGVSGPIEPKARQEIPQHLALDVIVRPAAGPPTTREKLLEDKVRATITPVVETFLHPRQLCQITLQVLKSVGQHEHMELAVALNAAYLALLDAGVPLRAVLSAVSIAVSTEGELTQNPSPAELQDARSVFTAAFSVADGVNTLLLLDGNGTFEESTVSKVLELAEKECVRLAGELRHAVKEKLEKDFIWKK

SEQ ID NO: 14360 - protein, 478 aa, Acidovorax sp. JS42
MGHKLKIAGWISVGVVAGALTTVSLQTVARGAMTPLPLEEIQQLSAVFGLIKTDYVEPVDDRKLITDAIGGMVASLDPHSQYFDKKSFKEFREGTTGRFVGVGIEITQEDGLIKIVSPIEGSPADRAGLKTNDLITKIDDTAVKGLSLNDAVKRMRGEPNTQVTLTILRRDESRSFPVTITREEIKTQSVKGKIVEPGYAWIRLSQFQERTVDDFVRKVEEVYKQDPRLKGLVLDLRNDPGGLLDAAVAVSAAFLPENVTVVSTNGQLAESKATFKASPEFYLRRGSGDPLKRLPAAIKTVPLVVLVNEGSASASEIVAGALQDHKRATIMGSQTFGKGSVQTVRPLGPDTGIKLTTARYYTPSGKSIQAKGIVPDVMLDETAEGDIYASLRMREADLEKHLTSGQGEEAKDAGREKAREEARKRLEEEAKKPVSERKLPEYGSDKDFQLSQALNQLKGRTVLASKTLTERKEEKKDN

SEQ ID NO: 14361 - protein, 1476 aa, Candida glabrata CBS 138
MKEIDEEVLQNPELYGLRRSHRAVAHRPYVDDEEDEDDVPVKTRKRRSALVDDEDDDDENANDDISDDYDDYDNDSAADDDDDEDGDDDDMDEDDDDDYRGSPQKKRSSRGSGRGNSYKKKTAATRNVKREKQVAIPTRFSSRANKQVNYNIDYSDDDLLESEEEFDSDEDELLDEDQESRARSNTPPQEDVHGIDMVITHRIKEGSDKEHLAKIVPELNVCKENYEFQIKWTDQSHLHNTWETYESLAGVKGIKRLDNYCKQYIIQEQQVRLDPYITPEDIEIMDMEHERRLDELQEFTNPERIIDSQRVELEDGTSQLQYLVKWRHLNYDEATWEDAAEIVKIAPEPVKHFQSRQNSKILPQYSSNYTSERPRFEKLSVQPPFIKGGELRDFQLTGINWMAFLWSKNDNGILADEMGLGKTVQTVAFISWLIFARRQNGPHLVVVPLSTMPAWIETFEKWAPDIDVICYMGNQKSRDIEREYEFYSNPKGKGKKQIKFNVLMTTYEYILKDRAELGSIKWQFLAVDEAHRLKNAESSLYESLNSFKVANRLLITGTPLQNNIKELAALVNFLMPGRFTIDQEIDFENQDEEQEQYIRDLHKRLQPFILRRLKKDVEKSLPSKTERILRVELSDVQTEYYKNILTKNYSALTAGAKGGRFSMLNIMNTLMKASNHPYLFDSAEEKVLEKFGAGNMSRENILRGLIMSSGKMVLLDKLLTRLKKDGHRVLIFSQMVRILDILGDYLSIKGINFQRLDGTVPSNQRRIAIDHFNAPGSDDFVFLLSTRAGGLGINLMTADTVIIFDSDWNPQADLQAMARAHRIGQKNHVMVYRLVSKDTVEEEVLERARKKMILEYAIISLGVTDGNKYTKKTEPSAGELSEILKFGAGNMFAAKDNQKKLEDLNLDDVLSHAEDHVTTPDLGESHLGGEEFLKQFEVTDYKADVDWDDIIPEEELKKLQDEEQRHKDEEYVKEQLEMMNRRNNALKKIKDSVNGEGSTVTSDDEDGRSSRRRAKTNDLNSIGDSEVRALYRAVLRFGDVTDKLDELIADGTLPVKSIEKYKEILEELLDEAKSIYEEEDTKRTQTLREFEAAAHEYKMKLKTGEIKAEEQEKDNPITRLTMKRREKKAILFTFHKVKSLNAESIVNRCRDLEFVNNYFKTHFKNDPLEFKFDKAHPKPVTNWNCDWNQMDDEKLMVGIHKYGYGAWAQIRDDPFLGLTNKIFLSDVSSAATDKVKEEVKQETPDATGGKRSKGRESKKVPGALHLGRRVDYLIDFLQNDGKPTTGASGSSSISESSRKTAANPRKRNRKPNNTSSFSETSASGTPELGKLDSPGQPTKRIKALPKGPASLVSRNKKTNSPQRDGNKENENGTSGAHAKEYDSMDEEECRHTMTSMRSSLKRLRRGGKGLDRREWAKILKSELTAIGDYIEAQAKKNKNPDRHRKHLWSYSSNFWPAAVKSAKLMEMYKKITSAEK

SEQ ID NO: 14362 - protein, 483 aa, Chlamydophila abortus S26/3
MNLKELLHNTKAKIYGKISSVEVRNLTRDSRNVGVGDIFIAKQGKHCDGNDFSHLAVENGAIAVASSIYNPFLPVVQIISSDLPRLEADLAAKYYGHPSQKLCVVGITGTNGKTTVSHLIKLLFDACDKPAGLIGTIEHILGNSRIQDGYTTPESCLLQKYLAKMVKSHLSAAVMEVSSIGLAVNRLANVDFDVGVLTNLTLDHLDFHSSFEEYKQAKLKLFSMLPSSGLAVVNNDLCDAAQFIEATQAQPITYGIEQHADYQASHVRFSPFGTDFDLLYKGETFACYSPLIGQHNIYNVLAAIAVTHQRLRCDLPHLISVIANVGAPRGRLEPIFSGPCPIYIDYAHTPDALDNVCQTLQALLPQDGRLIVVFGCGGDRDQSKRKIMAQVVEKYGFAVVTTDNPRGEDPEKIINEICSGFLKRNFSIEIDRKQAITYALSIASDRDIVLVAGKGHETYQIFKHQTIAFDDKEIVLGVLSSYV

SEQ ID NO: 14363 - protein, 718 aa, Coccidioides immitis RS
MWYPTLRMPHLNFIRIHYVYILALSIVGTIILYPIKNMRGIDAFFQAVSGSTVTGLNTVDLKEMRLYQQITVWFLPMLGNMCFVNVVVVYVRLHWFEKKFKDIVQLSRLPSSERSRAQLLSVSPKAQSSDDTAYPHNIRVLRPDPAHEEADMVNLRQRPAAKRDESSDSPTAEDQSPSSENNNAERPPVQPGHITFSSDTFDKPNRGKALRIPGPREFEKGYKVQEVDDEDDADMTKSIDDPFGAGPSDAYRKLPAMERLLSHAASFEHAASSAFIIGGSSRSRSRSRSRGPMNRVSSRGAATQALPYLSYNPTVGRNSKFLGLTEDQKEELGGIEYRSLRLLLKIAGGYYVIGHIIGAIGLIAWIWNSNPKYRDYVRGECAVNPTWWAFYSSMTTFNNLGFTLTPDSMISFRDSTFPMLWMTFLIYVGNTAYPCMLRLIIWIAFKLTPEGSSIKEPLNFLLDHPRRCYTVLFPSKVTWLLFGSLVLINGFDVILFLILDLHYPEVTAIQSGWHRFCAALFQTASARTTGTSSFAVANVHPAAQFSLMVMMYISVFPIALSVRGTNTYEESSLGIFDSTEELVEMKRTSYLGVHIKMQLAFDLWYVFLGVFVLAIAEGSKIADPNNPGFNMFSIFFEVISAYGNVGLSLGHPDVNTGLTGKFGIVGKLVICAMMIRGKHRGLPYEVDRAIILPGEKRIVEEDARIEAMSHNLSRRHTN

SEQ ID NO: 14364 - protein, 705 aa, Arabidopsis thaliana
MVSDGKTEKDASGDSPTSVLNEEENCEEKSVTVVEEEILLAKNGDSSLISEAMAQEEEQLLKLREDEEKANNAGSAVAPNLNETQFTKLDELLTQTQLYSEFLLEKMEDITITKAKRAVAAMISRSKEDGETTNSDLTEEETVMKLQNELCPLLTGGQLKSYQLKGVKWLISLWQNGLNGILADQMGLGKTIQTIGFLSHLKGNGLDGPYLVIAPLSTLSNWFNEIARFTPSINAIIYHGDKNQRDELRRKHMPKTVGPKFPIVITSYEVAMNDAKRILRHYPWKYVVIDEGHRLKNHKCKLLRELKHLKMDNKLLLTGTPLQNNLSELWSLLNFILPDIFTSHDEFESWFDFSEKNKNEATKEEEEKRRAQVVSKLHGILRPFILRRMKFDVELSLPRKKEIIMYATMTDHQKKFQEHLVNNTLEAHLGENAIRGQGWKGKLNNLVIQLRKNCNHPDLLQGQIDGSCMSVSFKKHLYPPVEEIVGQCGKFRLLERLLVRLFANNHKNFSDPFADDQVLIFSQWTKLLDIMDYYFSEKGFEVCRIDGSVKLDERRRQIKDFSDEKSSCSIFLLSTRAGGLGINLTAADTCILYDSDWNPQMDLQAMDRCHRIGQTKPVHVYRLSTAQSIEIHLLSTKSPIDSLNQINTQEEDILALLKEDETAEDKLIQTDISDADLDRLLDRSDLTITAPGETQAAEAFPVKGP

SEQ ID NO: 14365 - protein, 203 aa, Drypetes madagascariensis; identical to SEQ ID NO: 7490

SEQ ID NO: 14366 - protein, 553 aa, Clostridium perfringens str. 13
MKLKDLRVLEGRNIKGEENLIFIDIEESERKRLYWLISDYEFICRKMNMEGTLKEAIYNEFGGCAWLTYSNKELALFIIESLIEGVSADKLLNEAVAKKQRIWEYNLLEECSKKKIDFFKEDDEIIVGYGVNSKRISKEDYENKNYNLDLINNGVIPIVSITGTNGKTSTSRLIYKGFENLGYFSGLAMTGGIIINNEFVKKGDTTGFYSAKKVLTNPQVEVEVLETARGGILRKGLGFKNSKVAIITSLAEDHIGVDGIKDINDLLDIKLITTREVLPEGKVIIKAEPKLYEVLQTKENLVLFNSKKNEYIEKHMKNGKEAWFVEDENVIFFDGKDKNIISNIKDFKFTHNGNSKTNINNILVSIAAIYEVHKNLKEVVDSLKNIECDVYNNIGRQNIIELENFKIILDYGHNPEAFEELFYLANNIKRNKIISIVSSPGDRLDEYIKELGRIAGKNSDTIIIKETFDRRGREELEITNLIKSGINEIKNKSVEVLSIIDEEEAIKKAISMAKEGDIIVDFTQHLDVVIPVINKYLSHHGKEIIEVDLEDFH

SEQ ID NO: 14367 - protein, 288 aa, Arabidopsis thaliana
  misc_feature (161)..(161): Xaa can be any naturally occurring amino acid
MPTLYKKAGCQFQLTTMQSKPGRENEEEVNNHHAVQQPMMYAEPWWKNNSFGVVPQARPSGIPSNSSSLDCPNGSESNDVHSASEDGALNGENDGTWKDSQAATSSRSVDNHGMEGNDPALSIRNMHDQPLVQPPELVGHYIACVPNPYQDPYYGGLMGAXGHQQLGFRPYLGMPRERTALPLDMAQEPVYVNAKQYEGILRRRKARAKAELERKVIRDRKPYLHESRHKHAMRRARASGGRFAKKSEVEAGEDAGGRDRERGSATNSSGSEQVETDSNETLNSSGAP

SEQ ID NO: 14368 - protein, 442 aa, Escherichia coli CFT073
MPDATLTRLIRPTGRCQTRRPDKAFTPHPAKSPSPHGEGLGEGKASPQPSRVKTLMKVNTMKALHFGAGNIGRGFIGKLLADAGIQLTFADVNQVVLDALNARHSYQVHVVGETEQVDTVSGVNAVSSIGDDVVDLIAQVDLVTTAVGPVVLERIAPAIAKGLVKRKEQGNESPLNIIACENMVRGTTQLKGHVMNALPEDAKAWVEEHVGFVDSAVDRIVPPSASATNDPLEVTVETFSEWIVDKTQFKGALPNIPGMELTDNLMAFVERKLFTLNTGHAITAYLGKLAGHQTIRDAILDEKIRAVVKGAMEESGAVLIKRYGFDADKHAAYIQKILGRFENPYLKDDVERVGRQPLRKLSAGDRLIKPLLGTLEYGLPHKNLIEGIAAAMHFRSEDDPQAQELAALIADKGPQAALAQISGLDANSEVVSEAVTAYKAMQ

SEQ ID NO: 14369 - protein, 189 aa, Brassica napus
FTIIALAMWVVLYDRAVIPLASKIRGRPFRLSVKLRMGLGLFMSFLAMAISAMVETLRRKKALSQGYANNANAIVDISAMWLVPQYVLHGLAEALTAIGQTEFFYTEFPKSMSSIAASLFGLGMAVASLLASVILNAVNELTSRNGEDSWVSDNINKGHYNYYYWLLAIMSFINVIYYMICSWSYGPLV

SEQ ID NO: 14370 - protein, 225 aa, Flueggea suffruticosa; identical to SEQ ID NO: 7493

SEQ ID NO: 14371 - protein, 473 aa, Cyanothece sp. ATCC 51142
MAQTPQEVLKMIQDNNIKIIDLKFIDLPGIWQHCSFYYNQIDESSFVDGVPFDGSSIRGWKAINESDMCMVPDPKTAWIDPFYEEPTLSMICGIKEPRTGEWYDRDPRTIAGKAVEYLQSTGIGDTAFFGPEAEFFVFDDVRFDQTENKGYYYVDSIEGRWNTGREEEGGNLGYKPGYKQGYFPVAPTDTVQDMRTEMLLTMAECGVPIEKHHHEVATGGQNELGFRFATLIEAADYLMTYKYVIKNVAKKYGKTVTFMPKPLFNDNGSGMHTHQSIWKGGEPLFWGDGYANLSKLALNYIGGILKHAPALLAFTNPTTNSYKRLVPGFEAPVNLAYSQGNRSASVRIPLSGPNPKAKRLEFRCPDATCNPYLAFAAMLCAGIDGIKNEIDPGESLDVDIYDLSPEELSKIPSTPGSLEQALESLEKDHAFLIDGGVFTQDFIENWIEYKLDNEVNPMRLRPHPYEFALYYDV

SEQ ID NO: 14372 - protein, 221 aa, Zea mays
YRTSLFQKAGRVPARIPRVHSPPLLPPPPAPAPFSPLLASPRARFYKGFGGGARSLAMADDGGSHEGSGGGGGVREQDRFLPIANISRIMKKAVPANGKIAKDAKETLQECVSEFISFVTSEASDKCQKEKRKTINGDDLLWAMATLGFEEYVEPLKIYLQKYKEMEGDSKLSTKAGEGSVKKDAISPHGGTSSSSNQLVQHGVYNQGMGYMQPQYHNGET

SEQ ID NO: 14373 - protein, 610 aa, Staphylococcus aureus subsp. aureus Mu50
MSKIIGIDLGTTNSCVTVLEGDEPKVIQNPEGSRTTPSVVAFKNGETQVGEVAKRQAITNPNTVQSIKRHMGTDYKVDIEGKSYTPQEISAMILQNLKNTAESYLGEKVDKAVITVPAYFNDAERQATKDAGKIAGLEVERIINEPTAAALAYGLDKTDKDEKVLVFDLGGGTFDVSILELGDGVFEVLSTAGDNKLGGDDFDQVIIDYLVAEFKKENGVDLSQDKMALQRLKDAAEKAKKDLSGVSQTQISLPFISAGENGPLHLEVNLTRSKFEELSDSLIRRTMEPTRQAMKDAGLTNSDIDEVILVGGSTRIPAVQEAVKKEIGKEPNKGVNPDEVVAMGAAIQGGVITGDVKDVVLLDVTPLSLGIEILGGRMNTLIERNTTIPTSKSQIYSTAVDNQPSVDVHVLQGERPMAADNKTLGRFQLTDIPPAERGKPQIEVTFDIDKNGIVNVTAKDLGTNKEQRITIQSSSSLSDEEIDRMVKDAEVNAEADKKRREEVDLRNEADSLVFQVEKTLTDLGENIGEEDKKSAEEKKDALKTALEGQDIEDIKSKKEELEKVIQELSAKVYEQAAQQQQQAQGANAGQNNDSTVEDAEFKEVKDDDKK

SEQ ID NO: 14374 - protein, 220 aa, Glochidion puberum; identical to SEQ ID NO: 7494

SEQ ID NO: 14375 - protein, 390 aa, Buchnera aphidicola str. Bp (Baizongia pistaciae)
MNALHFGAGNIGRGFIGPLLLKSGFNLTFVDNNQAIVDAINRHQKYDITVVGNNFSYITTVKKVKAIYINDPNIYFKIAKINVITISVGVHAINSLVVFFEKLIRYKIETNDFVFLTIIACENVFRCASKLKENIKILLPGIYHKYLDKNISFVDSVVDKIVCPNDKNNSDDINLSVKVEKFSEWIVDCTQFKHDRPNIIGMIYSNHLDAFFERKLFTLNTGHAIAAYLGLLIGYKNIYQAILDPLIFNIVYGAMKESGMVLIRKYNFFTDSEHKNYILKILSRFKNIYLTDSLKRVGRNPLQKLKKDDRLISPLIDTIKYNLPNANLMKGIAAALCYIDEKDIEAKKLRNMIINKGIKYVLSKISSLDSSLLIISEISIYFNIFMKVNI

SEQ ID NO: 14376 - protein, 368 aa, Corylopsis glabrescens f. gotoana; identical to SEQ ID NO: 7495

SEQ ID NO: 14377 - protein, 206 aa, Gonatogyne brasiliensis; identical to SEQ ID NO: 7497

SEQ ID NO: 14378 - protein, 174 aa, Yersinia aldovae
SSIGGWKGINESDMVLMPDASTAVMDPFFEDSTLIIRCDILEPGTLQGYDRDPRSISKRAEEFLKSSGIADTVLFGPEPEFFLFDDVRFGSSIRGSHVSIDDIEGAWNSSTKYEGGNKGHRPAVKGGYFPVPPVDSSQDLRSTMCLTMEEMGLVVEAHHHEVATAGQNEVATRF

SEQ ID NO: 14379 - protein, 368 aa, Daphniphyllum macropodum; identical to SEQ ID NO: 7499

SEQ ID NO: 14380 - protein, 1225 aa, Vitis vinifera
MRIEDGTVALHLAESEYVIEEKSPIPNLRIRPRKATLSDCTCFLRPGTEITVLWTLQQSESSDEENREPVWIDAKISSIERRPHEPECSCQFFVNFYITQDPLGTEKGTLSKDISVVELDQISILQKLGKYPCEDEHYRWKFSEDCSLLQRTKLFLGKFSSDLSWLVVTSVLKQAVFDVRSVQNRIVYQIVGGDHDKVSLNAVNFRVDNGISTPVIFPFVPADTIEADPLNGTNEAGPLPFCDIVDLRRSKRRNVQPDRFFSLGGFSESDIGSVRAGIHKVDYWRKEEMPLALPDEGDVHSIFSEKHIIDYEKGAHSLQIDSYEDFLVCKSKDRSREVKPILAAQNEDQHQFAIVPVPLIIEPIAHGEDHLHDETPWNESGEIGEISPKYYCTNGVPKLQRKNMSDLYMEVESRWEGKGPIRKLRRKRGFTIRTKTESYGEVRPHKKRPFSEPGYKEVIEAYMKNIESTINKEQPLVIDQWKELQVRNDLNQRRDCNSPSSVGDQEESSETEMLWREMEFSIASSYLLEENEVRVVQESSNISEQVCQHEYILDEEIGVLCQLCGFVSTEIKDVSPPFFQPTGWITNREWRDEENSKRKQAENDGFNLFSIPASSDTPLSEGNDNVWALVPDLRKKLRLHQKKAFEFLWKNIAGSMVPALMEQEVKRRGGCVISHSPGAGKTFLVISFLVSYLKLFPGKRPLVLAPKTTLYTWYKEIIKWKVPVPVYQIHGCRTYRYEIYKHKVETSPGIPRPNQDVMHVLDCLEKIQKWHAHPSILLMGYTSFLSLMREDSKFIHRRYMGEVLRQSPGILVLDEGHNPRSTGSRLRKALMKVKTNLRILLSGTLFQNNFSEYFNTLCLARPKFVNEVLRELDPKFKRNKNRRKRRYSSTESRARKFFTDEIAKRINSNVPEEQIEGLNMLRNLTSKFIDVYEGGSSDNLPGLQVYTLLMKSTTIQQQFLSKLQKKKDEYKGYPLELELLVTLGSIHPWLITTAACADKYFSREELLELKKHKDDVKKGSKVKFVLSLVNRCIIRKEKILIFCHNISPINLFVDIFDKLYKWKKGEDVLVLQGDLELFERGRVMDQFEEPGGASKVLLASITACAEGISLTAASRVILLDTEWNPSKQKQAVARAFRPGQERVVYVYQLLETDTLEEEKNSRTNWKEWVSSMIFSEAFVEDPSCWQAEKIEDDLLREIVEEDWAKSIHMIMKNEKASNGLIRGKE

SEQ ID NO: 14381 - protein, 344 aa, Oryza sativa Japonica Group
MVGAVQEGIVREMNGGFEVMSGYDRSSMAPKQQQREEESKWYEEEIDDDLKLCYALNSVLHRGASKYQEIALIDTKHFGKALIIDGKMQSTEVDEFIYHESLIHPPLLFHPNPKTVFIMGGGEGSAAREVLRHNTVHRVVMCDIDQEVVDFCRTYLTVNWDAFASDKLCLIINDARAELEKSREKFDVIVGDLADPVEGGPCYQLYTKSFYQHIVKPKLNDRGVFVTQAGPAGVLTHKEVFSSIYNTLRHVFKYVKAYTAHVPSFADTWGWVMASDYPFSMNAQQINERIKERIDGELVYLSGESLISSTILNKSVYQSLLNETHVYTEDDARFIYGHGRARCA

SEQ ID NO: 14382 - protein, 199 aa, Yersinia aldovae
GSSIGGWKGINESDMVLMPDASTAVMDPFFEDSTLIIRCDILEPGTLQGYDRDPRSISKRAEEFLKSSGIADTVLFGPEPEFFLFDDVRFGSSIRGSHVSIDDIEGAWNSSTKYEGGNKGHRPAVKGGYFPVPPVDSSQDLRSTMCLTMEEMGLVVEAHHHEVATAGQNEVATRFNTMTKKADEIQIYKYVVHNVAHAF

SEQ ID NO: 14383 - protein, 447 aa, Desulfovibrio vulgaris subsp. vulgaris str. Hildenborough
MDIPVFNCKNGDDVIRAVKEYNVSFVQFWFVDILGNLKSFQVTPSELEAAFEEGMGFDGSSILGFTRIEESDMVAFPDATTFQICSWRPLERPVARMFCDIRTPDGTPYEGDPRYILRKLIDKAAQKGYTFYVGPELEFFFFSSPQCPTPIDAGGYFDAPPLDLGNDVRRDIIFALQRMGIPVEYSHHEVAPSQHEIDLRYNEAMKMADVVMTYKVVVKEMARKHGIYATFMPKPIFGENGSGMHVHQSLFRNGKNAFFDPNDQHNLSHECRSYIAGLLKHAREFCCVTNQWINSYKRLVPGYEAPVYIAWAQRNRSALIRVPMYKPGKEAATRIELRSPDPACNPYLAFAVMLGAGLEGIENNYELPKAVEANIFHMGEEDLGKHGIGSLPGSLYEAAMELRNSNLMKEILGEHTHANIVGNKLIEWDDYRTHISEFELKRYLPIL

SEQ ID NO: 14384 - protein, 391 aa, Euonymus alatus; identical to SEQ ID NO: 7500

SEQ ID NO: 14385 - protein, 450 aa, Prochlorococcus marinus str. MIT 9211
MILKSNQNTLSFIGNKLSKTLPFFNGLLLLAAISLPALSLPRNTSLVIRDSPKEVLDQVWQIIYREYLDSNGNYNDESWLKLRKKVLSNKYYDSAEAYEAIVSMLKSLKDPYTRFLDPKDYKEMRIDTSGELMGIGIQLSLNEETNELVIVAPIEDTPAFKAGIQPNDIIVSIDDTDTDGMSIDGAVKLIRGEKGTKVTLGIIRGTQYLKVPLIRSRIEIRSVISRLNETSNGGTIGYIRLKQFSANAATEMRSAIIKLEEQKSQGYILDLRGNPGGLLEASIDIARQWLNTGIIVSTLTKDGINDFRRATGNALTNKPLVVLVNEGSASASEILAGAIQDNKRGILVGSKTFGKGLVQSVRPLVDGSGITVTVAKYLTPNGTDINKNGIKPDIKASLNLNNNKSFSAIDLGTSKDSQYVVAETALSRIMFNLNSTSYKQNTANLSFALK

SEQ ID NO: 14386 - protein, 151 aa, Yersinia bercovieri
LMPDASTAVMDPFFEDSTLIIRCDILEPGTMQGYDRDPRSISKRAEDFLKSSGIADTVLFGPEPEFFLFDDVRFGSSIRGSHVSIDDIEGAWNSSTKYEGGNKGHRPAVKGGYFPVPPVDSSQDLRSTMCLTMEEMGLVVEAHHHEVATAG

SEQ ID NO: 14387 - protein, 370 aa, Gunnera monoica; identical to SEQ ID NO: 7501
  misc_feature (180)..(180): Xaa can be any naturally occurring amino acid
  misc_feature (366)..(366): Xaa can be any naturally occurring amino acid

SEQ ID NO: 14388 - protein, 375 aa, Vitis vinifera
MMFGALISATDPVTVLSIFQELGSDMNLYALVFGESVLNDAVKIVLLCRTISLIKSHVPSEQNFFMVIVKFLETFVGSMSSEVGISFFGVNLFKYAGLDIDNLLNLECCLFVLFPYFSYMLAEGLGLSGIVSILFTGIVMKHYTFSNLSENSQRFVSAFFHLISSLAETFVFIYMGFDIAMEQHSWSHVGFIFFSILFIIVARAANVFSCAYMVNLIRPAHRQIPLKHQKALWYSGLRGAMAFALALQSVHDLPEGHGQTIFTATTAIVVLTVLLIGGSTGTMLEALQVVGDGHDGPIGESFEVNNGYISPPYDEEESSGNRLKMRLKEFHKNTATFRALDKNYLTPFFTTQTGDDEEQEDFGMFRVDNIYLVKK

SEQ ID NO: 14389 - protein, 106 aa, Salmonella enterica
LAKNGTNLFSGDKYAGLSEQALYYIGGVIKHAKAINALANPTTNSYKRLVPGYEAPVMLAYSARNRSASIRIPVVASPKARRIEVRFPDPAANPYLCFAALLMAGL

SEQ ID NO: 14390 - protein, 416 aa, Arabidopsis thaliana
MEAKPLASSSSEPNMISPSSNIKPKLKDEDYMELVCENGQILAKIRRPKNNGSFQKQRRQSLLDLYETEYSEGFKKNIKILGDTQVVPVSQSKPQQDKETNEQMNNNKKKLKSSKIEFERNVSKSNKCVESSTLIDVSAKGPKNVEVTTAPPDEQSAAVGRSTELYFASSSKFSRGTSRDLSCCSLKRKYGDIEEEESTYLSNNSDDESDDAKTQVHARTRKPVTKRKRSTEVHKLYERKRRDEFNKKMRALQDLLPNCYKDDKASLLDEAIKYMRTLQLQVQMMSMGNGLIRPPTMLPMGKYSPMGLGMHMGAAATPTSIPQFLPMNVQATGFPGMNNAPPQMLSFLNHPSGLIPNTPIFSPLENCSQPFVVPSCVSQTQATSFTQFPKSASASNLEDAMQYRGSNGFSYYRSPN

SEQ ID NO: 14391 - protein, 391 aa, Ixonanthes chinensis; identical to SEQ ID NO: 7502

SEQ ID NO: 14392 - protein, 199 aa, Yersinia bercovieri
SSIGGWKGINESDMVLMPDASTAVMDPFFEDSTLIIRCDILEPGTMQGYDRDPRSISKRAEDFLKSSGIADTVLFGPEPEFFLFDDVRFGSSIRGSHVSIDDIEGAWNSSTKYEGGNKGHRPAVKGGYFPVPPVDSSQDLRSTMCLTMEEMGLVVEAHHHEVATAGQNEVATRFNTMTKKADEIQIYKYVVHNVAHAFG

SEQ ID NO: 14393 - protein, 230 aa, Brassica oleracea
MGDEKESSVTSTVAEQVVEAVGIYIFLYIHKPKLVTLKKDMERGGFHGYGKFSLNNTNPSEPAKFLMAAGSMQLSVFNKPNKTANGGEEECTVREQDRSQSSDDSKETIQECVSEYISFVTREANERCQREQRKTVTAEDVLWAMSKIGFDDYIVPPPLQRVGGMTNGLVVKRPNGTMAEYGAVAGIHMAPYHYHHQNGFVFSANEPNSKMGGSSSGASVEVYPTQQHKY

SEQ ID NO: 14394 - protein, 114 aa, Salmonella enterica
MSLAKNGTNLFSGDKYAGLSEQALYYIGGVIKHAKAINALANPTTNSYKRLVPGYEAPVMLAYSARNRSASIRIPVVASPKARRIEVRFPDPAANPYLCFAALLMAGLDGIKNK

SEQ ID NO: 14395 - protein, 546 aa, Hordeum vulgare
MGPDLGALALRYTGLAVSDHDSIVAINIFIALLCGCIVFGHLLEGNRWVNESTTAIVLGLITGGVILLCTKGVNSRILIFSEDIFFIYLLPPIIFNAGFQVKKKQFFRNFATIILFGAVGTLISFVIITLGAMGLFRKLDVGPLELGDYLAIGAIFSATDSVCTLQVLNQDQAPLLYSLVFGEGVVNDATSVVLFNAIQNIDLNHFDVLVLLQLIGKFLYLFLTSTVLGVAAGLLSAYIIKKLCFARHSTDREVAIMILMAYLSYMLSMLLDLSGILTVFFCGIVMSHYTWHNVTESSRVTTKHTFATLSFIAEIFLFLYVGMDALDIDKWKLASSSPKKPIALSAVILGLVMVGRAAFVFPLSYLSNLSKKESHPKISFNQQVIIWWAGLMRGAVSIALAYNKYTTSGHTAVRVNAVMITSTIIVVLFSTMVFGLLTKPLINLLVPPRPGTAADISSQSFLDPLTASLLGSDFDVGQLTPQTNLQYLLTMPTRSVHRVWRKFDDKFMRPMFGGRGFVPFVPGSPIERSVHGPGLLGTVTEAENRS

SEQ ID NO: 14396 - protein, 236 aa, Brassica napus
MASSSSYYTPLSALFDVSKPNPSLNPAAFLVPSLKFSTAISNFANLSNGFSLKSPVNPGFLFKSRTFNVQARAAAEKTVHDFTVKDIDGNDVSLNKYKGKVMLIVNVASRCGLTSSNYSELSHLYEKYKSQGFEILAFPCNQFGGQEPGSNPEIKQFACTRFKAEFPIFDKVDANGPSTAPIYQFLKSNAGGFLGDLIKWNFEKFLIDKKGKVVERYPPTTSPFQIEKDIKKLLDA

SEQ ID NO: 14397 - protein, 325 aa, Sinorhizobium meliloti
IGGWKAINESDMVLMPDPETAHMDPFFAQSTMVIFCDILDPVSGEAYNRDPRGTAKKAEAYLKASGIGDTVFVGPEAEFFVFDDVKYKADPYNTGFKLDSSELPSNDDTDYETGNLGHRPRVKGGYFPVPPVDSSQDMRSEMLTVLSEMGVTVEKHHHEVAAAQHELGVKFDALVRNADKMQIYKYVVHQVANAYGKTATFMPKPIFGDNGSGMHVHLSIWKDGKPTFAGDEYAGLSESCLYFIGGIIKHAKALNAFTNPSTNSYKRLVPGYEAPVLLAYSARNRSASCRIPFGTNPKAKRVEVRFPDPTANPYLAFAAMLMAGL

SEQ ID NO: 14398 - protein, 161 aa, Pseudomonas syringae pv. syringae B728a
MSENLLSIPVTTIKGEQKTLADFSGKALLVVNTASQCGFTPQYKGLEKLWQDYRDQGLVVLGFPCNQFGKQEPGDEGAISGFCELNYGVSFPLFKKIDVNGEQAHPLFVQLKQQAPGLLGTERIKWNFTKFLIGQDGRLVKRFAPLTKPEELTGEIEALLR

SEQ ID NO: 14399 - protein, 538 aa, Arabidopsis thaliana
MLDSLVSKLPSLSTSDHASVVALNLFVALLCACIVLGHLLEENRWMNESITALLIGLGTSVTILLISKGKSSHLLVFSEDLFFIYLLPPIIFNAGFQVKKKQFFRNFVTIMLFGAVGTIISCTIISLGVTQFFKKLDIGTFDMGDYLAIGAIFAATDSVCTLQVLNQDETPLLYSLVFGEGVVNDATSVVVFNAIQSFDLTHLNHEAAFHLLGNFLYLFLLSTLLGAATGLISAYVIKKLYFGRHSTDREVALMMLMAYLSYMLAELFDLSGILTVFFCGIVMSHYTWHNVTESSRITTKHTFATLSFLAETFIFLYVGMDALDIDKWRSVSDTPGTSIAVSSILMGLVMVGRAAFVFPLSFLSNLAKKNQSEKINFNMQVVIWWSGLMRGAVSMALAYNKFTRAGHTDVRGNAIMITSTITVCLFSTVVFGMLTKPLISYLLPHQNATTSMLSDDNTPKSIHIPLLDQDSFIEPSGNHNVPRPDSIRGFLTRPTRTVHYYWRQFDDSFMRPVFGGRGFVPFVPGSPTERNPPDLSKA

SEQ ID NO: 14400 - protein, 135 aa, Salmonella enterica
PKPMFGDNGSGMHCHMSLAKNGTNLFSGDKYAGLSEQALYYIGGVIKHAKAINALANPTTNSYKRLVPGYEAPVMLAYSARNRSASIRIPVVASPKARRIEVRFPDPAANPYLCFAALLMAGLDGIKNKIHPGEA

SEQ ID NO: 14401 - protein, 598 aa, Yarrowia lipolytica CLIB122
MSIIHKSPVPDVQLFYGSWPDLMRTSPHAHNDSKPVVFDFDTKQQLTWKQVWQLSARLRAQLYHKYGIGKPGALAPFHNDPSLGDVVIFYTPNTYSSLPYHLALHDLGATISPASTSYDVKDICHQIVTTDAVVVVAAAEKSEIAREAVQLSGRDVRVVVMEDLINNAPTVAQNDIDSAPHVSLSRDQARAKIAYLGMSSGTSGGLPKAVRLTHFNVTSNCLQVSAAAPNLAQNVVASAVIPTTHIYGLTMFLSVLPYNGSVVIHHKQFNLRDLLEAQKTYKVSLWILVPPVIVQLAKNPMVDEYLDSIRAHVRCIVSGAAPLGGNVVDQVSVRLTGNKEGILPNGDKLVIHQAYGLTESSPIVGMLDPLSDHIDVMTVGCLMPNTEARIVDEEGNDQPAVHVTDTRGIGAAVKRGEKIPSGELWIRGPQIMDGYHKNPESSRESLEPSTETYGLQHFQDRWLRTGDVAVIDTFGRVMVVDRTKELIKSMSRQVAPAELEALLLNHPSVNDVAVVGVHNDDNGTESARAFVVLQPGDACDPTTIKHWMDQQVPSYKRLYGGIVVIDTVPKNASGKILRRLLRQRRDDRVWGLAKVAKL

SEQ ID NO: 14402 - protein, 555 aa, Burkholderia sp. 383
MEIVFTVLILLLTVALSGAVTRILPFQLPLPLMQIAFGAMLAWPKLNLHVAFDPEIFMLLFIPPLLFADGWRIPKRELYLQRRAILMLAFGLVFMTVLAVGYFAHWLIPELPLPIAFALAAVLSPTDAVALSGIAGKGRIPPQLMHILEGEALMNDASGLVALKFAIAAALTGMFSLRDASVTFVIVAAGGLATGAIVSWAFSALSTRFLNAEQEGDPAPGIVMTLLVPFAAYLFAEHLDLSGVLAAVSAGMMMNYTSFSRKSTVASRVRAESTWAMIEFVFNGMVFIMLGLQLPHIIGRTLVDAHHTSDALVGRMVFNVCAMMLALYAIRFLWVWLLRWFASRRAARQGLTGTMAGVRTIAVMTVGGVRGAVTLAGVLSIPVALSDGVPLPGRDTAIFVASAVILGSLIVAVIGLPLLLRGVRSSRSPLGDEERAARAAAAQAAIRAIDSSHDAISVDLDESGAARCADISARVMDQYRRRLATLAEDGPTPRAEAKQAETMELQMRIAAVRAERSALYRLRSESKISDETLTKLLREIDLSETALSTRKKGIL

SEQ ID NO: 14403 - protein, 108 aa, Salmonella enterica
MSLAKNGTNLFSGDKYAGLSEQALYYIGGVIKHAKAINALANPTTNSYKRLVPGYEAPVMLAYSARNRSASIRIPVVASPKARRIEVRFPDPAANPYLCFAALLMAGL

SEQ ID NO: 14404 - protein, 325 aa, Sinorhizobium medicae
IGGWKAINESDMVLMPDPETAHMDPFFAQSTMVIFCDILDPVSGEAYNRDPRGTAKKAEAYLKASGIGDTVFVGPEAEFFVFDDVKYKADPYNTGFKLDSSELPSNDDTDYETGNLGHRPRVKGGYFPVPPVDSSQDMRSEMLTVLTEMGVTVEKHHHEVAAAQHELGIKFDALVRNADKMQIYKYVVHQVANAYGKTATFMPKPIFGDNGSGMHVHLSIWKDGKPTFAGDEYAGLSETCLYFIGGIIKHAKALNAFTNPSTNSYKRLVPGYEAPVLLAYSARNRSASCRIPFGSNPKSKRVEVRFPDPTANPYLAFAAMLMAGL

SEQ ID NO: 14405 - protein, 469 aa, Azospirillum brasilense
MSDISKVFDLIKEHDVKYVDLRFTDPRGKLHHTAQHVSTIDEDVFEDGIMFDGSSIAGWKAINESDMILQLDPTTAVMDPFSAQPTLNILCDVYEPSTGQPYARCPRGIAKAAEKYMASAGIGDTAYFGPEAEFFVFDDVKFKVEMNKVSYEFDSEEGPYTSDKDYEDGNLGHRPGVKGGYFPVAPVDSGSDLRAEMLSVLAEMGVPVEKHHHEVAASQHELGIKFDTLVRTGDNMQYYKYVVHNVAHAYGKTATFMPKPVFGDNGSGMHMHQSIWKEGQPLFAGNQYADLSELALYYIGGIIKHAKALNAFTNPTTNSYKRLVPGYEAPVLLAYSARNRSASCRIPYVASPKGKRVEVRFPDPSANPYLAFAALLMAGLDGIQNKIHPGEAMDKNLYDLPAEELAKVPTVCGSLREALDSLKADSAFLQKGDVFTKDMIESYIDLRTEELLAFETMPHPIEYKMYYSV

SEQ ID NO: 14406 - protein, 177 aa, Oryza sativa Japonica Group
MADHHGGHHADGHRRQQQLQGEAADQAAAEIIKEQDRLLPIANVGRIMKQILPPNAKISKEAKETMQECVSEFISFVTGEASDKCHKEKRKTVNGDDVCWAFGALGFDDYVDPMRRYLNKYRELEGDRAAAAATSRSGAGAAAGPDHPSSSSSAAAATAGHFMFNAMDRSTDSSRQF

SEQ ID NO: 14407 - protein, 298 aa, Anabaena variabilis ATCC 29413
MAPKVVDRRNTMPQLQAKSLEMRTPQATKTAVLVIGGAEDKVHGREILRTFFGRAGASKAYITIIPSASREPAIIGGRYIRIFEEMGAEKVEILDIREREQCESSQVRASLEACSGVFLTGGDQLRLCGVLSDTPVMEIIRQRVRGGQLTLAGTSAGAAVMGHHMIAGGGSGETPNRSLVDMATGLGLIPEVIVDQHFHNRNRMGRLISAVAAHPDRLGIGIDEDTCAVFERDGWLQVLGKGSVTIVDPTELTHTNEPHVGANEPLTVHNLRLHILSYGDRFHLYQRTVLPAVHRISS

SEQ ID NO: 14408 - protein, 189 aa, Taxodium distichum; identical to SEQ ID NO: 7511

SEQ ID NO: 14409 - protein, 1388 aa, Schizosaccharomyces pombe
MSTSAIALALSSSKAIEQLDHVQTETPNLKQEMSESPSNSGVASKRKLQSTEWLDPELYGLRRSGRTRSNPGRYVDTDDQEDVFPSKHRKGTRNGSSFSRHRTIRDLDDEAESVTSEESESDDSSYGGTPKKRSRQKKSNTYVQDEIRFSSRNSKGVNYNEDAYFESFEEEEEEEMYEYATEVSEEPEDTRAIDVVLDHRLIEGHDGSTPSEDYEFLIKWVNFSHLHCTWEPYNNISMIRGSKKVDNHIKQVILLDREIREDPTTTREDIEAMDIEKERKRENYEEYKQVDRIVAKHLNSDGSVEYLVKWKQLLYDFCTWEASSIIEPIAATEIQAFQEREESALSPSRGTNYGNSRPKYRKLEQQPSYITGGELRDFQLTGVNWMAYLWHKNENGILADEMGLGKTVQTVAFLSYLAHSLRQHGPFLVVVPLSTVPAWQETLALWASDMNCISYLGNTTSRQVIRDYEFYVDGTQKIKFNLLLTTYEYVLKDRSVLSNIKWQYMAIDEAHRLKNSESSLYEALSQFKNSNRLLITGTPLQNNIRELAALVDFLMPGKFEIREEINLEAPDEEQEAYIRSLQEHLQPYILRRLKKDVEKSLPSKSERILRVELSDLQMYWYKNILTRNYRVLTQSISSGSQISLLNIVVELKKASNHPYLFDGVEESWMQKINSQGRRDEVLKGLIMNSGKMVLLDKLLSRLRRDGHRVLIFSQMVRMLDILGDYLSLRGYPHQRLDGTVPAAVRRTSIDHFNAPNSPDFVFLLSTRAGGLGINLMTADTVIIFDSDWNPQADLQAMARAHRIGQKNHVMVYRLLSKDTIEEDVLERARRKMILEYAIISLGVTDKQKNSKNDKFSAEELSAILKFGASNMFKAENNQKKLEDMNLDEILEHAEDHDTSNDVGGASMGGEEFLKQFEVTDYKADVSWDDIIPLTEREKFEEEDRLREEEEALKQEIELSSRRGNRPYPSSAVESPSYSGTSERKSKKQMLKDEVLLEKEIRLLYRAMIRYGSLEHRYNDIVKYADLTTQDAHVIKKIAADLVTASRKAVSAAEKDLSNDQSNNKSSRKALLITFKGVKNINAETLVQRLNDLDILYDAMPTSGYSNFQIPMHVRSVHGWSCQWGPREDSMLLSGICKHGFGAWLEIRDDPELKMKDKIFLEDTKQTDNSVPKDKENKEKKVPSAVHLVRRGEYLLSALREHHQNFGIKSSPAISTNGKTQPKKQTANRRQSGKPNVKSAQKIESATRTPSPAISESRKKPSSKDTKIETPSREQSRSQTASPVKSEKDDGNVSLNAEQKARCKELMYPVRKHMKRLRKDSSGLGRAELVKLLTECLTTIGKHIEKTVNDTPSEEKATVRKNLWMFACYFWPKEEVKYTSLISMYEKMK

SEQ ID NO: 14410 - protein, 473 aa, Cyanothece sp. PCC 8801
MAKTPQEVLKMVQDNDIKIIDLKFIDTPGIWQHCSFYYNQIDESSFVDGVPFDGSSIRGWKAINESDMSMVPDASTAWIDPFFQEPTLSMICSIKEPRTGEWYSRDPRSIAQKAVDFLATTGIGDTAYFGPEAEFFVFDDVRFDQTENKGYYYVDSVEGRWNTGREEEGGNLGYKPGYKQGYFPVPPTDTIQDMRTEMLLTMAECGVPIEKHHHEVATGGQNELGFRFATLVEAADYLMTYKYVIKNVAKKYGKTVTFMPKPLFNDNGSGMHTHQSIWKGGQPLFWGDGYANLSKMALNYIGGILKHAPALLGLTNPTTNSYKRLVPGFEAPVNLAYSQGNRSASIRIPLSGPNPKAKRLEFRCPDATCNPYLAFAAMLCAGIDGIKNEIDPGESLDVDIYDLSPEELSKIPSTPGSLEAALEALEKDHSFLTDTGVFTEDFIENWIEYKLDNEVNPMRLRPHPYEFALYYDV

SEQ ID NO: 14411 - protein, 223 aa, Heywoodia lucens; identical to SEQ ID NO: 7514

SEQ ID NO: 14412 - protein, 145 aa, Oryza sativa Japonica Group; identical to SEQ ID NO: 13151

SEQ ID NO: 14413 - protein, 175 aa, Zea mays
  misc_feature (12)..(12): Xaa can be any naturally occurring amino acid
RYPGILKHAPAXLLAFTNPTTNSYKRLVPGFEAPVNLAYSQGNRSASVRIPLSGGNPKAKRLEFRCPDATSNPYLAFAAMLCAGIDGIKNQIDPGEPLDVDIYDLSPEELAKIPSTPGSLEAALEALEKDHEFLTGTGVFSPDFVESWIEYKLDNEVNPMRLRPHPYEFSLYYDC

SEQ ID NO: 14414 - protein, 225 aa, Lachnostylis bilocularis; identical to SEQ ID NO: 7518
  misc_feature (3)..(3): Xaa can be any naturally occurring amino acid

SEQ ID NO: 14415 - protein, 924 aa, Saccharomyces cerevisiae
MQIPKYENKPFKPPRRVGSNKYTQLKPTATAVTTAPISKAKVTVNLKRSISAGPTLNLAKKPNNLSSNENTRYFTIMYRKPTTKKHKTWSGDGYATLKASSDKLCFYNEAGKFLGSSMLPSDSDSLFETLFKAGSNEVQLDYELKENAEIRSAKEALSQNMGNPSPPTTSTTETVPSTKNDGGKYQMPLSQLFSLNTVKRFKSVTKQTNEHMTTVPKTSQNSKAKKYYPVFDVNKIDNPIVMNKNAAAEVDVIVDPLLGKFLRPHQREGVKFMYDCLMGLARPTIENPDIDCTTKSLVLENDSDISGCLLADDMGLGKTLMSITLIWTLIRQTPFASKVSCSQSGIPLTGLCKKILVVCPVTLIGNWKREFGKWLNLSRIGVLTLSSRNSPDMDKMAVRNFLKVQRTYQVLIIGYEKLLSVSEELEKNKHLIDMLVCDEGHRLKNGASKILNTLKSLDIRRKLLLTGTPIQNDLNEFFTIIDFINPGILGSFASFKRRFIIPITRARDTANRYNEELLEKGEERSKEMIEITKRFILRRTNAILEKYLPPKTDIILFCKPYSQQILAFKDILQGARLDFGQLTFSSSLGLITLLKKVCNSPGLVGSDPYYKSHIKDTQSQDSYSRSLNSGKLKVLMTLLEGIRKGTKEKVVVVSNYTQTLDIIENLMNMAGMSHCRLDGSIPAKQRDSIVTSFNRNPAIFGFLLSAKSGGVGLNLVGRSRLILFDNDWNPSVDLQAMSRIHRDGQKKPCFIYRLVTTGCIDEKILQRQLMKNSLSQKFLGDSEMRNKESSNDDLFNKEDLKDLFSVHTDTKSNTHDLICSCDGLGEEIEYPETNQQQNTVELRKRSTTTWTSALDLQKKMNEAATNDDAKKSQYIRQCLVHYKHIDPARQDELFDEVITDSFTELKDSITFAFVKPGEICLREQ

SEQ ID NO: 14416 - protein, 182 aa, Desulfotalea psychrophila LSv54
MNTLKNQTLPLRIIMKRDFYQFSATNLQGQKIAMKEYRGKVMLVVNTASKCALSSQLRGLEILYKKYAPLGFVVLGFPCNQFTPQESRDAQNIAEEYLLNYGASFPLFTKTEVVGKGAHPLFSYLENRLEGIMGPDIKWNFTKFLIDHRGDPVKRFAPITAPAIIAPDIEILLSAQSTAGEQ

SEQ ID NO: 14417 - protein, 310 aa, Trichodesmium erythraeum IMS101
MANNMVASDLWISEHITPWDIYVHGLTKVLAYKKTAYQEMYIVETGIYGKALVLDGKWQSCTGDEFLYHEPLVHPAMICHGSPRKVLVLGGGEGATIREVFRWQSVEKVAMVDIDGEVVEACRQYLPEMHANAFDDPRLQLVIGDALKFLETFGESWDVVISDLSDPIEEGPSFQLFTKEYFEKILRVLTPGGFFVVQAGPVSPGEMKLHARIVNTMKAVFPFVQSYNSNIPTYGRPWGFALGSRKMVNSRPEPEMIDKLLKEKTIGGFRMLDGTTLLGMLQVPLHLREAIATETKIYTLAEPPKFGRPA

SEQ ID NO: 14418 - protein, 376 aa, Klainedoxa gabonensis; identical to SEQ ID NO: 7519

SEQ ID NO: 14419 - protein, 143 aa, Oryza sativa Japonica Group
MSEGFDGTENGGGGGGGGVGKEQDRFLPIANIGRIMRRAVPENGKIAKDSKESVQECVSEFISFITSEASDKCLKEKRKTINGDDLIWSMGTLGFEDYVEPLKLYLRLYRETEGDTKGSRASELPVKKDVVLNGDPGSSFEGM

SEQ ID NO: 14420 - protein, 281 aa, Leea guineensis; identical to SEQ ID NO: 7523

SEQ ID NO: 14421 - protein, 391 aa, Liquidambar styraciflua; identical to SEQ ID NO: 7524

SEQ ID NO: 14422 - protein, 525 aa, Bradyrhizobium japonicum USDA 110
MAPLKSVSGIIVSTFEWIIALLLGAVALSALARRIKVPYPTFLAIGGALIAFVPNSPTWTLEPDLALALFVAPVLLDAAFDTSLRDLRNNWVPVSTLVVAAVGLTTVGVAYVAHRLMPDMPWAAAIALGAIVAPPDAAAAVAILSQVKLPHRMVKVLEGESLLNDATSLLIYRIAVGAVVMQHLKWSEVAPTIALALVGSVLAGLLAGRIIPLFLQRVKEAPSAIILQFATTFMVWIAAEHLGLSGILTIVVYAITMARTAGAHMPARLRVPSYAVWETMVFVLNVLAFMLIGMQMRPIWTRLDADVRWEYCVAAAWILLTVVLVRLLWVTFYRTTLRALIAHGLYHPKDPKQVASPKGGLIISWCGMRGLVTLATAFALPENFPYRDFIVFIAFAVVLGSLVIQGLTLRPLILAFGLKDDDPVGIEVARGRAVAYRAALDAIESDPSEEAEILRLEYRAILMQADDDPNGGIASGELPADPLRRRAIEAARKSIFDLRATEVIGDDAFHRLEEELDRAELSAGG

SEQ ID NO: 14423 - protein, 376 aa, Meliosma squamulata; identical to SEQ ID NO: 7526
  misc_feature (222)..(222): Xaa can be any naturally occurring amino acid
  misc_feature (306)..(306): Xaa can be any naturally occurring amino acid

SEQ ID NO: 14424 - protein, 159 aa, Campylobacter jejuni
DPFTADPTIIVFCDVYDIYKGQMYEKCPRSIAKKAMEHLKNSGIADTAYFGPENEFFVFDSVKIVDTTHCSKYEVDTEEGEWNDDREFTDSYNTGHRPRNKGGYFPVQPIDSLVDIRSEMVQTLEKVGLKTFVHHHEVAQGQAEIGVNFGTLVEAADNV

SEQ ID NO: 14425 - protein, 1085 aa, Yarrowia lipolytica CLIB122
MDELSRLSVDVVDQGTLENQITNEADSILKKREFEIDTKRLSKAQDAEKTFLSKLRSMERKINDPATKISEREKLKRDVATLKRTELATVQQDISDIRQRLQENDTSSATTELQASDRHEGESEQEYLVRTGKITPFANTRGFTRGKGDVTQNIDTSKPYTSSTITELGDIKEDDDDDGEDEIKDEEDAEDDADAYSSGYTTDEIEPEDMELVELKKKRRRTERPETEAIDDGDEWSYQQRLNWWVEKRQKARARAGVIVPASDYAKEEWLLDGPEADAILEGNFKVPGEIFNALFDYQKTCVQWLWELHTQKTGGIIGDEMGLGKTIQIISFLAGLHHSGLLTKPVIVVCPATVMKQWVEEFHKWWPALRVVILHSMGEGSKGKKKRKGEIDSDDDDDEMIRPTPSSTKNLVETIDKVFKDGHVVVTTYAGLKSYRSLLLDREWGYCILDEGHKIRNPDSQITLDCKQLKTVHRLILSGTPIQNNLTELWSLLDFVCPGRLGTLPVFHSQFAVPINVGGYANATNIQVQTAYKCAVVLRDLIAPYLLRRMKTDVATDLPKKEEKVLFCKLTDSQRLHYKGFLKSEELKSILAGKRQSLFGIDILRKICNHPDLASREILKKTADYYYGDPAKSGKMQVVKALVDLWKKQGHRTLLFCQTRQMLEILEDFFANMPDIKYLRMDGTTPISKRQDMVDTYNKDTSYDLFLLTTRVGGLGVNLTGANRVIIFDPDWNPSTDLQARERSWRLGQKRNVVVYRLMTAGTIEEKIYHRQIFKQFLTNKILKDAKQRRFFKMNDIHDLFSLDDGEGDTTETGMIFSGSEKKIENKKPEKKMKDDDDFYQVVGLNGVSKLEKFENGEEERAESNDGDNDDNILNDIFSQTGVHSALEHDAIMDASRPETVIIEREAKRVAEVAAKALRDSRKKAQANDIGTVTWTGKFGSAGKFGKKKQSAGKVGVPKFGSDKFSSSSILQNIKAKKSLEESTNAYTGLINMSDLDKVKLLEKISESLKLAGAGGLSSKDIANEFALKLTNQEEVAVMRQLLRQAGEWNGATKKWRYKAVEDVGDEDEEIQEVVPVDEMGNKL

SEQ ID NO: 14426 - protein, 73 aa, Salmonella enterica
SEQALYYIGGVIKHAKAINALANPTTNSYKRLVPGYEAPVMLAYSARNRSASIRIPVVASPKARRIEVRFPDP

SEQ ID NO: 14427 - protein, 370 aa, Paeonia sp. Qiu 95-090; identical to SEQ ID NO: 7527

SEQ ID NO: 14428 - protein, 146 aa, Salmonella enterica
ATFMPKPMFGDNGSGMHCHMSLAKNGTNLFSGDKYAGLSEQALYYIGGVIKHAKAINALANPTTNSYKRLVPGYEAPVMLAYSARNRSASIRIPVVASPKARRIEVRFPDPAANPYLCFAALLMAGLDGIKNKIHPGEAMDKNLYD

SEQ ID NO: 14429 - protein, 1064 aa, Bacillus anthracis str. Ames
MGFTLNKSIIKEVCGETSYKRGEAYYKSNKVIVNHYDETKEICEATVKGNEDFHVTVEKAKKGDVVARCSCPSLASFQTYCQHVAAVLIQINYNQQTGGMGSVSSRNDQLTNGMFQLFADKPLRPKSKQHRFDTREILDVAFICSPVATKSGGALLGIQLKLAKTYLINHIREFLSKVEKRETFHYSNEFTYTPDIHSFKQETDVIIQHLIKIYHNEKMYEDALEVHAKQDESMIFIPPASWNDMLSALSRAEYVQLKQNEQLFHGLQISKGLLPLHFEFTKGNNGGFTLHIAGLNRVRVMEMYNNALYDGKLYHLPMEDCMRLIELQKMMIRSNSNQFYIPENKMEHFVAKVVPGLMKLGTVRIDEGISDRVETPSLKAKLYLDRVKNRLLAGLEFHYGNVVINPLEEDGQPSVFNRDEKKEKEILDIMSESAFAKTEGGYFMHNEDAEYNFLYHIVPTLKGLVDIYATTAIKLRIHKGDTAPLIRVRRKERIDWLSFRFDIKGIPEAEIKGVLVALEEKRKYYRLANGSLLSLESKEFNEINQFVKESGIRKEFLHGEEVNVPLIRSVKWMNGLHEGNVLSLDESVQDLVESIQNPKKLKFTVPQTLRAVMREYQVYGFEWMKTLAYYRFGGILADDMGLGKTLQSIAYIDSVLPEIREKKLPILVVSPSSLVYNWLSELKKFAPHIRAVIADGNQAERRKILKDVAEFDVVITSYPLLRRDIRSYARPFHTLFLDEAQAFKNPTTQTARAVKTIQAEYRFGLTGTPVENSLEELWSIFHVVFPELLPGRKEFGDLRREDIAKRVKPFVLRRLKEDVLKELPDKIEHLQSSELLPDQKRLYAAYLAKLREETLKHLDKDTLRKNKIRILAGLTRLRQICCHPALFVDDYKGSSAKFEQLLDILEECRSTGKRILIFSQFTKMLSIIGRELNRQAIPYFYLDGNTPSQERVELCNRFNEGEGDLFLISLKAGGTGLNLTGADTVILYDLWWNPAVEQQAADRAYRMGQKNTVQVIKLVAHGTIEEKMHELQESKKNLIAEVIEPGEEKLSSITEEEIRDILMI

SEQ ID NO: 14430 - protein, 272 aa, Synechocystis sp. PCC 6308
MKQYLRSSVLVIGGAEDKVHGKEILQRFWHCAGGTDAIIAIIPSASREPTIIGDRYVSIFSEMGAKDLKVLDVRDRIQGEDKDYQEYVEKCTAIFMTGGDQLRLCGLLADTPLMERIRQRVKLGEVTLGGTSAGAAVMGHHMIAGGSSGESPNRALVDMAMGLGIIPEVIVDQHFHNRNRMARLLSALSNHPERLGIGIDEDTCAVFQKDEYIEVIGKGTVTIVDGQAMSYTNHGKVAAEDPLALHNLRLHILGHGDRYNRKTHQPMAGIVE

SEQ ID NO: 14431 - protein, 91 aa, Salmonella enterica
SLAKNGTNLFSGDKYAGLSEQALYYIGGVIKHAKAINALANPTTNSYKRLVPGYEAPVMLAYSARNRSASIRIPVVASPKARRIEVRFPDP

SEQ ID NO: 14432 - protein, 678 aa, Crypthecodinium cohnii
GTSVDVLSFGKLSAWDTAPLFAMARLHWAGIFVLALACVAVAKDDEKKIDGPVIGIDLGTTYSCVGIYKNGRVEIIPNDQGNRITPSYVAFTEDERLIGEAAKNQATINPAQTLFDVKRLIGRRFKDSTVQKDIKLLPFDIVDKNGKPQISVKVKGETKQMAPEEVSSMVLTKMKETAENYLGKEVKHAVITVPAYFNDQQRQSTKDAGVIAGLNVLRIINEPTAAAIAYGLDKKAEKNILVYDLGGGTFDVSLLTIDNGVFEVVATNGDTHLGGEDFDQRVMQHFMKVFQKKHSKDMSKDKRAIQKLRREVEKAKRALSSTHQARLEIEALFDGVDFSETLTRARFEEINNDLFKNTLGPVKQVIEDSGLKKTQIDEIVLVGGSTRIPKVQQLIKDFFNGKEPNRGINPDEAVAYGAAVQAGILSGEGGQDLLLLDVTPLTLGIETVGGVMTKLINRNTVIPTKKSQTFSTYQDNQPAVNIQVFEGERPMTKDNHLLGKFELGGIPPAPRGQPQIEVTFEIDSNGILNVGAEDKATGKGEKITITNDKGRLTEEQIEKMIKEAEQFADEDKKVKERVDAKNSFDGYIHSMRSATEGSGDNKGLSEKMDEDEKEKILEALKDGQSWLDSNPEGDAEDIKEKHKEVEGICAPIVSKYYGVGGGGAGAADEDEDEAHDEL

SEQ ID NO: 14433 - protein, 442 aa, Fulvimarina pelagi HTCC2506
MGAAAVTVAGQSSGVANAAGSDTYRQLAIFGDVFERVRAQYVEEPNDQELVESAINGMLTSLDPHSSYMNAKEAQDMRSQTRGQFGGLGIQVTMKDEVVLVEGSPFAESPAEKAGILSGDLIVEIDGDQVRGLTLSEAVDKMKGEIGTDVKLTVVREGAEKPLRMTLTRDLITVESVKHEAIDDVGYIKVNSFNEQTTVGLEEAVREINAEVGDDLKGYVLDLRSNPGGLLDEAVSVSDAFLQKGEIVSTRGRNADETRRYNARSGDDIDGKPLVVLVNGGSASASEIVAGALQDQRRATVVGSRSFGKGSVQTIIPLGSAGAMRLTTALYYTPSGRSIQGRGIDPDIMVEQPLPDEIKRQMGLDPEEEISRGESSLRGHITGNEETDEGSGSSSYVPQDREEDLQLKYALDLLNGVETNAMFPPKEQAKVDTNSSADTAAN

SEQ ID NO: 14434 - protein, 325 aa, Sinorhizobium saheli
IAGWKAINESDMVLMPDPETAHMDPFFAQSTMVIFCDILDPVSGEAYNRDPRGTAKKAEAYLKASGIGDAVFVGPEAEFFVFDDVKYKADPYNTGFKLDCSELPSNDDTDYETGNLGHRPRIKGGYFPVPPVDSSQDMRSEMLTVLAEMGVTVEKHHHEVAAAQHELGVKFDALVRNADKMQIYKYVVHQVANAYGKTATFMPKPIFGDNGSGMHVHLSIWKDGRPTFAGDEYAGLSENCLFFIGGIIKHAKALNAFTNPSTNSYKRLVPGYEAPVLLAYSARNRSASCRIPFGSNPKAKRVEVRFPDPSANPYLAFAAMLMAGL

SEQ ID NO: 14435 - protein, 112 aa, Brassica napus
MASSMLSSAAVVTSPAQATMVAPFTGLKSSSAFPVTRKANNDITSIVSNGGRVSCMKVWPPVGKKKFETLSYLPDLTEVELGKEVDYLLRNKWDSLVFEFELEHGFGPWTEP

SEQ ID NO: 14436 - protein, 546 aa, Iris lactea
MGSGMEDLLVRLGVVSSTSDHASVVSINLFVALLCACIVIGHLLEENRWMNESITALAIGLCTGVVILLTTNGKSSHIFVFSEDLFFIYLLPPIIFNAGFQVKKKQFFRNFMTIMLFGAVGTLISFVIISLGAIGLFRKMNIGPLEIGDFLAIGAIFSATDSVCTLQILNQDETPLLYSLVFGEGVVNDATSVVLFNAIQNFDLEHIDAGIAAKFIGNFFYLFVSSTFLGAFAGLLSAYIIKKLYYGRHSTDREVALMMLMAYLSYMLAELLDLSGILTVFFCGIVMSHYTWHNVTESSRVTTKHAFATLSFISEIFLFLYVGMDALDIEKWRFVSDSPGKSIGVSAIIIGLVLIGRAAFVFPLSFLSNLAKKSPNEKITFNQQVTIWWAGLMRGAVSIALAYNQFTRAGHTQLPGNAMMITSTITVVLFSTVVFGLLTKPLIRLLLPPSTKHLTGSCSFNSEPSTPKFLSAALLENIPGFEAEGGTTNLGARPSSLRMLLMKPTHTVHYYWRKFDDAFMRPMFGGRGFVPFVPGSPTEQSVHGWE

SEQ ID NO: 14437 - protein, 537 aa, Oryza sativa Indica Group
MESRKPPPSALVDNHVVPGDVVLDLAEMTNQTIKLGAGLRQDCDTIQATSAGRLRLSKPSKYWVESSQKRYIPSVEDTVLGVVVDTKPDNFLVDIKGPNLAFLPVLAFEGGTRRNIPKFEIGTLIYARVVKANSIMNPELSCMDATGKAAEFGQLKDGYMFDTSTGLSRIIFEWHRATKYGGKSLGETILMGAVEECTHKQLPSLSDLCVTLGEFSHICLASRRLSPSQSGMTSATGVEKVEVWCQDLAMGGRRVEFNANKCGTHPTPSKPYYVDKIDTNEQKVVHYQVNCRPARDRNTGSYSVKHHYPSPIVSWIEDLSSFGNVSFSQDPEYADEQSRSSVGQSSASVNLHDMQISVRLTDEFIELAKENTGNNVETCGILGASFRDGTYYVTMLIIPKQEATAHSCQAVSEEEIHAILSEQSLYPAGWIHTHPSQTCFLSSIDLHTQYSYQVMLPEAVAIVIAPTDPTRQVFYGRNCGIFRLTDPGGMGVLRECSESGFHAHRETTDGGPIYETCSKVIFNPNLRFEIVDLRSAP

SEQ ID NO: 14438 - protein, 137 aa, Salmonella enterica
ATFMPKPMFGDNGSGMHGHMSLAKNGTNLFSGDKYAGLSEQALYYIGGVIKHAKAINALANPTTNSYKRLVPGYEAPVMLAYSARNRSASIRIPVVASPKARRIEVRFPDPAANPYLCFAALLMAGLDGIKNKIHPG

SEQ ID NO: 14439 - protein, 137 aa, Oryza sativa Japonica Group
MKKAIPANGKIAKDAKETVQECVSEFISFITSEASDKCQREKRKTINGDDLLWAMATLGFEDYIEPLKVYLQKYREMEGDSKLTAKAGDGSVKKDVLGSHGGSSSSAQGMGQQAAYNQGMGYMQPQDIFTGHVVRLV

SEQ ID NO: 14440 - protein, 641 aa, Frankia sp. CcI3
MAKAVGIDLGTTNSVIAAWEGGEPRVIPNAEGARTTPSVVAFTESGERLVGQLARRQAILNPKGTIYSAKRFIGRRYDEVTEEAKAVAFDVVPGPEGAARFRIRDKLYAPEEISALVLRKLADDAGRNLGEKVTEAVITVPAYFNDAQRTATKDAGRIAGLNVLRIINEPTAAALAYGLDKKGHETVLVFDLGGGTFDVSILDVGDGVVEVRATAGDSHLGGDDFDRRLVDYLADGFHREQGIDLRRDPQALQRLFEAAEKAKVELSAVTQTQVNLPFITADATGPRHLTATVMRSTFEQITADLVERTMGPVRQAMEDSKISADDLDEVILVGGATRMPAVQALVRRLTGGKEPNMSVNPDEVVALGAAIQAGVLKGEVSDVLLLDVTPLSLGVETRGGLMTKIVERNTTIPVRRSEVFSTAEDNQPAVDIVVLQGERERAADNRVLGRFRLENIRPAPRGEPQVEVTFDIDANGILNVTARDKDTGAQQSITISETSNLPKEEVERMITEAERNRTTDQALRAAIDARNELDSVAYRVERLLAELGDAAPPHEKARADLLVADARQAIKEEAPVDRVRALTSDLQQIYHGLAAARTGQAAPTEGTGGSPTDTAPGGPQPPPGGGTPGGDDVVDAEFDRG

SEQ ID NO: 14441 - protein, 146 aa, Phaseolus vulgaris
MGAFTEKQEALVNSSWEAFKGNIPQYSVVFYTSILEKAPAAKNLFSFLANGVDPTNPKLTAHAESLFGLVRDSAAQLRANGAVVADAALGSIHSQKGVNDSQFLVVKEALLKTLKEAVGDKWTDELSTALELAYDELAAAIKKAYA

SEQ ID NO: 14442 - protein, 161 aa, Brassica napus
MGEIVFTEKQEALVKESWEILKQDIPKYSLHFFSQILEIAPAAKDMFSFLRDTDEVPHNNPKLKAHAVKVFKMTCETAIQLREKGKVVVADTTLQYLGSVHLKSGVLDPHFEVVKEALVRTLKEGLGEKYNEEVEGAWSKAYDHLALAIKAEMKQEDSQKP

SEQ ID NO: 14443 - protein, 1442 aa, Mougeotia scalaris; identical to SEQ ID NO: 7535

SEQ ID NO: 14444 - protein, 283 aa, Prochlorococcus marinus str. MIT 9312
MTHISTWIDEYHKGSRFGLNGEILIKQNSKYQEIIVIENEYYGRALMLDGCWMTSLKDEKYYHECLVHPALSSIDEKSNVLIIGGGDGGTARECVKYPQISKIDLVEIDEEVIKISKKFLKEIGGEAWSDKRLKIHIDDGVQWVKKTRDNFYDVIFIDCSDPSELSNLLFSDSFYRECKRILTKNGILATQSESPESFKNIHISILKTLKKFFRVSETMYSFVPIYPSGIWSWTFASEEVLHLSKRNCNEALRIEKSCEIWNLNFQNAAFKMMPNKIVKELNS

SEQ ID NO: 14445 - protein, 544 aa, Robiginitalea biformata HTCC2501
MKQLLKTKVVVPVLAIGLFLTTTAFKSDFFEIAKQIEIFTTLFKELNMNYVDETNPAELMDSAIKNMLEELDPYTVFLNEQDVEAYKINNAGEYSGIGALVRSYEDRLVIVEPYKGYPADRAGLKAGDEIVTIGDISVADFKDDAAELLKGANNSSVSVSFLRQGKLQSTTVERSAIEVDAVPFYRMADDKTGYIVLSRFNSKASSQTEEALLDLKEQGAERIILDLRGNPGGLLSEAINVTNLFVPKGELIVTTKSKVAKFNQEYETRKRPVDTEIPLAILVDGQSASASEIVSGGLQDLDRAVIIGARSFGKGLVQRPLKLTYGTQLKVTISRYYTPSGRCIQALDYWNRDESGNAVRNTEFQEFKTRNGRKVTDGGGVQPDIPIDELKSNELIRALVQNHVIFDFATKYYYDHTLDNPAEFELTPAVYQEFTDHVTGSSFSFETRTEKALEKALTDREEVIFTETIENDFKTLLADIEKSKLRALDTYSDEITRQLEDEIIKRYFYREGLYEYYLEKDAAILTAREVLGQPRRYSEILQGP

SEQ ID NO: 14446 - protein, 429 aa, Prochlorococcus marinus str. MIT 9515
MNSSFNKFLIFKRWIIIIMICIFSTNFLHIQSVNALSDSRQFVLDAWTLINEGYYDPERLDEIQWKRIRQKTLQKQIETSDEAYSAIEDMLKPLEDPFTRILRPKDYELLKTSNFGSEINGVGLQLGKDEMTKKIKVISTLAGSPAEEAGIISGDVIDKVDGISSSELGLANTASKLRGESGTKVLVQITSMSDEIKEIDLERRSVDLRPVRTKRLRDDSHTIGYLRITQFSESVPKKIEEALEELKDKEVEGIILDLRNNSGGLVSSGIAVADSFLSEQPIVETKDRNGIKDAIISQKKTYFDGPMVTLVNKGTASASEILAGSLQDNERSTLIGEQTYGKGLIQSLKSLGDDSGIAITVASYLTPKGNNIQGTGITPDKLLDLPEAREYGNSEDKWVKNAEIYLNSLFDKNEVEETVNQLEKKDPEH

SEQ ID NO: 14447 - protein, 223 aa, Leptopus colchicus; identical to SEQ ID NO: 7539

SEQ ID NO: 14448 - protein, 208 aa, Margaritaria cyanosperma; identical to SEQ ID NO: 7541

SEQ ID NO: 14449 - protein, 474 aa, Magnaporthe grisea 70-15
MARSRAKRRTHAGAKNPNQQKGPINTGNASIRDPKSMVIRIGAGEVGSSVSQLATDVRRVMEPGTASRLKERRANKLRDYLVMCGPLGVTHLLLFSRSESGNVNLRVALTPRGPTLHFRVEKYSLTKDVQKSQRRPKGQGKEFVTSPLLVMNNFSSSSADAPSKTPKHLESLTTTVFQSLFAPINPQKTSLKSIRRVLLMNREQSKEMDGSFIIDFRHYAITTKPTGISKPLKRLNAAEKLLSGKTGKKGGLPNLNKLQDIADYMIGGEDGSGYMTDGGTSGSEAETDAEVEVLEPTSRKVLNAKARAAMREAENGDEGSQAGTEQQNVEKRAVKLAELGPRMRLRLLKVEEGVCAGKVMWHEYINKSKEEIKAMEKKWEQKQREKEARKKVQKENVERKRKEKEEQKKNSKKSGENADGDDDDEDEMDVDYDSDDYEFDSEGMAGDAETLVNEKAEEDGEWEDEEEEIAAGAG

SEQ ID NO: 14450 - protein, 224 aa, Petalodiscus fadenii; identical to SEQ ID NO: 7544

SEQ ID NO: 14451 - protein, 211 aa, delta proteobacterium MLMS-1
FQDEQQIKGLILDLRNNPGGLLDQAVQLSDVFLEEGIIVSTKGRIQEQNMVFEAKKDALEIDFPVVVLVNEGSASASEIVAGALQDHQRAMVIGAPTFGKGSVQTIIPLDDGSGLRLTTARYYTPSGISIQAKGIVPDLEVQSELHDPDEQDEQEQPPHGFFREQDLPRHLENDQEREISEEERRLREQLARDRQLQAGLLLLKGLEVFKR

SEQ ID NO: 14452 - protein, 368 aa, Ranunculus sp. Qiu 95024; identical to SEQ ID NO: 7546

SEQ ID NO: 14453 - protein, 385 aa, Lactococcus lactis subsp. lactis Il1403
MKKAVHFGAGNIGRGFIGEILSKNGFDIHFVDTNKSIIAELNNRHSYEIGIASSEHEKISVKAVSGINNSENPEAVIEAIAKADILTTAIGPNVLPYIAELIAKGLQKRKEEKVQSPLDIIACENMIGGSEFLEEKVSDYLSESDKLYLSKFIGFPNAAVDRIVPAQKHKDVLYVEVEPFSEWVIDASHLKNKEIKLEGVHYTTDLEPFIERKLFSVNSGHAAVAYSSAYKGYKTILEGLQDEEILNILKAVQKETRALLLAKWAQYFKQDELIKYHELIISRFSNPEIIDEVSRVARTPIRKLGYDERFIRPIRELNDRKLSYQNHLDIVGKIFAYHDENDAQAIQLQEKLKITELPMLIEEVTGLSNQKLILEIEKVINHYKK

SEQ ID NO: 14454 - protein, 250 aa, Oryza sativa
MEPAFPNGGAAAPPPPMAAEQLPPAAAVVREQDRLMPIANVIRIMRRVLPPHAKISDDAKEVIQECVSEFISFVTGEANDRCHREHRKTVTAEDLVWAMDRLGFDDYVPPLTAYLRRMREYEGGGSGGGGGGGRGAAAAPAVVPPPPPPPPEDAFRYVQVHHPVYAAPGEPVQGYGYPVAMSSALPAPHVHVGVRGGGQHEVFGGGPAPLAVYYGGAPYGEASSRGGCSAADEGSSSSSASPAPVGPNYE

SEQ ID NO: 14455 - protein, 811 aa, Oryza sativa Japonica Group
MVVAVANGTKVEAAPAAGAGAAANADSPTSVLEDEKISECKNGDASDTVEAIKQEDDHLKVLAEERADDFVDASSSLTVELAANNGDLSPHPVPVKEEDQLLEPVKEEKADDFVDATSSLPIDLEAKNGDASLITDAMKEEEDKLHEARVKADEEEEARKRAEAARLAFDPNARFNKLDELLTQTQLYSEFLLEKMETIADVEGVDTPDEEEPVEEKKKGRGRKRKATSAPKYNNKKAKKAVAAMLTRSREDCSPEDCTLTEEERWEKEQARLVPLMTGGKLKSYQIKGVKWLISLWQNGLNGILADQMGLGKTIQTIGFLAHLKGKGLDGPYLIIAPLSTLSNWVNEISRFVPSMTGVIYHGDKAARAEIRRKFMPKTTGPNFPLIVTSYEMAMSDAKQLAHYKWKYVIVDEGHRLKNSKCILLRELKRLPMDNKLLLTGTPLQNNLAELWSLLNFILPDIFSSHQEFESWFDFCAKGGEEEQEESEEKRKVDVVSKLHAILRPFLLRRMKEDVEHMLPRKKEIIIYANMTNHQKEIQNHLVEQTFDEYLHEKSEIGMYPPVEKLLEQCGKFQLLNRLLNLLLARKHKVLIFSQWTKVLDIIEYYLETKGLQVCRIDGSVKLEERRRQIAEFNDLNSSMNIFILSTRAGGLGINLTSADTCILYDSDWNPQMDLQAMDRCHRIGQTRPVHVYRLATSHSVEGRIIKKAFGKLRLEHVVIGKGQFEQDRAKPNALDEAELLALLRDEQDEEDRMIQTDITDEDLLKVMDRSDLTGPPANADAAPLVPLKGPGWEVVVPTKSGGGMLTSLTS

SEQ ID NO: 14456 - protein, 767 aa, Arabidopsis thaliana
MAFTFLSPHPVFLSLTGTTSSFSYKPVLLPFSRNSRTLTVAAGPARRNSYPNPADDDPPEAPEDSMHGVSKFQQIQRQAARARKLEEEDFEKNRNTYLSAIADVEDAAETGRDDEESGGDLFSDIDRAISMKRSEFVKQGLLKPNPPKTASLKKIGEEGNEEEGDVTDDVDELDEEEVVDLDEIDKLTGLTEISDEEDWVDEEGNTRINKKKEFGSDHQFEFDLDDFGESKARIVEPKFKMCLAELLDESKVVPISVYGDLDVEITGIQHDSRGVSAGDLFVCCLGSENFLSEADKRGAVAVVASKEIDIEDTLGCRALVIVEDTNAVLAALASSFYRHPSKNMSVIGVTGTDGKTTTTYLIKSLYEAMGVRTGMFSTVSCYIHGDNKLDTPNATMNPDAVLVQSLMAKMLHNGTESLVMEASPQELALGKCDEVDFDIAVFTNLTRENTDFRGTDEEYRDAEAKLFSRMVDPERHRKVVNIDDPNAAFFVQQGNPNVPVVTFAMENTKADVHPLKFELSLFETQVLVNTPQGILEISSGLLGRHNIYNILAAVAVGIAVGAPLEDIVRGVEEVDAVPGRCELIDEEQAFGVIVDHANTPDGLSRLLDSIRELKPRRIITVIGCEGENERGKRPLMTKIATEKSDVTMLTSDNPRNEDPLDILDDMLSGIGWTMQEYLKHGEHDYYPPLANGHRLFLHDIRRVAVRCAVAMGEEGDMVVVAGKGHEAYQLEGEKKEFYDDREECREALQYVDELHQAGIDTSEFPWR

SEQ ID NO: 14457 - protein, 371 aa, Reinwardtia indica; identical to SEQ ID NO: 7547

SEQ ID NO: 14458 - protein, 674 aa, Gibberella zeae PH-1
MAGGGGPSSGTVEPPLSQAYGYGIVLGIGFLFALGMIFTTYVLKKYNHEKQTSEMFNTAGRTVKSGLVASAVVSSWTWAATLLQSSGVAYRYGVSGPFWYASGATVQIILFATIAIELKRRAPNAHTFLEVIRARYGRITHCVYICFCLFTNILVTAMLLTGGSAVVTSLTGMHTAAACFLLPLGVVIYTMFGGIKATFLTDYVHTVIILVIILIFALTAYATGTELGSPSAVYDALSKAAKNHPVEGNAEGSYLTMRSREGIIFFVINIVGNFGTVFCDNGYYNKAIAAHPVAALPGYIIGGLSWFAIPWLCATTMGLSALALETSPSFPSYPNRMDPADVSAGLVLPYAAVALLGKSGAIITLIMIFMAVTSAASAQLISVSSIFTYDIYQTYVNPQASGKRLIAISHTTVVMYGLIMASFSVGLHYIGISMGWLYVWMGVMISAAVIPATLTLLWSRQNWIAAAVSPILGLVCALIAWTVTCSREFDGVLSVDNLGSNNPMLAGNVVALLSPVIFVPVLTFGFGADKYDWASMASIKQADDATDSNGDSETAVATSFAVAPEEDMAKLNKASKIAKTMTVCMTVALLILWPMPMYGSGYVFSKPFFTGWVTVGIIWLFGSSIAVGLFPLWEGRQSIVRVTKGMFGMGGKHDTEEIQGQSVKEEKIEEFDKQ

SEQ ID NO: 14459 - protein, 363 aa, Sabia swinhoei; identical to SEQ ID NO: 7549

SEQ ID NO: 14460 - protein, 1486 aa, Mougeotia scalaris; identical to SEQ ID NO: 7550

SEQ ID NO: 14461 - protein, 231 aa, Arabidopsis thaliana; identical to SEQ ID NO: 13568

SEQ ID NO: 14462 - protein, 368 aa, Sapria himalayana; identical to SEQ ID NO: 7552

SEQ ID NO: 14463 - protein, 1442 aa, Mougeotia scalaris; identical to SEQ ID NO: 7553

SEQ ID NO: 14464 - protein, 125 aa, Salmonella enterica
MSLAKNGTNLFSGDKYAGLSEQALYYIGGVIKHAKAINALANPTTNSYKRLVPGYEAPVMLAYSARNRCASIRIPVVASPKARRIEVRFPDPAANPYLCFAALLMAGLDGIKNKIHPGEAMDKNL

SEQ ID NO: 14465 - protein, 98 aa, Salmonella enterica
SEQALYYIGGVIKHAKAINALANPTTNSYKRLVPGYEAPVMLAYSARNRSASIRIPVVASPKARRIEVRFPDPAANPYLCFAALLMAGLDGIKNKIHP

SEQ ID NO: 14466 - protein, 325 aa, Sinorhizobium kostiense
IAGWKAINESDMVLMPDPETAHMDPFFAQSTMVIICDILDPVSGEAYNRDPRGTAKKAEAYLKASGVGDTIFVGPEAEFFVFDDVKYKADPYNTGFKLDSSELPSNDDTDYETGNLGHRPRIKGGYFPVPPVDSVQDMRSEMLTVLTEMGVTVEKHHHEVAAAQHELGVKFDTLVRNADKMQIYKYVVHQVANAYGKTATFMPKPVFGDNGSGMHVHMSIWKDGRPTFAGDEYAGLSETCLYFIGGIIKHAKAINAFTNPSTNSYKRLVPGYEAPVLLAYSARNRSASCRIPFGSNPKAKRVEIRFPDPSANAYLAFAAMLMAGL

SEQ ID NO: 14467 - protein, 86 aa, Zea mays
MEVGDARNGSAAAALTKGGKTSKVQYFNNPMWPGEAHSLKVEKILFQGKSPYQEILVFESSTYGNVLVLDGIVQLTDKDECAYQEM

SEQ ID NO: 14468 - protein, 130 aa, Salmonella enterica
MFGDNGSGMHCHMSLAKNGTNLFSGDKYAGLSEQALYYIGGVIKHAKAINALANPTTNSYKRLVPGYEAPVMLAYSARNRSASIRIPVVASPKARRIEVRFPDPAANPYLCFAALLMAGLDGIKNKIHPG

SEQ ID NO: 14469 - protein, 1124 aa, Mougeotia scalaris; identical to SEQ ID NO: 7560

SEQ ID NO: 14470 - protein, 157 aa, Oceanobacillus iheyensis HTE831
MSIYEYQVEKSNGEEISLSQYQDNVLLIVNTATKCGFANQFEGLEELHQKYQDEGLRVLGFPSNQFNEQEPVDDENMEEACKVNFGVTFPLFKKIDVKGPNAAPLFKYLTEEQKGLLGSNVKWNFTKFLVDRNGNVVKRFAPKDKPAKIEDDIKALL

SEQ ID NO: 14471 - protein, 159 aa, Prochlorococcus marinus subsp. marinus str. CCMP1375
MLINVKETVVETADGEKKNLGDYLGNVLLIVNVASLCGNTPQYKGLEKLFEKYKKNGFCVLAFPCNDFAGQEPGTIEEIKEFCSVKYGTTFEIFNKVHAKGLTTEPYTTLNKVEPKGDVSWNFEKFLVGKDGNVIARFEPSVEPSSEELITAIEVALSS

SEQ ID NO: 14472 - protein, 636 aa, Oryza sativa
MFNGNDYKDRTGCSNICLDDDILDPSLLANLAPELSELKNSGSVWSAISDLDPKLLPHQRKALDFLWKNLAGSIQVEGMDNSNVSTGGCVIAHTPGSGKTLLLISFLVSYMKAHPRSRPLVLTPKAAIHTWKREFEKWGISLPLHVFHHANRSGKPLGAMDSKLRSLLNNFHRPTWTNMRLMDSLDKLFKWHAHPSVLLMTYSSFLGMTKQDSKVRNRYREFIAEVLMNNPGLLILDEGHNPRSNKSKLRKLLMKVKTEFRILLSGTAFQNNFEEYFNTLCLARPRFIGDIMSELVPERKRETVGRRAKHQEAVARRAFVEKVGQKIESDNKHIRSDGISLLNKLTRGFIDSFEGAKLINLPGIHVYTVFMKPTDIQEEMLAKVTMPKLGSSRFPLEVELLITIGSIHPWLIKTTKAVSTFFSPAEVKKVERYKRDFAAGCKAKFVIDLLHKSSFRGERVLIFCHNVSPITFLVKLIEMVFGWRLGEEVLVLQGDQELPVRSDVMDKFNGDSAGKRKVLIASTTACAEGISLTGASRLVMLDSEWNHSKTRQAIARAFRRGQERTVYVYLLVASGTWEEEKYNSNRRKAWMSKMVFLGRYVDDSSQNRVTDIDDEVLKELADEDHTGTFHMIVKQD

SEQ ID NO: 14473 - protein, 474 aa, Nostoc sp. PCC 7120
MTTPQEVLKRIQDEKIELIDLKFIDTVGTWQHLTLYQNQIDESSFSDGVPFDGSSIRGWKAINESDMTMVLDPNTAWIDPFMEVPTLSIVCSIKEPRTGEWYNRCPRVIAQKAIDYLVSTGIGDTAFFGPEAEFFIFDSARFAQNANEGYYFLDSVEGAWNSGKEGTADKPNLAYKPRFKEGYFPVSPTDSFQDIRTEMLLTMAKLGVPIEKHHHEVATGGQCELGFRFGKLIEAADWLMIYKYVIKNVAKKYGKTVTFMPKPIFGDNGSGMHCHQSIWKDGKPLFAGDQYAGLSEMGLYYIGGLLKHAPALLAITNPSTNSYKRLVPGYEAPVNLAYSQGNRSASIRIPLSGTNPKAKRLEFRCPDATSNPYLAFAAMLCAGIDGIKNKIHPGEPLDKNIYELSPEELAKVPSTPGSLELALEALENDHAFLTDTGVFTEDFIQNWIDYKLANEVKQMQLRPHPYEFSIYYDV

SEQ ID NO: 14474 - protein, 124 aa, Salmonella enterica
SGMHCHMSLAKNGTNLFSGDKYAGLSEQALYYIGGVIKHAKAINALANPTTNSYKRLVPGYEAPVMLAYSARNRSASIRIPVVASPKARRIEVRFPDPAANPYLCFAALLMAGLDGIKNKIHPG

SEQ ID NO: 14475 - protein, 325 aa, Sinorhizobium fredii
IAGWKAINESDMVLMPDPETAHMDPFFAQSTMVIVCDILDPVSGEAYNRDPRGTAKKAEAYLKASGIGDTVFVGPEAEFFVFDDVKYKADPYNTGFKLDSSELPSNDDTDYETGNLGHRPRIKGGYFPVPPVDSCQDMRSEMLTVLAEMGVTVEKHHHEVAAAQHELGVKFDALVRNADKMQIYKYVVHQVANAYGKTATFMPKPVFGDNGSGMHVHLSIWKDGKPTFAGDEYAGLSETCLYFIGGIIKHAKALNAFTNPSTNSYKRLVPGYEAPVLLAYSARNRSASCRIPFGSNPKAKRVEVRFPDPTANPYLAFAAMLMAGL

SEQ ID NO: 14476 - protein, 195 aa, Torreya nucifera; identical to SEQ ID NO: 7566

SEQ ID NO: 14477 - protein, 607 aa, Leptospira interrogans serovar Lai str. 56601
MSLKKGSTAFSLLLSTLLAIFILFCEPTSGKSPVKADFTLKDFDNVVSHVSRYYIDKNIDKNRAYREAAIYALLSLPHSIYLYPESYFKERDKYEEKDEIFPGKTFKISTDDSFILFDPDYAEVEKIRDRKLKEDANKSKVSDEEVKKIVEREKIRKNVLASKWERTGFNKKDFDRVLAFIETNLDKYKDSPLKDPFGESEEKSKEPFTMNDVMLAAANGYLSSLDPHSNVFLRSAWEESMAKIQDGSFEGIGAILSGGGNKEVVVENPLEGRPAVNAGIRSGDVILAVDGKSIKGILLDKVVEKIKGKKGSKVALTIQRKGVPGTLHIEVVRDTIEIKNLSSKLIEGHEHIGYIKLTGFVKSEEGPSVDREIIEKYKELDKEAQAKGTRLKALILDLRNNAGGYLDLAIDIADMFIEKGLIVSTKSPNRSPEDAYAKNKDITNLPLAVLINAKSASASEIVASAIKHHGRGILLGERTFGKATVQKLMPLGNDYLIKLTQARYYSPSGNTIQVVGVKPDIDISSEEDGSFPFRFREENMWNHLSELPPEAEEKSSFDVKKLEAWVQKNGKASDFIASHKNDPIKPDYQLIRSLDYIEALLSTQKKK

SEQ ID NO: 14478 - protein, 382 aa, Shigella flexneri 2a str. 2457T
MKALHFGAGNIGRGFIGKLLADAGIQLTFADVNQVVLDALNARHSYQVHVVGETEQVDTVSGVNAVSSIGDDVVDLIAQVDLVTTAVGPVVLERIAPAIAKGLVKRKEQGNESPLNIIACENMVRGTTQLKGHVMNALPEDAKAWVEEHVGFVDSAVDRIVPPSASATNDPLEVTVETFSEWIVDKTQFKGALPNIPGMELTDNLMAFVERKLFTLNTGHAITAYLGKLAGHQTIRDAILDEKIRAVVKGAMEESGAVLIKRYGFDADKHAAYIQKILGRFENPYLKDDVERVGRQPLRKLSAGDRLIKPLLGTLEYSLPHKNLIQGIAGAMHFRSEDDPQAQELAALIADKGPQAALAQISGLDANSEVVSEAVTAYKAMQ

SEQ ID NO: 14479 - protein, 216 aa, Brassica napus
  misc_feature (156)..(156): Xaa can be any naturally occurring amino acid
RPTRPSVSDSPGTSVAVSSILIGLLMLGRAAFVFPLSFLSNLAKKNQSEKIDFKMQVVIWWSGLMRGAVSMALAYNKFTRAGKTDLRGNAIMITSTITVCLFSTVVFGMLTKPLIRFLLPHQKATTSFLSDGNTPKSIQIPLIDQDSFIEFAGNHXNVPRPDSIRGFLTRPTRTVHYYWRQFDDSFMRPVFGGRGFVPFVPGSPTEREPPTDLSRA

SEQ ID NO: 14480 - protein, 455 aa, Mesorhizobium sp. BNC1
MSGYSFEDLKADVSAGRIDTVIACQVDMQGRLMGKRFHAQFFIDGGYTETHSCNYLLATDLEMETVPGYKATSWQAGYGDYVMKPDLSTLRRVPWLEATAMVLCDVLDHHSHREVSHSPRAVLKGQIARLEAMGFQAFMATELEFFLFNQSYEEAREQGYRGLRTVGGYNEDYHIFQTTKEEDVMRAIRNGLQGAGIPVENTKGEASAGQGEVNVRYADALTMADRHVIIKNACKEIAWSRGKSITFLAKWNANAAGSSSHIHQSLWSADGKTPMFLDEGAEFGMSSLMRHYVAGLLAHASEITAFLAPYVNSYKRFVAGTFAPTKAVWSRDNRTAGYRLCGEGTKGIRIECRVGGSDLNPYLAMAALIAAGIDGIERELPLEAPFVGDAYGGTQVREIPKTLREATVALDESSLLRSAFGDEVVDHYVRAARWEQEVADKLIADWEIARGFERC

SEQ ID NO: 14481 - protein, 635 aa, Pectobacterium atrosepticum SCRI1043
MGKIIGIDLGTTNSCVAIIDGTQVKVLENSEGDRTTPSIIAYTQDGEILVGQPAKRQAVTNPQNTLFAIKRLIGRRFKDEEVQRDSNIMPYKIVAADNGDAWLEVKDQKMAPPQISAEVLKKMKKTAEDYLGETITEAVITVPAYFNDAQRQATKDAGRIAGLEVKRIINEPTAAALAYGLDKEVGNRTIAVYDLGGGTFDISIIEIDEVDGEKTFEVLATNGDTHLGGEDFDNRMINYLVDEFKKEQGFDLRNDPLAMQRLKEAAEKAKIELSSAQQTDVNLPYITADATGPKHLNIKVTRAKLESLVEELVNRSLEPLKVALQDAGLSVSEIQDVILVGGQTRMPLVQKKVADFFGKEPRKDVNPDEAVAIGAAVQGGVLSGDVKDVLLLDVSPLSLGIETMGGVMTALIAKNTTIPTKHSQVFSTAEDNQSAVTIHVLQGERKRAHDNKSLGQFNLDGIQAAPRGMPQIEVTFDIDADGILHVSAKDKNSGREQKITIKASSGLNEEEIQKMVRDAEANAEADRKFEELVQARNQGDHLLHSTRKQLEEVGDKLAADDKTAIDDALKALESALKGEDKAEIEAKIQALVQVSGKLLEASQPQPGAEGAADDASARRDDDVVDAEFEEVKDKK

SEQ ID NO: 14482 - protein, 451 aa, Neisseria gonorrhoeae
RFVDLRFTDTKGKQHHFTVPARIVLEGPEEWFENGQAFDGSSIGGWKGIEASDMQLRPDASTAFVDPFYDDVTVVITCDVIDPADGQGYDRDPRSIARRAEAYLKSSGIGDTAYFGPEPEFFVFDGVEFETDMHKTRYEITSESGAWASGLHMDGQNTGHRPAVKGGYAPVAPIDCGQDLRSAMVNILEGLGIEVEVHHSEVGTGSQMEIGTRFATLVKRADQTQDMKYVIQNVAHNFGKTATFMPKPIMGDNGSGMHVHQSIWKDGQNLFAGDGYAGLSDTALYYIGGIIKHAKALNAITNPSTNSYKRLVPHFEAPTKLAYSAKNRSASIRIPSVNSSKARRIEARFPDPTANPYLAFAALLMAGLDGIQNKIHPGDPADKNLYDLPPEEDALVPTVCASLEEALAALKADHEFLLRGGVFSKDWIDSYIAFKEEDVRRIRMAPHPLEF

SEQ ID NO: 14483 - protein, 365 aa, Sapria himalayana; identical to SEQ ID NO: 7578

SEQ ID NO: 14484 - protein, 1085 aa, Saccharomyces cerevisiae
MEDKEQQDNAKLENNESLKDLGVNVLSQSSLEEKIANDVTNFSNLQSLQQEETRLERSKTALQRYVNKKNHLTRKLNNTTRISVKQNLRDQIKNLQSDDIERVLKDIDDIQSRIKELKEQVDQGAENKGSKEGLQRPGETEKEFLIRTGKITAFGHKAGFSLDTANREYAKNDEQKDEDFEMATEQMVENLTDEDDNLSDQDYQMSGKESEDDEEEENDDKILKELEDLRFRGQPGEAKDDGDELYYQERLKKWVKQRSCGSQRSSDLPEWRRPHPNIPDAKLNSQFKIPGEIYSLLFNYQKTCVQWLYELYQQNCGGIIGDEMGLGKTIQVIAFIAALHHSGLLTGPVLIVCPATVMKQWCNEFQHWWPPLRTVILHSMGSGMASDQKFKMDENDLENLIMNSKPSDFSYEDWKNSTRTKKALESSYHLDKLIDKVVTDGHILITTYVGLRIHSDKLLKVKWQYAVLDEGHKIRNPDSEISLTCKKLKTHNRIILSGTPIQNNLTELWSLFDFIFPGKLGTLPVFQQQFVIPINIGGYANATNIQVQTGYKCAVALRDLISPYLLRRVKADVAKDLPQKKEMVLFCKLTKYQRSKYLEFLHSSDLNQIQNGKRNVLFGIDILRKICNHPDLLDRDTKRHNPDYGDPKRSGKMQVVKQLLLLWHKQGYKALLFTQSRQMLDILEEFISTKDPDLSHLNYLRMDGTTNIKGRQSLVDRFNNESFDVFLLTTRVGGLGVNLTGANRIIIFDPDWNPSTDMQARERAWRIGQKREVSIYRLMVGGSIEEKIYHRQIFKQFLTNRILTDPKQKRFFKIHELHDLFSLGGENGYSTEELNEEVQKHTENLKNSKSEESDDFEQLVNLSGVSKLESFYNGKEKKENSKTEDDRLIEGLLGGESNLETVMSHDSVVNSHAGSSSSNIITKEASRVAIEAVNALRKSRKKITKQYEIGTPTWTGRFGKAGKIRKRDPLKNKLTGSAAILGNITKSQKEASKEARQENYDDGITFARSKEINSNTKTLENIRAYLQKQNNFFSSSVSILNSIGVSLSDKEDVIKVRALLKTIAQFDKERKGWVLDEEFRNNNAS

SEQ ID NO: 14485 - protein, 473 aa, Synechococcus elongatus PCC 7942
MPETAQEVLQLIQEKGIQLVDLKFIDMPGIWQHLTLHVSQIDENSFVEGVPFDGSSIRGWKAINESDMTMVPDPTTAWIDPFMKEPTLSMICTIYEPRTNTPYERCPRAIAQKAVDCLKASGIGDTAYFGPEAEFFIFDDVRFDQAENKSYYYVDSIEGRWNSGREEEGGNLGYKPRYKEGYFPVAPTDTSQDMRSEMLLTMADCGVPIEKHHHEVATGGQCELGFRFGKLIEAADWLMTYKYVIKNVGRRYGKTITFMPKLLFNDNGSGMHTHQSIWNDGQPLFAGDQYAGLSQMALWYIGGILKHAPALLALTNPTTNSYKRLVPGFEAPVNLAYSQGNRSASVRIPLSGTNPKAKRLEFRCPDATSNPYLAFAAMLCAGIDGIKNQIDLGEPLDVDIYDLSPEELAKIPSTPGSLKDALKALEADHDFLTVGGVFTEDFIQNWIEYKLDNEVIPISLRPHPYEFALYYDC

SEQ ID NO: 14486 - protein, 493 aa, Staphylococcus aureus subsp. aureus COL
MDASTLFKKVKVKRVLGSLEQQIDDITTDSRTAREGSIFVASVGYTVDSHKFCQNVADQGCKLVVVNKEQSLPANVTQVVVPDTLRVASILAHTLYDYPSHQLVTFGVTGTNGKTSIATMIHLIQRKLQKNSAYLGTNGFQINETKTKGANTTPETVSLTKKIKEAVDAGAESMTLEVSSHGLVLGRLRGVEFDVAIFSNLTQDHLDFHGTMEAYGHAKSLLFSQLGEDLSKEKYVVLNNDDSFSEYLRTVTPYEVFSYGIDEEAQFMAKNIQESLQGVSFDFVTPFGTYPVKSPYVGKFNISNIMAAMIAVWSKGTSLETIIKAVENLEPVEGRLEVLDPSLPIDLIIDYAHTADGMNKLIDAVQPFVKQKLIFLVGMAGERDLTKTPEMGRVACRADYVIFTPDNPANDDPKMLTAELAKGATHQNYIEFDDRAEGIKHAIDIAEPGDTVVLASKGREPYQIMPGHIKVPHRDDLIGLEAAYKKFGGGPVD

SEQ ID NO: 14487 - protein, 183 aa, Fusobacterium nucleatum subsp. vincentii ATCC 49256
MKIYDFSVKNRKDEDISLKSYKGKVLLIVNTATRCGFTPQYDELENLYEKYNKEGFEVLDFPCNQFGNQAPESDEEIHTFCQLNYKVKFDQFAKVEVNGENALPLFQYLKEQKGFSGFDPKHKLTSVLTEMLSKNDPDFAKKSDIKWNFTKFLVDKSGNVVARFEPTTSVKVIEQEIKKLLEK

SEQ ID NO: 14488 - protein, 623 aa, Clavibacter michiganensis subsp. sepedonicus
MARAVGIDLGTTNSVVSVLEGGEPTVIANAEGARTTPSVVAFTKDGEVLVGETAKRQNVTNVDRTISSVKRHMGTDWTVGIDDKKYTSQELSARILGKLKRDAEQYLGDSVTDAVITVPAYFNDAERQATKEAGEIAGLNVLRIINEPTAAALAYGLDRGKEDELILVFDLGGGTFDVSLLEVGKDDDFSTIQVRSTAGDNRLGGDDWDQRIVDHLVKRFKESTGVDVSNDKIAKQRLKEAAEQAKKELSSSTSTSIQLPYLSLTENGPANLDETLTRAKFEELTNDLLERTRKPFEDVIREAGVSVGDVAHVVLVGGSTRMPAVVDLVKKLTGGKEPNKGVNPDEVVAVGAALQAGVLKGERKDVLLIDVTPLSLGIETKGGIMTKLIERNTAIPTKRSETFTTADDNQPSVAIQVFQGEREFTRDNKNLGTFELTGIAPAPRGIPQVEVTFDIDANGIVHVSAKDKGTGKEQSMTITGGSSLAKEDIERMVREAEEHAAEDKTRREQAEVRNNAEQLAYSIDKLIKENDDKLPEDVKSEVQGDVDGLKSALAGDDETAVKTAFDKLSASQTKLGEAIYAQGQQEQAAGEAPEGASEAKKDDEDIVDAEVVDEDDEDKKTDR

SEQ ID NO: 14489 - protein, 207 aa, Tetrastigma hypoglaucum
RFLFMKNKVRMICDCLAQPVKVIQDKKSAQPLSLCGSTLRSPHGCHAQYMSNMGSIASLVMSVTINEEDDDTESEQYRSRKLWGLVVCHHASPRFVPFPLRYACEFLVQVFGVQISKEMELAAQMKEKHILQTQTVLCDMLLRDAPVGIVTQSPNVMDLVRCDGAALYYQKKFWLLGVTPTEAQIRDIVEWLLEYHSGSTGLSTDSL

SEQ ID NO: 14490 - protein, 222 aa, Pseudomonas wisconsinensis
MSIRRLACSLLLSSLALPVLAAECPAMLQGELPKLRAKGENIELCQYAGKPLVVVNTASFCGFTPQFKGLEALYQRYKDQELEVLGVPSDDFRQESADSKETATVCYVNYGVTFAMTEPQPVSGANAIPLFKGLAEQSRQPRWNFFKYVVDRQGKVVASFSSLTKPDDPELIAARREGDRLATLIPSRFTALHPSGRWALSVCLPRLARRRTQFTRRALQEQ

SEQ ID NO: 14491 - protein, 359 aa, Vitis sp. Qiu 94046; identical to SEQ ID NO: 7585

SEQ ID NO: 14492 - protein, 1023 aa, Gibberella zeae PH-1
MPLLQPEVIEILDDDDKASETGLNSPTPSKSVQKRKHETEIEEKVEWTGDEDDLPTKPKKRRGKRKSTRKKGGQDADAKKEVPEEDFEMADLPEYLIKRRRKFDNKRKLHHDAALMIPPDYSGIHFEETGRLRELEERPKFPESSGIKPSRPYKDIELPQSAGLIPASIAQYLRDYQVAGASFLHRKFVYQEGGILGDDMGLGKTVQVAAFLTVAFGKTGDERDAKRLRQVRQYPDRWYPRILIICPGSLIMNWKNELDRWGWWHTDLFHGANKDDALSTARAGRVEIMITTYDTYKNSRSAINLVQWDAVIADECHRLKDRSSETTKALNEINALCRIGLTGTAIQNRYEELWTLLDWTNPGHFGTLPEWTQRVTKPLTVGQSHDATVAQLSLARTTADKLVHNLLPQYFLRRMKSIIANQLPKKTDRVVFCPLTDFQRDAYENFLSSADIEILRTLSEPCCGGKKKGWCCNSLLPDGRRWQNIVFPSMMVLQKLANHLTLLVPHTTDLEAKHETDIKTLQTCLPDTWKYVYDNRDRIKNLVNPEFCGKWKVLKKLLKFWHSNGDKVLVFSHSVRLLRILHHLFTNTSYTVSYLDGSLSYEVRQEVVDTFNSDPTQFVFLISTKAGGVGLNITSANKVVIIDPHWNPSYDLQAQDRAYRIGQTRDVEVFRLISLGTVEEIVYARQIYKQQQANIGYTASSERRYFKGVQQDTDRKGEIFGLANIFLYHNDSGLLQDIVNKTNIAEAKAGVHLVDVDMEKAAKDEENLGIIKNEAPDVEDGGMSQLASLLTSENQQRMLDSKKAKKPKSDAIQAILTSAGVEYTHDNSEVIGSSKIEEQLSRRAAMASYSTQEGQSALFADPGDERGEGLFGIYNPPEEAKLRQFCEMAKEFGFANATEFALVVESWTQEARRNCLDLFYKKREAKLIQEGIIKEEDVKDVAKDETHDPDAKEEVKDDKMEISSALKDEDIKDNKENVLKRENIKTEMISTKVEEEKKVKTEGAGSSIRTSIFLSDDDDDDEL

SEQ ID NO: 14493 - protein, 162 aa, Trema tomentosa
MSSSEVDKVFTEEQEALVVKSWAVMKKNSAELGLKFFLKIFEIAPSAKNLFSYLKDSPIPLEQNPKLKPHAMTVFVMTCESAVQLRKAGKVTVRESNLKRLGAIHFKNGVVNEHFEVTRFALLETIKEAVPEMWSPEMKNAWGEAYDQLVAAIKSEMKPSST

SEQ ID NO: 14494 - protein, 1013 aa, Candidatus Kuenenia stuttgartiensis
MRLKHPFKYVLIIIIISISSISGFFVVFNKTFGLEPHFENLSVKEDTEYKFRLPGIVLSYINRLYVDPDRIDNVEMVKGALDWQERVIPEVLVDYSEEKKINTVTVDTVSKTFDLSEVHRSKDVFKVLQDALDFINKHREENASLTASDVEYTAINGMLTQLDPHSIILPPKQFTEFKIGTTGKFGGLGMVVGIRDGVLTVISPIEGTPAAVAGIKAGDKIVEIDGESTVDMDLTESVGKLRGDQGSTVTLSILKHKAVETKLFALKREIIVIPTVESASIEGGYGYVRIRNFQDDTSQRLNEQLKQLNKNNDKMKGLILDLRNNSGGLLDQAIKVSDKFLESGSIVVTVGPGGHPREVIDAKKTDTDEELYPIVVLVDAGSASGAEIVAGALKENNRAIIVGDRTFGKGSVQQLIELMDGSALKLTIAKYLTPLFTDIQSFGITPDIQLVPVTVEKDNINLFHGITAIREEDLKKHLDDHHKDAFPFATLKYFHEIKEKKEDAVAGKEAEVEPAEDEDPYKLPDFDKDFHIVFARKLLANTSTWKKEEGFLQNSLSVIDAISEEEEKKIAQALDSLSIDWSEGINEGASATNVTFLTNPINKRVKAGEKITLTVTIENTGDKPLYQLRGISSSKNGLYDKHEFIFGKIGKGSKKTYTKTIEIPKNSLDREDEITIKFEELNKNNPADLNLTVAIEALPQPLFAFSYQILDQATNSSGKNNGDGLINKGENINLLVMVKNMGNGISEKTFVTLRNLSDKEVFVEKGRVEIGQLNPGEIKEAELTFNVKETIASNEFNVDIIISDSIFGAFLSNTLKFSVVAGVPQKLTASSKLLKINKNHIPLYGGMSFDTPVLSMMNEGTILKSDVSNADWYRAELPNNRYGWVSAKDVTAVNNDAGKSSDELEMFIQRIPPTISLDGVPNILFGEEELSISALVKDDTHVKHAYVLINNDKIFFKSNKHVSPRQQSSLKIDTKHSLKEGPNVITIIARDDHDLVSIKSFVATKGITVAKGM

SEQ ID NO: 14495 - protein, 145 aa, Salmonella enterica
ATFMPKPMFGDNGSGMHCHMSLAKNGTNLFSGDKYAGLSEQALYYIGGVIKHAKAINALANPTTNSYKRLVPGYEAPVMLAYSARNRSASIRIPVVASPKARRIEVRFPDPAANPYLCFAALLMAGLDGIKNKIHPGEAMDKNLY

SEQ ID NO: 14496 - protein, 536 aa, Ipomoea nil
MGVDVGTLLSKMNMLTTSDHGSVVSINIFVALICACIIIGHLLEESRWMNESITALMIGICTGVVILLTSGGTSSHILVFSEDLFFIYLLPPIIFNAGFQVKKKQFFRNISTIMLFGALGTLISFIIISLGAIGIFKKMNIGSLELGDYLAIGAIFSATDSVCTLQVLNQDETPLLYSLVFGEGVVNDATSIVLFNAVQNFDLSNINSLVVLQLFGNFLYLFILSTLLGVVAGLLSAYVIKKLYFGRHSTDREVAIMICMAYLSYMLSELFSLSAILTVFFSGIVMSHYTWHNVTESSRVTTKHAFATLSFIAEIFIFLYVGMDALDIEKWKFVSDSPGTSVEVSSILLGLVLVGRAAFVFPLSFLSNLIKKSRGEKIGFRQQFIIWWAGLMRGAVSMALAYNQFTRSGYTQLRENAIMITSTITVVLFSTVVFGLITKPLIRVLLPTPKHLNRMVSSEPVTPKSFTVPLLDSEADLDGHVPRPNSLRMLLTTPSHTAHYYWRKFDDAFMRPVFGGRGFVPYVPGSPTEQNEPQWQ

SEQ ID NO: 14497 - protein, 72 aa, Salmonella enterica
SEQALYYIGGVIKHAKAINALANPTTNSYKRLVPGYEAPVMLAYSARNRSASIRIPVVASPKARRIEVRFPD

SEQ ID NO: 14498 - protein, 469 aa, Vibrio fischeri ES114
MSVENVLALIQENEVKFIDLRFTDTKGKEQHISIPSHQIDADFFEEGKMFDGSSVAGWKGINESDMVMMPDPASAVLDPFTEDSTLNIRCDILEPATLQGYDRDPRSIAKRSEEYMRSTGIADTVLIGPEPEFFLFDDVRFNTDMSGSFFKIDDIEAAWNSGTEYEGGNKGHRPGVKGGYFPVAPVDSSQDIRSAMCLIMEEMGLVVEAHHHEVATAGQNEIATRFNTLTTKADETQIYKYVVHNVAHAFGKTATFMPKPLVGDNGSGMHVHQSLAKDGVNLFAGDKYGGLSELAIYYIGGIIKHARAINAFANPSTNSYKRLVPGFEAPVMLAYSARNRSASIRIPVVPSPKARRIEVRFGDPAANPYLCYSAMLMAGLDGIKNKIHPGEAMDKDLYDLPAEEAAEIPTVAESLDIALKALDEDREFLTAGGVFSDDFIDSYIGLKSQDVEAINTAVHPLEFEMYYSV

SEQ ID NO: 14499 - protein, 135 aa, Salmonella enterica
DNGSGMHCHMSLAKNGTNLFSGDKYAGLSEQALYYIGGVIKHAKAINALANPTTNSYKRLVPGYEAPVMLAYSARNRSASIRIPVVASPKARRIEVRFPDPAANPYLCFAALLMAGLDGIKNKIHPGEAMDKNLY

SEQ ID NO: 14500 - protein, 325 aa, Ensifer adhaerens
IGGWKAINESDMVLMPDPETAHMDPFFAQSTMVIICDILDPVSGESYNRDPRGTAKKAEAYLKASGIGDTVFVGPEAEFFVFDDVKYKADPYNTGFKLDSSELPSNDDTDYETGNLGHRPRVKGGYFPVPPIDSCQDMRSEMLTVLSEMGVTVEKHHHEVAAAQHELGVKFDALVRNADKMQIYKYVVHQVANAYGKTATFMPKPIFGDNGSGMHVHLSIWKDGKPTFAGDEYAGLSESCLYFIGGIIKHAKSLNAFTNPSTNSYKRLVPGYEAPVLLAYSARNRSASCRIPFGTNPKAKRVEVRFPDPTANPYLAFAAMLMAGL

SEQ ID NO: 14501 - protein, 533 aa, Solibacter usitatus Ellin6076
MARRRRSLFVLPVIVFACSIAGGFYGPKVEVAAAASQSEDLDKDVRDFSKVLSLVQDNFADHVSADKTIYKGAIPGMLRTLDPHSNFFDAREYQLMREDQKGHYYGVGMQVSPQPSGKTAVKAPFPGSPAYKVGLRPGDLLISVNDKSTEGLNTTEIADLLKGPRGTSVKIVVSREGTKDYLTFTVVRDEISRKSVQDAFWIKPGYAYVKILSFGENTSRELEENLKRLGENNIKGLVLDLRENPGGLLNEGVAVADHFLPKNALIVSHRGRSAPEKAYVAQHGNRGRDYAMVVLVNRYSASAAEIVSGALQDHDRALILGETTFGKGLVQTVYPLSDNTALALTWAHFYTPSGRLIQRDYSNKSFYDYYTHRDESTRNPVDVKMTDGGRTVYGGGGITPDEKYEVPKLDRFEIGLFRNGLFDFTRSYFGAHSAASLSKTWMPDDQVLNELKAHLRSKGTVFTDAEFNKDREWIKRNLAREMYTSAFNVDESDAMFARTDPEVEKAVEMMPKAAALAESAKKIIVQRMAGQGR

SEQ ID NO: 14502 - protein, 68 aa, Picea sitchensis
MTTSRRLADRKSAKFQKNILKRGGVPETTVKKGNTYPVGPIVLGFFVFIVIGSSIFQIIRTASSGGTA

SEQ ID NO: 14503 - protein, 451 aa, Neisseria gonorrhoeae
RFVDLRFTDTKGKQHHFTVPARIVLEGPEEWFENGQAFDGSSIGGWKGIQASDMQLRPDASTAFVDPFYDDVTVVITCDVIDPADGQGYDRDPRSIARRAEAYLKSSGIGDTAYFGPEPEFFVFDGVEFETDMHKTRYEITSESGAWASGLHMDGQNTGHRPAVKGGYAPVAPIDCGQDLRSAMVNILEGLGIEVEVHHSEVGTGSQMEIGTRFATLVKRADQTQDMKYVIQNVAHNFGKTATFMPKPIMGDNGSGMHVHQSIWKDGQNLFAGDGYAGLSDTALYYIGGIIKHAKALNAITNPSTNSYKRLVPHFEAPTKLAYSAKNRSASIRIPSVNSSKARRIEARFPDPTANPYLAFAALLMAGLDGIQNKIHPGDPADKNLYDLPPEEDALVPTVCASLEEALAALKADHEFLLRGGVFSKDWIDSYIAFKEEDVRRIRMAPHPLEF

SEQ ID NO: 14504 - protein, 645 aa, Prochlorococcus marinus str. MIT 9312
MENIKYKNLPMGKVVGIDLGTTNSCVAVMEGGKPTVIANAEGFRTTPSVVAYTKNQDQLVGQIAKRQAVMNPENTFYSAKRFVGRRVDEVNEESKEVSYSVEKSGSSVKLKCPILNKQFSPEEVSSQVLRKLADDAGKYLGQQVTQAVITVPAYFNDSQRQATKDAGKIAGLEVLRIVNEPTAAALAYGLDKENEKILVFDLGGGTFDVSVIEAGDGVTEVLSTSGDTHLGGDDFDRCIVDHLASNFKSNEGIDLRQDKQALQRLTEAAEKAKIELSNATQSEINLPFITATPEGPKHLDLNLTRAKFEELAASLIDRCKTPVERAISDAKISTSEIDEVVMVGGSSRIPAVLDLVKKIIGKEPNQTVNPDEVVAVGAAIQGGVLAGEVKDILLLDVTPLSLGVETLGGVMTKMINRNTTVPTKKSETYSTAVDGQTNVEIHVLQGEREMASDNKSLGTFRLDGIPSAPRGVPQIEVTFDIDANGILSVTAKDKGSGKEQSISITGASTLSDNEVEKMVKDAESNASADKDKREKIDLKNQAETLVYQTEKQLSELGDKIDAAAKSKVEEKSNALKEATSKEDYESMKKLLEELQQELYAVGSSVYQQPGNQPPSPGSTGSPDQNDSNEKDGDDVIDADFTETKD

SEQ ID NO: 14505 - protein, 177 aa, Glycine max; identical to SEQ ID NO: 1035

SEQ ID NO: 14506 - protein, 503 aa, Moritella sp. PE36
MPRALNIKGLEMNSSCRVLSLQAWNIDLELVVNALIIDSRKVQAGDCFVAINGHALDGRRFISKALKSGATAVLKDADNEAEHGHIDYIDQRPIISFFGLNQALSALADNFYQSPSQQLKLIGVTGTNGKSTITQIIANWVTLLAGKAGVMGTIGNGLFAQLTQAENTTGSGLDVQAEIANQLQQGAELCAMEVSSHGLIQGRVNALDFDVALFTNLTRDHLDYHGDMDAYADAKKILFQGAVKHKILNVDDAYGKMWAQQWSDAIQFSVRQDLSAHHGAFLYCNELSFDTGGFSCELKTSWGDGTLQCSLIGEFNASNVVAACASLLALGYDLDDLLRVAPKLTAVCGRMELFKQAGQAACVVDYAHTPDALEKALQALRVHCEGKLWCIYGCGGDRDTGKRPLMAQVAEQFADMAVITDDNPRTESAAAIVTDMLNGLAKPDAAHVIHDRRRAIQWAMEQSSADDIILVAGKGHEDYQIIGVEKHHYSDRETITEMLDNQQ

SEQ ID NO: 14507 - protein, 585 aa, Pseudomonas aeruginosa PAO1
MKGHLHLPHPHNQRLQRIQAPTYERLQARLAEDHSEPTEKPLSIHCGWGRLLIGQTYPDAEELARDLLQEAPGERDIALYVAAPQQVLAHAPQQLFLDPSDTLRLWFTDYRPARRPPRGFRIRRVHTEEDWAAINRLYLARGMLPVQTERLSPRHQGGPIYWLAEDADTGVAVGTVMGLNHAKAFQDPEGGSSLWCLAVDPQCSRPGVGEALVRHLVEHFMSRELAYLDLSVLHNNQQAKALYRKLGFRELATFTIKRKNGINQSLFLGPGPEEDLNPYARIIVDEAHRRGIEVRVDDAEGGLFTLTQGGRQIRCRESLSDLTTAVSMTLCQDKVLTHRALQHAGLRQPQQRLAGSAEENAAFLAEHGSLVVKPVDGEQGQGVAVDLRTAEEVEEAIEAARHFDSRVLLESYHAGHDLRVLVIGYEVVAAAIRRPAAVIGDGRHSIRELIEAQSRRRQAATGGESRIPLDHETERTLRAAGYGYDDVLPSGEHLAVRRTANLHTGGILEDVTDALHPALREAAIQAARALEIPVVGLDFLVEAADQPDYVIIEANERAGLANHEPQPTAERFVDLLFPLSREVPS

SEQ ID NO: 14508 - protein, 159 aa, Burkholderia pseudomallei K96243
MSKLYSFNAQALSGGEVPLEQYRGKVLLIVNTASECGFTPQYAGLQQLYDRFRERGLVVLGFPCNQFGKQEPGDASQIGAFCEKNYGVTFPMFGKIDVNGANAHPLYRYLTEEAPGILGLKAIKWNFTKFLVNREGEIVKRYAPSTKPEDIAADVEKLL

SEQ ID NO: 14509 - protein, 149 aa, Arabidopsis thaliana
  misc_feature (39)..(39): Xaa can be any naturally occurring amino acid
MDDKETSATDLKRPREEDDNGGAATMETENGDPKKEPAXFATVIPGRSSEMRPMWTGEAHSLKVEKALFSGRSDDQEGIAFQAATYGKVLDLDGEIQLTERRWNVLIRKRTVHLPLWFYPLTLRKGFGSMAGRTWNVVLPEKLNAMAFN

SEQ ID NO: 14510 - protein, 451 aa, Neisseria gonorrhoeae
RFVDLRFTDTKGKQHHFTVPARIVLEDPEEWFENGPAFDGSSIGGWKGIEASDMQLRPDASTAFVDPFYDDVTVVITCDVIDPADGQGYDRDPRSIARRAEAYLKSSGIGDTAYFGPEPEFFVFDGVEFETDMHKTRYEITSESGAWASGLHMDGQNTGHRPAVKGGYAPVAPIDCGQDLRSAMVNILEGLGIEVEVHHSEVGTGSQMEIGTRFATLVKRADQTQDMKYVIQNVAHNFGKTATFMPKPIMGDNGSGMHVHQSIWKDGQNLFAGDGYAGLSDTALYYIGGIIKHAKALNAITNPSTNSYKRLVPHFEAPTKLAYSAKNRSASIRIPSVNSSKARRIEARFPDPTANPYLAFAALLMAGLDGIQNKIHPGDPADKNLYDLPPEEDALVPTVCASLEEALAALKADHEFLLRGGVFSKDWIDSYIAFKEEDVRRIRMAPHPLEF

SEQ ID NO: 14511 - protein, 667 aa, Vibrio angustum S14
MNCRFRFSLIAAGMMLAASAQALEAKYSLSDLPQLAPEQQHATASKRVASRFTRSHYKHFSLDDKFSSQVFDRYIEMLDYNKSFLTASDVKQFERWRNQFDDQLKSGDTSGAFDIFNKVLQRRFDRYQFAISQLDTEIKFDKDEDFIIDRSELEWPKNQAELNEIWRKRVKYDALNLKLAGKNWKEIQETLGKRYNNAVKRLTQTHSEDVFQLYMNAFSREVDPHTSYLSPRNAEQFQSEMNLSLEGIGAVLQVKDDYTTIQSLVAGGPAASSKKLAAGDRIIGVGQDGEKIVDIIGWRLDDVVQLIKGPKGSKVILDILPEGKNSKSYTVTIVRDKIRLEDRAVKSEVKTFEGKKIGVIEVPSFYVGLSEDTKKELVKLNDQKVDGVVIDLRNNGGGALTEATALSGLFISSGPVVQVRDSYGRVKVNSDSDNQVFFNGPLTVLINRYSASASEIFAAAMQDYGRAVVLGEQSFGKGTVQQHRSLNHLYDLFDKPLGHVQYTIQKFYRINGGSTQNLGVVPDISFPTAVDPSETGESVEDNALPWDSIKPAEYKQLHNYSSILPKLNEEHLARIKNDMEFGFINEDIKTYKKEKDINSISLNEKTRLAEQDKEDADRLVRLNKRQKALGKKPFADLDAVPKDYEAPDAYLDEAIGITADLAKIKSS

SEQ ID NO: 14512 - protein, 1719 aa, Vitis vinifera
MAFFRNYSNETVAQSVLDEKGQGQNIDRVHSSVANEYVDATSSEKDFESKVDGQYQSDGDTNDAGLQNEAAAADDIGLRISNLQPSGRRTAMAGKWGSTFWKDCQPMGHRNGSESEQDSKCRFDCKNEEALEDNSSDGREVDKVQKGQNDVPADEMSSDDYYEQDGEDQSDSLHYRGLNHSSVLNSQPQGRLLRKMLFKIWIYCSSFSKSAFCFIYLSFLFSLVKGDELSLLEASGTLVFIYYQDKDWNGEDSDEDDNSNDDLDVSDEDDAYYMKKPKGRLRGNSGRGLKPTKEHKSFPAPGRRKRGRTLLEDEDSYEKDSENDSDEDFKSMTRRGAHLRKSKGGQSSTTANIIGRNSELRTSSRSVRKVSYVESEESEEIDEGKKKKSQKEEIEEEDCDSIEKVLWHQPKGMADEALKNNKSTEPILLSHLFDFEPNWNEMEFLIKWKGQSHLHCQWKSFSDLQNLSGFKKVLNYTKKVMEEVKYRNMFSREEIEVNDVSKEMDLDLIKQNSQVERIIAYRIGKEGSGDVMPEYLVKWQGLSYAEATWEKDVDIAFAQDAIDEYKAREAAAAIQGKMVDMQRKKSKASLRKLDEQPGWLKGGQLRDYQLEGLNFLVNSWRNDTNVILADEMGLGKTVQSVSMLGFLQNAQQIYGPFLVVVPLSTLSNWAKEFKKWLPDLNVIVYVGTRASREVCQQYEFYTNKKTGRTILFNALLTTYEVVLKDKAVLSKIKWNYLMVDEAHRLKNSEAQLYTTLSEFSAKNKLLITGTPLQNSVEELWALLHFLDPDKFKNKDDFVQNYKNLSSFNEMELANLHMELRPHILRRVIKDVEKSLPPKIERILRVEMSPLQKQYYKWILERNFHDLNKGVRGNQVSLLNIVVELKKCCNHPFLFESADHGYGGNRSTNDCGKLERLILSSGKLVLLDKLLEKLHETNHRVLIFSQMVRMLDILAEYMSLRGFQFQRLDGSTKAELRQQAMDHFNAPGSDDFCFLLSTRAGGLGINLATADTVIIFDSDWNPQNDLQAMSRAHRIGQREVVNIYRFVTSKSVEENILKRAKQKMVLDHLVIQKLNAEGRLEKKESKKGSYFDKNELSAILRFGAEELFKEDKNEEESKKRLLSMDIDEILERAEKVEEKETGEEGNELLSAFKVANFGSAEDDGSFWSRWIKPEAVAEAEDALAPRAARNTKSYAEANQPERISKRKKKAAEPQERAQKRRKADYLVHLVPRIEGAAAQVRGWSYGNLPKRDASRFSRAVLKFGNPSQIGSIVMEVGGTIEAAPTEAQIELFDALIDGCREAVKEGNLDPKGPMLDFFGVPVKANEVLNRVQELQLLAKRISRYEDPIAQFRVLMYLKPSNWSKGCGWNQIDDARLLLGIHYHGFGNWEKIRLDERLGLTKKIAPVELQHHETFLPRAPNLKDRASALLEMELVAVGGKNTNTKASRKTSKKEKERENLMNISISRSKDRKGKPGFPVTNVQMRKDRSHKPHRVEPLVKEEGEMSGNEEVYEQFREVKWMEWCEDVMKTEIKTLNRLHKLQTTSANLPKDLVLSKIRKYLQLLGRRIDQIVLEHDKEQYKQDRMIMRLWNYISTFSNLSGEKLRQIHSKLKQEQDEDGGVGSSHVNGSAWGPAEPVSKSHDAGKFEAWKRRRRADNINTHSLTQPLPQRPMSNGSRLPDPNSLGILGSGPTDNRRFGNEKPSRMRQSGYPPRQGFSSVIK

SEQ ID NO: 14513 - protein, 727 aa, Xanthomonas campestris pv. campestris str. ATCC 33913
MTYNVSASLKAGLLALVLTTPMALLARADTALPAAATPEQATATKLVYGLLSDSRYAYRPRTLDEAMSKDVFKRYLETLDGGKQFFTQADVDAFAPLQAGVGDALRGGNLEPAFQVFSVYKKRVDQRVKYARELLKQDFDFTGSEKFEYDRKDVPWAADDKQLDVLWRQSVMNDWLRLKLAGKKSDDIRKTLDKRYATLADSVNELKGEDAFQFFLNAYTNAVDPHTDYFTPRTAETFNQQMSLSLEGIGAQLQKQDDMVVIREVIPGGPAAVDGTLKPGDRIVGVGQAKSGAIEDVIGWRIDDVVAKIRGSKDTQVRLEYIPAELGIDGTHRTVTLTRQKVRLAEQAAKGETITLPASGDVPQRRIGIIKLPGFYQDFEGRRRNAADYASATRDVAKLLAGFKSDKVDGVVLDLRNNGGGSLDEAIELTGLFIEQGPVVQVRESGGRVTVNGDSNPKVAWDGPLGVLINRGSASASEIFAGAIQDYGRGLVIGETTFGKGTVQNIVDLDRWPAAEGQRYGQVKLTIAQFFRVSGSSTQHKGVVPDIAFPASVDATEFGESTYDNALPWTRIAAVPHTQYGNFAPLLPKLQTLHATRIASDKEFQWWEEDVKQFRDEKAKKYISLNEAERVAERQKQDQQRKDRQQVRKQLGLPLDPLADDSDDGLTGNERDIVKDTAREKAAEKRPDPLLHESAAILADALGLLSKDQPLSAQVLPQSTAPGRWAD

SEQ ID NO: 14514 - protein, 1064 aa, Bacillus cereus ATCC 10987
MSFTLNKSIIKEVCGETSYKRGEAYYKSNKVIVNYYDETKEICEATVKGNEDFRVTVEKAKKGDVVARCSCPSLASFQTYCQHVAAVLIQINYNQQTGGMGSVSSRNDQLTNGMFQLFADKPLRPKSKQHRFDTREILDVAFICSPVAKKSGGALLGIQLKLAKTYFINHIREFLSKVEKREAFHCSNEFTYTPDVHSFKQETDAIIQQFIKIYHNEKMYEDALEVHAKQDESMIFIPPASWNDMLSALSRAEYVQLKQNEQLFQGLHISKGLLPLHFEFTKGNNGGFTLHIDGLNRVRVMEMYNNALYDGKLYHLPMEDCMRLIELQKMMSRSNSNQFYIPENKMEHFVAKVVPGLMKLGTVRIDEVISDRVETPSLKAKLYLDRVKNRLLAGLEFHYGNVVINPLEEDGQPSVFNRDEKKEKEILDIMSESAFAKTEGGYFMHNEEAEYNFLYHIVPTLKGLVDIYATTAIKLRIHKGDTAPLIRVRRKERIDWLSFRFDIKGIPEAEIKGVLAALEEKRKYYRLANGSLLSLESKEFNEINQFVKESGIRKEFLHGEEVNVPLIRSVKWMNGLHEGNVLSLDESVQDLVESIQNPKKLKFTVPPTLHAVMREYQVYGFEWMKTLAYYRFGGILADDMGLGKTLQSIAYIDSVLPEIREKKLPILVVSPSSLVYNWFSELKKFAPHIRAVIADGNQTERRKILKDVAEFDVVITSYPLLRRDVRSYARPFHTLFLDEAQAFKNPTTQTARAVKTIQAEYRFGLTGTPVENSLEELWSIFHVVFPELLPGRKEFGDLRREDIAKRVKPFVLRRLKEDVLQELPDKIEHLQSSELLPDQKRLYAAYLAKLREETLKHLDKDTLRKNKIRILAGLTRLRQICNHPALFVDDYKGSSAKLEQLLDILEECRSTGKRILIFSQFTKMLSIIGRELNRQAIPYFYLDGNTPSQERVELCNRFNEGEGDLFLISLKAGGTGLNLTGADTVILYDLWWNPAVEQQAADRAYRMGQKNTVQVIKLVAHGTIEEKMHELQESKKHLIAEVIEPGEEKLSSITEEEIRDILMI

SEQ ID NO: 14515 - protein, 181 aa, Brassica rapa
MAYSMLSSAAVVTSPAQATMVAPFTGLKSSSAFPVTRKANNDITSIVSNGGRVSCMKVWPPVGKKKFETLSYLPDLTEVELGKEVDYLLRNKWIPCVELELEHGFVYREHGSTPGYYDGRYWTMWKLPLFGCTDSAQVLKEVQECKTEYPNAFIRIIGFDNNRQVQCISFIAYKPPSFTGA

SEQ ID NO: 14516 - protein, 448 aa, Methanococcus maripaludis
MNMNAVEQAMEYIKTNNVKFIRFQFVDIHGEPKNIAYPVKAGAAGEEELYDVLEKGVYFDGSSIEGFVSIESSDMMLKPDLKTLSVLPWRPTEKSVARVICDVYTTNGKPFEGDPRGCLKRVLAKFDEELGGEFFVGPEPEFFILKEDACGSWVPADDAGYFDLEPLDGGCDIRRKIVFALENLGFHVEASHHEVAEGQHEVDFKFADAVKTADSVVTFKTTIKTLAAQDGLKATFMPKPFFGINGSGMHCHQSIWLNGEPSFYDESAQYQLSETCMSYVAGILDHAKSIVAVTNPTVNSYKRLVPGYEAPVNIAWANSNRSAIVRVPAPRGKGTRIEFRAPDPACNPYLAFTVMLAAGLDGVKRKLSAIEPVEKNIFAMSEAQKKAEGIESVPANLKAALDELENNSVLKDALGKHIFENFIEIKNAEWDSFRTAVTDWETKQYLKI

SEQ ID NO: 14517 - protein, 139 aa, Vitis vinifera
MKKNAGELSLKFFLRIFEIAPSAKKLFSFLRDSDVPPEQNPKLKPHALSVFVMTCESAIQLRKAGRVTVRESNLIDLGATHFKYGVVDEHFEVTKYALLETIKEAVPDMWSPEMKSAWAEAYDQLVAAIKKEMKPPQTS

SEQ ID NO: 14518 - protein, 137 aa, Vitis vinifera
MKKNSGELGLKFFLKIFEIAPSAQKLFSFLKDSKVPLEKNPKLKSHAMAVFVMTCESAVQLRKAGKVTVRDSTLKKLGSVHYKSGVLDEHYEVTKFALLETIKEAVPEMWSPEMKNAWAQAYDQLVVAIKSEMKPSS

SEQ ID NO: 14519 - protein, 181 aa, Vibrio sp. Ex25
MKGLLKLVALVGFLSMNSLALASECPDILQGKQRLLNSTEEVDLCESFKGKTLLVVNTASQCGFTPQFEQLETLYQTYKEQNFTVIGFPSNDFRQDRGSETNTAKVCYLDYGVTFPMMARSSVLGVDANPVFSEITNQAGIKPKWNFYKFLISSEGKVIATFPSSTSPTSTTLTNMIEQQL

SEQ ID NO: 14520 - protein, 325 aa, Ensifer adhaerens
IGGWKAINESDMVLMPDPETAHMDPFFAQSTMVIICDILDPVSGESYNRDPRGTAKKAEAYLKASGIGDTVFVGPEAEFFVFDDVKYKADPYNTGFKLDSSELPSNDDTDYETGNLGHRPRVKGGYFPVPPIDSCQDMRSEMLTVLSEMGVTVEKHHHEVAAAQHELGVKFDALVRNADKMQIYKYVVHQVANAYGKTATFMPKPIFGDNGSGMHVHLSIWKDGKPTFAGDEYAGLSETCLYFIGGIIKHAKSLNAFTNPSTNSYKRLVPGYEAPVLLAYSARNRSASCRIPFGTNPKAKRVEVRFPDPTANPYLAFAAMLMAGL

SEQ ID NO: 14521 - protein, 325 aa, Ensifer adhaerens
IGGWKAINESDMVLMPDPETAHMDPFFAQSTMVIICDILDPVSGEAYNRDPRGTAKKAEAYLKASGIGDTVFVGPEAEFFVFDDVKYKADPYNTGFKLDSSELPSNDDTDYETGNLGHRPRVKGGYFPVPPIDSCQDMRSEMLTVLAEMGVTVEKHHHEVAAAQHELGVKFDALVRNADKMQIYKYVVHQVANAYGKTATFMPKPIFGDNGSGMHVHLSIWKDGKPTFAGDEYAGLSETCLYFIGGIIKHAKSLNAFTNPSTNSYKRLVPGYEAPVLLAYSARNRSASCRIPFGTNPKAKRVEVRFPDPTANPYLAFAAMLMAGL

SEQ ID NO: 14522 - protein, 568 aa, Gibberella zeae PH-1
MPIESRFSVQVPNCSIQQWIFGSSSGPLPDKKAFIDADHPQDRYFTYSQARLLAKRIAVGLTDNGLRPGDRVLLFAHNSIFFPTIVMGIWMAGGIFTGANPGYVARELVHQLKDSQAMFIISDHGALGVALDASSQVGMKPSQVFVLDSTWPDTSIEIQPSKGSRHWTELIAAKSRGETFEWTEPEDSKNSICSINYSSGTTGIPKGVEISHYNHVANSRGVTLFHQLHPEFEARRDRAAALCFLPMYHAFSQGYFITSFPYERVPVYIMPSFEFPKILTHIQTFRITKLLAVPPILVLISKHPLARSADLSSIDMIASGAAPLARDTQREIAGMIPLGEAVVRQGWGMTEATCTALSWDPNKAPSSAAGELTPDSQARLVDIETGEEINTANTPGELWITGPTVTRGYWRNPIATQEAFVVDSDGTQWLRTGDVAYVEEYAKGTLFHIVDRVKELIKVKGMQVAPAELESLLLEREDVADAAVVGVVIDGEEFPRAYIVKTPNGKNTSKQDIADWLASRVVKYKQLIGGVVFVESIPKVPSGKILRKVLRERAKREVSNGLEVRAKL

SEQ ID NO: 14523 - protein, 512 aa, Oceanobacillus iheyensis HTE831
MLNDKAIRQSKIIYWSSGIVSICGIIFEVLFGALGSYILGDGVKQYTLTISLFLTGMGIGASLSEKFMRNLIIKFVWIEFCVALIGGFSSFIMFGITAFAPAGTDAFYLYSITLIIGALTGVELPILIRKANEIGVTLNKSTARVLFSDYAGGLIGGVLFVFLFRPYFGMVKTAFLVGLINLTVALIVLWLFRKEIRHFIVHAVIGGVIGVLLIAGLFFGEEMAFNFEQKLYQDPIIHMEESSYQKITVTQDEKDIRLYLDGSLQFSSVDEHRYHEVLVHPAMANVETPENVLILGGGDGIAAKEVLKYQDVKQVTLVDLDPAVVELANENRHLLEINEGALMDEKVEVKNMDAFQFLEDTSEWYDVILVDLPDPNNESLNKLYTKEFYSLVRNHLKPEGTLMVQATSPVFAREVYWTISETISSTNLNTENLHVDVPSFGNWGFVMASREEIDLDIMEIPVSTRFLTDDMMPALTAFGKDEDQQIPNFELKANTLIDPHLIQIYEKAWENY

SEQ ID NO: 14524 - protein, 474 aa, Kluyveromyces lactis NRRL Y-1140
MAKRRTKNRTHVKPSPEELKKIPKSMVIRVGQTSLASHSLNQLVKDFRTIMQPHTAIKLRERKSNKLKDFVVMCGPLGVSHLFIFTQSEKTGNVSLKIARTPQGPTITFQVQDYSLGKDIKKFLKRPKSLSKDDILNPPLLVLNGFQIKGNEDEEKANVEKVIVSMFQNVFPPLNPAKIQLNSINRVFMINKDQTTGEISLRHYAIDIREVDLSKNLKKLYKSKQKLSKAVPNLHRKDDIASLILDHDVAAYTSESEIEEDAIVKVMDKEHKHIKHIPHRSVNKDTGEKPARLSADGDDDIEMDDEDEEEDLNVKEEQEEEEQHSTQQPKKKAIKLTEIGPRLTLKLVKIEEGICAGKVLHHEYVKKSDSEIKALEKRHAQKMRLKEQRKKEQEENIAKKKAAKEAKKQRKLERRKAREEAAANGEDGEEAESGQDNSDSDSSDSEESSSEDNYSDVPEDLDSDLYSDIDEGTD

SEQ ID NO: 14525 - protein, 451 aa, Synechococcus sp. RS9917
MPSSQHRRSLRDRRSTWMVLLGVGGVSAAVAVASPGLGLPSSTSSAITDSPKEVIDQVWQIVYRDYLDSTGEYNPERWQSLRRNLLAKPYNGTEESYEAIRGMLASLDDPYTRFLDPKEFKEMQIDTSGELTGVGIQISLDKETKDIVVVSPIEGTPASRAGVQPKDVIVSIDGSSTKGMTTEDAVKLIRGKEGTQVTLGLRRKGQVLQVPLVRARIEIHSVSSQINNAPNGRKVGYIRLKQFNANAAKEMRAAIRSLEEQGVDGYVLDLRSNPGGLLEASVDIARQWLDEGKIVSTKTRDGIQDVRRATGSALTQRPVVVLVNEGSASASEILSGALQDNHRAQLVGQKTFGKGLVQSVRGLADGSGMTVTIAKYLTPSGTDIHKNGIKPDVKVEMSEEEIQSLKLEDLGTNKDSQYRVAETTLIKALAAPSSGRAYKPGSANLKSAVQR

SEQ ID NO: 14526 - protein, 225 aa, Glycine max
  misc_feature (197)..(197): Xaa can be any naturally occurring amino acid
MQSKSETANRLRSDPHSFQPGSVYSEPWWRGIGYNPMAQTMAGANASNSSSLECPNGDSESNEEGQSLSNSGMNEEDDDATKDSKPAAPNETGNYEQEQQGMQHTASSPPSMREECLTQTPQLELVGHSIACSTNPYQDPYYGGMMAAYGHQQLGYAPFIGMPHARMPLPLEMAQEPVYVNAKQYQGILRRRQARAXAELERELIKSRKGITCSQTLDRIWFYYY

SEQ ID NO: 14527 - protein, 626 aa, Kineococcus radiotolerans SRS30216
MEIAIALVALTVGVCVVSALCDRLRWPTPLVLVVVGAAVSLVPVVPEFSLGPELVLNGLLPPLLYATTARASLVDFNRNKTATLLLSVVLVVFTTLVVGWTTSWLLPGVALAACMALGAVVAPPDAVAASAIGQRLGLPRRVATLLEEESLLNDATALIALAAATSALTSELSPLHIGGEFVLAVVGAVLIGGVVAAVLALVRTRIRNPVLDTAVSFVAPYLAFLPAEALHVSGVLSVVVAGLALAHVSPKVQTAASRVAEALNWRTVAFLLENAVFLLIGLQFPLLVRGAADSGFGGGRILLVCAGVLVATVAARFAFVFAVAGILTAVPPWRRKAWPGAVSVLVSWAGMRGVVTLAAAQLIPEDVPGRDVLLLAAFAVVVGTLLVQGLSLPWVVRRVGLPAPDPAQDALQAAALGDAASAAGLRRLDELLTGDEPRHVVGQLRKRSKSRSHAAWERLGRPEADVSTPSAVYTRLRLEMLAAERAVVVEARDRGTAEPEVLQRALADVDFEEALLDRLDDLEPLAADRRLGGASDGGCAHLRTAGTRDDATARWGGPPTECAECVAVGATWVHLRTCLACGHTGCCDSSELRHSRAHFAGTAHPAIVSAEPGEAWRWCWVDEELG

SEQ ID NO: 14528 - protein, 451 aa, Neisseria gonorrhoeae
RFVDLRFTDTKGKQHHFTVPARIVLEDPEEWFENGPAFDGSSIGGWKGIEASDMQLRPDASTAFVDPFYDDVTVVITCDVIDPADGQGYDRDPRSIARRAEAYLKSSGIGDTAYFGPEPEFFVFDGVEFETDMHKTRYEITSESGAWASGLHMDGQNTGHRPAVKGGYAPVAPIDCGQDLRSAMVNILEGLGIEVEVHHSEVGTGSQMEIGTRFATLVKRADQTQDMKYVIQNVAHNFGKTATFMPKPIMGDNGSGMHVHQSIWKDGQNLFAGDGYAGLSDTALYYIGGIIKHAKALNAITNPSTNSYKRLVPHFEAPTKLAYSAKNRSASIRIPSVNSSKARRIEARFPDPTANPYLAFAALLMAGLDGIQNKIHPGDPADKNLYDLPPEEDALVPTVCASLEEALAAFKADHEFLLRGGVFSKDWIDSYIAFKEEDVRRIRMAPHPLEF

SEQ ID NO: 14529 - protein, 338 aa, Anisodus tanguticus
MEVISNHNNGSTTKIILKNGSICNGNVNGNSHSHEKIENKLVECTNSIKPGWFSEFSALWPGEAFSLKIEKLLFQGKSDYQDVMLFESATYGKVLTLDGAIQHTENGGFPYTEMIVHLPLGSIPSPKKVLIIGGGIGFTLFEVSRYPTIETIDIVEIDDVVVDVSRKFFPYLAAGFDDPRVTLIIGDGAAFVKAAQPGYYDAIIVDSSDPIGPAKDLFERPFFEALAKALRPGGVVCTQAESIWLHMHLIKQIIANCRQVFKGSVNYAWTTVPTYPTGVIGYMLCSTEGPEVNFKNPVNSIDKDTSHVKSKGPLKFYNSDIHKAAFILPSFARDLVEF

SEQ ID NO: 14530 - protein, 176 aa, Vitis vinifera
MADGPASPPGGSHESGGDQSPRHNVREQDRYLPIANISRIMKKALPANGKIAKDAKDTVQECVSEFISFITSEASDKCQKEKRKTINGDDLLWAMATLGFEDYIEPLKVYLQRYREGDTRGSARGGDGSARRDAIGSQPGPNAQFAHQGSFTQAMNYMNSQAQGQHLIVSPVQSSE

SEQ ID NO: 14531 - protein, 867 aa, Bacillus subtilis subsp. subtilis str. 168
VSFIGTTAVLLSPWMTVELLGKNSFNSFSSVQLTEETEPLIEAASTIYEFIADGDFMPDYDAWTNGVFRWKDRDNILEGFTAEWFSAAVQDYIQYDDDLREKWEHIKEKSPAVTTFRGHFLDEEDFLEGIGWIDDQSPFTVGLRLNEPDFDGDEWKIEMFLRDKKSGAVEFFDGLKSLKKSWQAYSDKIAREQDRFHRTVPWLSFDSGTTLISEEEAWIFLSEASETLVDMGVEILLPSWWQIVRDSNMMLKAKVSSSPRGESFVGMNALLDFNWRFATNGIELTEAEFNELVASNRRLVNIRGQWVKIDPQFIKQMKRLMEKAESEGLHMSDILARELMDQQDGGLEDSDLIDTSAFAGIQFDLSKQLRSLIRKLTAAENLPEHKVSPSFKGTLRPYQKYGMNWLLFLRESGFGACLADDMGLGKTIQMIAYFLHVKESGRQKTPHLIIAPTSVLGNWQRELQTFAPDLSVALHYGPRRPKGDDFAAHYENADVVLTSYGLSHADTEELSSVTWNTICLDEAQNIKNAHTKQSRAIRKLKGLHHIALSGTPMENRLTELWSIFDFMNKGYLGSLTGFHKRYVLPIEKDRDEKRIGQLQQLIRPFLLRRTKRDEEVALNLPEKLEEKEFIPLSAEQASLYEQLVKDTFDHMTSLTGMQRKALILSMLGRLKQICDHPALYLKEEQTELLAGRSVKLEKLLELMTAIRAQNESCLIFTQYIQMGNMMKRLLEKTFGEPVQFLNGSLSKQERDTLVEKFQRKEYPTLILSLKAGGTGLNLTAANHVIHYDRWWNPAVENQATDRAYRIGQERFVHVHKMITTGTIEEKIDVMLESKQTLNDQIIQSENWITELSTQELEELFTLSATAQ

SEQ ID NO: 14532 - protein, 235 aa, Tradescantia virginiana
VQLKRMENKINRQVTFSKRRTGLLKKAHEISVLCDAEVGLIIFSTKGKLYEYSTDNSMAKILERYDRYATAERAVLEANLNLEVGSHYEYRKIKAKVDALQKSQRHLMGEQLDTMTNKELQQLEQQLETALKHIRSRKNQMMLESVAALQKKEKALREQKSILEKKLIEKQKDMEISQIHQYQAHEDNTSPTSLVLTNSLPTTLNTNGCITHAIEEEHAPTLPHTNNNNLPPWMV

SEQ ID NO: 14533 - protein, 4245 aa, Oryza sativa
MASSQQVELEAAKLLQKLIQESKDEPAKLATKLYVICQHMKLSGKEQSLPYQVISRAMETVVSQHGIDMDALRSSRIPLAGGPQAGDSSGAMPKDKEIIGSQPPMVGTDASQSSAHAGLWNFPSGSADMARHSASISGRVPAGPNRSDVAGADIHQGSMSQKSGRSSGMESPASLQIEDTRSMNSHDSLKSDEKTSKKSSSKRKRVDPKAAGDLHSEDNSKSDAMSTGQNIRKGKQPGKAGTQGQLSRTVEHDPSHTLQVGNAQVPPLPSGAPFFRAHQEGPSASSARTIDKTKPSNPFTMAQISNFAEGLASGNIPAELQKSILGGANLLNASFGWNQNAQGPVMKNTQGSVPNLMRPGVNVEGKVNLGSQGTFNSMSASQMDYPTVPPYVSSSFGGGPQYLDKGKDLTSGNTGSELNSSKAGAQLGIMHMHFDTQMRYNFQGSPMQERHGIVRAPQRAGSSQMSQTSPSIPFKEQQLKQLRAQCLVFLAFRNNLQPRKVHLEIALGVGPPASEGGSAGQRGSESRMADGSGKENGNSQENPAIFGRQSDISRLQSTSTGSVADVDSASKDPEIVKKKIKIAEHEKSFEAENIQQTVPIQGTDSEMHSQETISPMPSGQLHYFQGDTRKTTPEIYKADAENLNRNLGWVGGQGPSPLGGNRHTSMEVGLLAKDEVSKEPFAVLRPHHMPVDGSNHNLSGKDQTPETAGNEIDNGSHMGEMIFERSADEGDEDLSEQDDLPLSPPKYTMTDKWILDHQKRRYEENKRKALELQKAHRRISASYEKLKENVSSSEDLSAKTKSVIELKKLQLLQLQRRVRSEFLQDFFKPNTTDLDRIKSVKKHRHGRRVKQLEKIEQKMKEERQKRIRERQKEFFADIEAHREKLEDSFKVKRERLKGFNRYVKEFHKRKERIHREKLDRIQREKINLLKNNDVEGYLRMVQDAKSDRVKQLLRETEKYLQKLGAKLQGSKSMDGRVSYASDSTANDIEDESYQPQHYLESNEKYYQLAHRYQMNGLRWLVSLYNNNLNGILADEMGLGKTVQVISLLCYLMETKNDRGPFLVVVPSSVLPGWESELNFWAPSINKIAYAGPPEERRKLFKEMIVHQKFNVLLTTYEYLMNKHDRPKLSKIQWHYIIIDEGHRIKNASCKLNADLKHYRSSHRLLLTGTPLQNNLEELWALLNFLLPNIFNSSEDFSQWFNKPFESNGDSSTEEVENELPEKIERLVRCWPSAYQKLLIKRVEENLGGIGAVKIEGYLPRHYLPSILRLCGKLEMLDRLLPKLKATGHRVLLFSTMTRLLDVMEDYLVWKKYKYLRLDGHTSGQERGALIDKFNNPNSQAFIFLLSIRAGGVGVNLQAADTVIIFDTDWNPQVDLQAQARAHRIGQKKEVLVLRLETVQTVEEQVRASAEHKLGVANQSITAGFFDNNTSAEDRREYLESLLRGGKKEEAAPVLDDDALNDLLARSEDEIDIFESIDKQRREEEMIYESSNIKSVKVVRRKGELGGLDTQHYGRGKRAREVRSYEDQWTEEEFEKLCQVDSPDSPQPGGISRDADVPKVVKLEVPPESSKEPEQAKKEPASSVGDSPPAKRRRGRPRRSDASLSPVTAPPNTGKQEAGTIIDGSSSAPTTTIHSVAPDVTIDSTALSATGNPDVGTEIKGTTPDGTIKPVICTDNKGTASIAVLEGSNAKEVGIPAHSVHEPVSSSAPHPPTPATSRGRKTQAGETPRRRGRKPKSLAASAGDVILSPVVAVGSGEAYASSVVSSYPQGNVSSSHANAMAGLQKDTIIYKPAALLPEGVKGTLTPSGGDKDEMVKTPLAEDIYAGTVTTSGNANSQLPMIAHNENAGLVQGGTDQNLSVATPTIPVVSEGSTKISEVVVADKPAEKQGARRRRKKTSGTGSEDTGVSTRQRAASRRLYGIGTADIAGTDMSTGEKIGIVKEIDGSCQDTSKGLPNIISPSYEKSGYDSQPSTPIAVPINEAALPSGFSEAHATHSELHPARESISSVGHEKLAGAHLEAPPSVSFQAPVQHETRKDYVGVHSEVATTHPETITTHSSVNPVIDHKLANVQFESHASLHTSGKDITTMPSEVDSGAPSKAPGRRRKGSAREPRTRSNSATAASERRARLAGSKQPDDIKMAEMSGNPSTAVCSSTQQQEDNTLKAAHATGSVGEEQNNAENRVREVSMPAGILEAKLELTKQTDQAGHNSEQEQEMVSAAKSASANDEEHKVHEVHQIIADHNALPSSAQYTLQDKIDSSADAGLVPCDKIASVVIAVDDQDPSNASDKDAPASTEDDGNGLQSECVHVDLVLAKQDNTKVEDTQKSNQPAEQGESLEMTGSKFRSETRLEKTEETVDKSGGDNLPTIEKNDDSPIERSSPSADKIAQVAYGGEAGTETTTVEAVSAMNSDGLQDVRNALSTHGLSTNDITVASEEHRDPESHLSGEVSMSGGSSELKLESLNQSESACQSGEVTLEDTHATLDIQIPALIESEEKKSPGGDVHGSEEQHMHEVLHNTVDGSISPSNREQDKLQVHIDTNTDVDIPSSDKDHSTDIVLAGCQAPCDASGKDKLSTCDASGKDMAAPTDDDLNCLQSEDTVIPVADAKDETMLVKAIQNDEMSMGSSHGLPATIQSTDSDRLAEEGESAEITGSKFSCGMEQEKMEEPLDKSVTDNQTSSQINDGSNNMDSQKVDSSLQAADGGDLLVSRGTSVETTTAINTDASDESISVSTQSVKEASTVEIGASTNDIAPACELRKDFESHVSGCVSKPVGLSELRLEELSQTKSVSQSIVANAEETSTRSDIETPAMDASESKSPESDVHELSERVEFMGPTPSANEKSNELHSQELVKMISAAETASTEGHREKDTCEVDHKIDCTIFSPIGDQDTRNRIDGDTDCGVPSCQRNAAFDSENEVSAEINLTGSQAPCDAPNKATPAPTEDDHNGQESEDTVIGAEQGTVEVEAMQIDGISKSYSSDSHATLQSSDSNQLVNSDSKFESSKKHDKTDETSNESRGDNPTHSCTNDDSHDKNLVGCSPSEDLNEDNSAQLADGDDLVGSKDTTAAHASGLKELTSGNYVASSSSHVVQDVTSISKMESVQAGSEEIYHGYSDETIHSARIKPVVGTEITENASVASAPVITIQPDIETEAGVTASLTVLEGSIAEEVDTQVESGHDLVTSTAPLSPAPLPGESHACTDVSCPVAVEVSETKLESANHTASQLGAACTETPNALLNTLIPALPESEETKLSGSDTDGKTIMAELASSSDEHDKVHEVGNETGDDNKLPSSVAEDAVQGEIDGSADMDSQIIAGSSEAEINNSTVATIADSQIPFDPSDKDTLAEDGNGLQREGTTVDVTGSKEDDMEAEEKQMDDSHLPAALQSTESSQPTEHAAPTQDDGNGLQCEGTTVDVSGSKEDIMEVEEKLIDDISGSPSSHLPVALKSTESNQPAEHAVPAEDDGDGLQSEGTAVDVVDSKKDDMEVEEKQIDISRGSSSFLPGALESAELNQPAEHTAPTEDHGNCLQSEGTAVDVPCSKEDNMEVEDQFDGISRGPSSFSPDTLESAELNQAAEHAAPTEDDGNGPQSEGTSVDVAGSKEDNIEVEEKIDDISRGSSSHLPDVLQSTPNQRAEQECLDNSDDVNTSVVSSHAPLSGPKFTCVKELEKADETLETSDAQVADEVCLQTNDGAHNMASGSCSTLEDKNEDSSAQIADCEDLLLRKGTTVDDLDGCVEGHSGLSTHSNDEVRNLVEIVKGMNDTTAGSEVHVDPESHVSDEVSMPVAPSELKVELKNQSEPACQFGAVIVEESNVSLGIQTPALAESEEMTSGGFMHGKEVCASEQTNIGAAAEPASTKDDHDMHEVDKEIVHCTISSPIGDQENLQGNIDGKMDVGLAACQTESDFVSGNDHSRETDLAGSQAPYDASDKEDTAADLIGPKQATLEIEKMQIDGIPEGPSSVPAVLQLTDSNQPAEQERLENSDSKFASTKDQGRVDGTSNLSGGDNAKCSLTNDDSQTVNLVGYSPSEDSNDDDSVQAADSDGVLGNKEGTDDVISAACTDDVSMLKTESIDRHGSDEVDHSTAPSAAIKQESGTEVTCDASVPVSESSISKEIGTSPECDDDQVATAAPHPPTPLSDATDVSADVQIPAGISEAKLEQPNETTSPSGAATEENNTVVSTQIPTLAESEDRTPADTAIQGTEVDSAEPASVSDDENKVTAADDSALPSTGPEDTADDKIDSSADASEK

SEQ ID NO: 14534 - protein, 125 aa, Salmonella enterica
SLAKNGTNLFSGDKYAGLSEQALYYIGGVIKHAKAINALANPTTNSYKRLVPGYEAPVMLAYSARNRSASIRIPVVASPKARRIEVRFPDPAANPYLCFAALLMAGLDGIKNKIHPGEAMDKNLY

SEQ ID NO: 14535 - protein, 524 aa, Burkholderia sp. 383
MAIFELMIALLLAILVLHYVGHKLGLPPAVALIIGGGFIAFLPGLPEVHIDPELVLVIFLPPLLMDSALGISLDHLRRHMLGVGALAIGAVLFTTVVVALVTHWLVPSLPWAACAALGALVAPPDAVSARAALQQVKLPRRLLILLEGESLFNDATGLVLFRFAVAAGVTGLFSPAEALGSFTLLALGGVLIGAVVGGAWVILMRHLDEDSLVIAASPLCAWGSYLLAERFHVSGVIATVTTGLICAWFQHRVLSASARLYGTGFWTVTIFILEAFVFLIIGSSLHELIQRGDGLDAMLAEMGVPVLIVVVSVIVARFAWVYVSDAALILLRQLGVTRFHPLGLADATVLSWAGMRGVITLALAASLPDSFPGRDFILVTAIAVILATVLVQGQTLGAVIRWTGLAAPESDKPRLSMSEAEAVIAKVQYELMAKRAYNAAGELVHPMLLDIHKHKAEDMARYARHADEYKSELDARSDTVLELIAAGRTELMRLYRAGDIDEHTLHELTRDLDLEELRAISAKA

SEQ ID NO: 14536 - protein, 581 aa, Pseudomonas aeruginosa
MSDSCLPIAMVQSAQSHRPGTKPEIPALMQTVYTVLTLLLVVGATRLAAQLLPLPLPLIQIAAGALLALPSLGLHIALDPELFLFLFIPPLLFVDGWRIPKREVWGMRWPILMMAFGLVFFTVVGAGYFIHLLIPEIPLAASFALAAVLSPTDALAVSAITQGRLPKRLMHLLEGEALMNDASGLVAFKFAIAAAMTGVFSLVDASLNFLVVAVGGLAIGVFLSWSLGRIRAWMISRGWDDPATHVVLMLLLPFASYMVAEHLGVSGILSAVAAGMMQSWVDLLPRQTSTRLLNRSVWSMLEFAFNGVVFLLLGLQLPDIMKSVANHHGDLLWRSSLLLAYVAAITAVLMLIRYGWVYGYWKLSLRIDRWRGKSPPGLSGISLRRLSALSALSGVRGAVTLAAVLSVPMSLMDGSAFPQRDLIIFIATSVILISLIGATIGLPLLLRGLPASNNGAHERERREAWRKTAEAAIRALESEELPQVEGNDAANTSRVAEARAQIMAEYRQSLDTAPTTDEARDQAQALEIADKALRLKALRAQRLELYRQRRNNEIDDETLGDILRELDQQESWLTNRFARWV

SEQ ID NO: 14537 - protein, 109 aa, Salmonella enterica
NLFSGDKYAGLSEQALYYIGGVIKHAKAINALANPTTNSYKRLVPGYEAPVMLAYSARNRSASIRIPVVASPKARRIEVRFPDPADNPYLCFAALLMAGLDGIKNKIHP

SEQ ID NO: 14538 - protein, 773 aa, Wolbachia endosymbiont of Drosophila simulans
MEPEEQVNVAISLILLGYIEDNFPASLDKHRDKSIFELFFTGRSYKFTEFSNKEIPQAINLWLSRLYLADKPYKLYLMIKDHHEKFELEVQLSLDDEKSFIKLEKALSNQNVKLSILSDLALLSEYIPELEKSIDDNSTLSFNLDNFAPLFLHILPVLRAIGIKVILPKSLQKILKPQLSLNLSTKDKIKEDRESFLTLENLLKFDWKVAIGDKKLSVTEFKKLLKDSRRLVRIVDQYVLLDDKEVEALLKKLDKLPDYLSQAELMQAALTGKVNETKVAFDQQLTSLFNKLNTYTPVTTPNNLIAQLRPYQERGFSWLVQNIENGFGSIIADDMGLGKTLQVIAAILCCKNTGFLDRDRVLVVAPTSILSNWQREMERFAPELKLFVYHGQNRELASDYDVALTSYGLARRDKKELNKIRWFLLVIDEAQNIKNPNTEQTKAIKTIAAKHKIAMSGTPVENRLLEYWSIFDFINKSYLGTPKQFKSSFATPIEKARDKTCLERFMKITSPFMLRRLKSDKSIIQDLPDKIENNRYCSLTSEQTALYQKVVDTTMEKIEKSEGIERKGLIFKLINALKQICNHPSQFGKKKRASIEQSGKMQMLEEILISIGEVAEKSLIFTQYTEMGEIIARLLEERFESEVPFLHGGLSRKARDTMINDFQNLFQSNILIVSLKAGGTGLNLTAANHVIHYDLWWNPAVEAQATDRAYRIGQERNVMVYRLLSTGTFEERIDEMIQSKKELANLTISSGESWITEFNNDQLRDLVNIKNAL

SEQ ID NO: 14539 - protein, 467 aa, Frankia sp. CcI3
MIPLTLAEVASATGGRLDAVPDPGVTVRSVVVDSREVRDGALFVALAGSRVDGHDFAAAAVAAGASAVLAARSVGEPAVIVPDPPSALAALAAYVRDLAAATVVAVTGSAGKTTTKDLLADVLGGLAPTVAAPGSFNNEIGLPLTLLRTEPDTAFVVLEMGARGPGHIATLCAVARPAVGVVLNVGSAHLGEYADGRLGIAAAKGELAEAASEAVVLNADDPLVAAMAVRTTAEVITFGEGGRADVRAGAVDVDRLGRASFDLLAHGEHHRVTLGLVGAHQVPNALAAAAVAIRLGLSPDRVAAALSAARPRSRWRMEVTSTAAGVVVVNDAYNANPESMRAALKALVDMRGKGRAFAVLGPMGELGDAAAAEHDVLGRFAVRLGVDRLIAVGPAARHIHLGASLEGSWDGESVEVTDAEEAVALVAAQAGPDDVVLVKASRSFGLERVAEALVTRFGVLGAGIEGT

SEQ ID NO: 14540 - protein, 240 aa, Glycine max
METKSSSSSTNLVDQSVCPGDVILDLSNMTNQTIKLGGGLRQDCDAISVMKAGRLRFSKPNKYWVENSQKRYVPHAEDSVLGIVVDSRSDNFLVDIKGPALAFLPVLAFEGGTRRNIPRFEIGTLIYARVVKANPGMNPELACTDASGKAAEFGALKDGYMFECTTGLSRMLLSSPTCPVLDALGKKLSFEIAVGLNGRVWVSAASPQTTIVVANAIMNSETLSGAQQRIMVEKLLERIH

SEQ ID NO: 14541 - protein, 184 aa, Pseudomonas syringae pv. syringae B728a
MMKLRFFSIPLLLLAMSGAAMAADCPPLLQGELPKLRAKENIDLCKRFAGKPLVVVNTASFCGFAPQFKGLEALSQRYKGQGLEVLGVPSNDFKQEAKDGEETAKVCYVNYGVTFTMTEPQAVRGDDATHLFKVLAEQSSAPRWNFYKYVVDRQGKVIANFSSMTKPDDPELIAAIEKAIASKP

SEQ ID NO: 14542 - protein, 473 aa, Trichodesmium erythraeum IMS101
MVKTAQDVLNWIKSQDIQVIDLKFIDLPGIWQHLTVHQSQIDESSFTDGVAFDGSSIRGWKSINESDMMMVLDPTTAWIEPFMAEPTLSITCSIKEPRTGEWYSRCPRVIAQKAVDFLKTQGIGDTVYFGPEAEFFVFEDARFDQTENKAYYYVDSIEGRWNSGREEDGGNKAYKPDYKGGYFPVPPTDTMQDLRTEMLLTMAKCGVPIEKHHHEVATGGQNELGFRFGKLVEAADNLMIYKYVIKNVGRKYGKTITFMPKPIFNDNGSGMHVHQSIWKDGEPLFWGDGYANLSKMALHYIGGILKHAPAILGFSNPSTNSYKRLVPGFEAPVNLAYSQGNRSASVRIPLTGTNPKAKRLEFRCPDATCNPYLAFAAMLCAGIDGILNEIDPGPSLDVDIYDLSPEELSKIPSTPGSLEGALEALEKDHEFLTAGGVFTEDLIQTWIDYKMENEVKPMRLRPHPYEFSMYYDC

SEQ ID NO: 14543 - protein, 451 aa, Neisseria gonorrhoeae
RFVDLRFTDTKGKQHHFTVPARIVLEDPEEWFENGPAFDGSSIGGWKGIEASDMQLRPDPATAFVDPFYDDATVVLTCDVIDPADGQGYDRDPRSIARRAEAYLKSSGIGDTAYFGPEPEFFVFDGVEFETDMHKTRYEITSESGAWASGLHMDGQNTGHRPAVKGGYAPVAPIDCGQDLRSAMVNILEGLGIEVEVHHSEVGTGSQMEIGTRFATLVKRADQTQDMKYVIQNVAHNFGKTATFMPKPIMGDNGSGMHVHQSIWKDGQNLFAGDGYAGLSDTALYYIGGIIKHAKALNAITNPSTNSYKRLVPHFEAPTKLAYSAKNRSASIRIPSVNSSKARRIEARFPDPTANPYLAFAALLMAGLDGIQNKIHPGDPADKNLYDLPPEEDALVPTVCASLEEALAALKADHEFLLRGGVFSKDWIDSYIAFKEEDVRRIRMAPHPLEF

SEQ ID NO: 14544 - protein, 983 aa, Ustilago maydis 521
MAARVKQRSNGYLNGKSKAPNHDEDVDGSQDEEPLHAATSSAASSNNRAPSDKKGTAAQDVDPSVHEERFNKLKFLLQRSSVYSRIMGEKMEKERKARAEAAAKQEVRREAAAAKADNAPADLQPSATTRKTRSAAQAADDKPSAFTAPELKSRRKDSRKRKTDNSYDVSNYIDEDDLKQTKQQAEHANKKAKTESPDMSEAKQHAGATANESGRRKQPKLVTGAKMREYQLDGLEWLISLYENGLNGILADEMGLGKTLQTISFLAHLREKGVWGPFLIVAPLSTINNWVLEFERFTPNIPAIMYHGDPDTRRDLRDHRLSMPRDKENQKDFPIVVTSYELIIRDRKWLANYPWKFIVVDEGHRLKNLNCRLIRELKTYRSANRLILSGTPLHNNLAELWSLLNFILPDIFDDLATFETWFDFSDIHDEQGQSRILSKENSSQVITQLHEILKPFLLRRLKVDVETDLPPKKEYLLYAPLTELQKELYNAVVNGEIRRWLLERKTGLPWAQIQDILDDPDGINTASSSVPTTRVATAEQSRDHSPHPWAVANKCKDVHANLNVDDDEVNESASDRNGFHKRGTKLSPSRSAASHTVDNDQTSSGASTPRRRTSRRAKHGVDYQADEMTDNCYFDRLEKQLNTGPKPLSAAQAERQAKLYSVREAQKQIKNMHLDNTVMQARKICNHPFLFDWPVDKESGTLVVNKDLINASGKMLMLNRLLDELFHRGHKVLIFSQFTTMLDIIEDWANEFKRLRTCRIDGTTPQDERRAQMKSFNEDKGRDACNLFLLSTRAGGLGINLVAADTVIFYDSDWNPQMDLQAQDRVHRIGQTRPCLIFRLVSASTVEERILRRAGNKRKLEALVIQQGKFRLPAGYQSSLGGGKKKTEDELRDIASQLLALESEQVKLVKDENDQIITDHELDLLLDRSPAAYQRKMGWVSNAHADDPKKPGKKSAPGRSAFEVTETKTDEANEEIAKLLASN

SEQ ID NO: 14545 - protein, 451 aa, Neisseria gonorrhoeae
RFVDLRFTDTKGKQHHFTVPARIVLEDPEEWFENGPAFDGSSIGGWKGIEASDMQLRPDASTAFVDPFYDDVTVVITCDVIDPADGQGYDRDPRSIARRAEAYLKSSGIGDTAYFGPEPEFFVFDGVEFETDMHKTRYEITSESGAWASGLHMDGQNTGHRPAVKGGYAPVAPIDCGQDLRSAMVNILEGLGIEVEVHHSEVGTGSQMEIGTRFATLVKRADQTQDMKYVIQNVAHNFGKTATFMPKPIMGDNGSGMHVHQSIWKDGQNLFAGDGYAGLSDTALYYIGGIIKHAKALNAITNPSTNSYKRLVPHFEAPTKLAYSAKNRSASIRIPSVNSSKARRIEARFPDPTANPYLAFAALLMAGLDGIQNKIHPGDPADKNLYDLPPEEDALVPTVCASLEEALAALKVDHEFLLRGGVFSKDWIDSYIAFKEEDVRRIRMAPHPLEF

SEQ ID NO: 14546 - protein, 592 aa, Medicago truncatula
MEKELLEGADPVHDELIHDDKKRRKGGFITMPFIIANEALAKLASVGLIPNMILYLTEDYRIRVVKATKIMFLWLAATNFSPSVAAFVADSYMGRFLAIGLGSILSFLGMAVMWLTAMIPQARPPSCNHHSTENCQSATSSQIAIIFSCFALISIGGGGISCSLSFGADQLSKKTDPKNQRVLESFISWYIASQAIAVVFSMTAIIYIQDHLGWKLGFGVPAAVMFLSTLLFFLVSSRYVKNKPHSSMLSGFAQVIVVSYKNRNLSLPPKDSVGMYHQNNDSTLVAPTDRLRFLNKACIIKDKEKDIASDGSASKRWNLCTIDQVEELKAIIKIIPIWSSSIMVSVSSSQSSYHLLQAQTMDRHITSNFEIPAGSFGVFIMLAVFITAGVYDRIFLPLASKIRGKQVTISAKKRIGIGIFFSILDLVVSAIVETIRRKKAIQEGYIDNPKAVLNMSAMWLIPHNILCGMSEAFNAIGQSEFYYSQFPSSMSSIAASLFTLGSAFGNLLASLIVSIVDDITSRGGKESWVSDNVNKGRYDKYYWLLTIMSILNIMYYLICSWTYGPSDVEATSEKEERLTIRASRVHHEKEAS

SEQ ID NO: 14547 - protein, 92 aa, Bixa orellana; identical to SEQ ID NO: 1098

SEQ ID NO: 14548 - protein, 500 aa, Arabidopsis thaliana
MFEKNGRTLLAKRKTQGTIKTRASKKIRKMEGTLERHSLLQFGQLSKISFENRPSSNVASSAFQGLLDSDSSELRNQLGSADSDANCGEKDFILSQDFFCTPDYITPDNQNLMSGLDISKDHSPCPRSPVKLNTVKSKRCRQESFTGNHSNSTWSSKHRVDEQENDDIDTDEVMGDKLQANQTERTGYVSQAAVALRCRAMPPPCLKNPYVLNQSETATDPFGHQRSKCASFLPVSTSGDGLSRYLTDFHEIRQIGAGHFSRVFKVLKRMDGCLYAVKHSTRKLYLDSERRKAMMEVQALAALGFHENIVGYYSSWFENEQLYIQLELCDHSLSALPKKSSLKVSEREILVIMHQIAKALHFVHEKGIAHLDVKPDNIYIKNGVCKLGDFGCATRLDKSLPVEEGDARYMPQEILNEDYEHLDKVDIFSLGVTVYELIKGSPLTESRNQSLNIKEGKLPLLPGHSLQLQQLLKTMMDRDPKRRPSARELLDHPMFDRIRG

SEQ ID NO: 14549 - protein, 632 aa, Medicago truncatula
MDKELQLCSVDDDEMVSQQPQRRKGGLITMPFIIANEALARMASLGLLPNMILYFMGSYRLHLAKATQILLLSSAASNFTPVVGAFIADSYLGRFLGVGLGSFVSFLGMGMLWLTAMIPAARPPPCNNPTKGCKSATTGQMAMLLSAFGLMSIGNGGLSCSIAFGADQVNRKDNPNNHRVLEIFFSWYYAFTTISIILALTVIVYIQEHLGWKIGFGVPAALMLLSTICFFLASPLYVKITKRTSLITGFAQVTTAAYKNRKLQLPPKNSPQFYHHKKDSDLDLVIPTDKLRFLNKACVIKDHEKDIASDGSAINPWRLCTVDQVEELKALVRVIPLWSTGIMMSLNIGGSFGLLQAKSLDRHITSNFEVPAGSFSVIMVGSIFIWIVLYDRVLIPLASKLRGKPVRISPKIRMGIGLFLNFLHLVTAAAFESIRRKKAIQAGFLNDTHGVLKMSALWLAPQLCLGGISEAFNAIGQNEFYYKEFPRTMSSISASLCGLGMAAGNLVSSFVFNTIENVTSRGGKEGWISDNINKGRYDKYYMVIAGVSALNLLYFLVCSWAYGPTVDQVSKVSDENDSKEKDSTEFKKVNPLFDETSSNGKELTEIKNGGQAEKVFKISEENGSKEEELTKD

SEQ ID NO: 14550 - protein, 157 aa, Synechococcus sp. WH 8102
MAISVSNVTVTTPDGSSKSLGDYSGKVLLIVNVASRCGFTKQYAGLQGLNAAYADKGLAVLGFPCNDFGAQEPGSLEEIKSFCSTTYGADFELFEKVHAMGSTTEPYSTLNQMDPTGDVAWNFEKFLVGKDGTVIARYKSGVDPEELKAPIEAALAA

SEQ ID NO: 14551 - protein, 593 aa, Yarrowia lipolytica CLIB122
MIIHTSLNQPIDDREFFDGTIPDFIRTSPFVNDTTPFFIDAATGEQLSQRQLWKMSNDFLTIFRQHGLGNARDNVSDPSMGDVFITLFPNCIWAGPVHWAALDAGATLSPASCSYTVQEFAHQLQLVVPKMVVYSEPFKQLLEDAIIVSKTNPTILSLEQLIEDSERVPLAQANFQFANRLQLRPKESITRVAYLAMSSGTSGGLFKAVRITHGNITSNAIMSTKSSNALLKTNQVASAIIPVSHLYGLAQFLVFGVHRGTAAVFHKGFDFIEFLDAAVKYKVNIFPLVPPIIILLAKHPFTQKYVPDLKRNLTTVLSGAAPLGVKATEEFLERITGRKDGVSEYGTLRVIQGWGMTETSPVCTLFDPEVPVAHIRSVGKLVSNTEARVVSEGVDQPACDVDPASLDAAIKAGGLPTGEILIRGPHVMDGYHKNPSANADAFEEASDWTPDMPWYKKRWLRTGDVGFFDLQGRVMIVDRTKELIKSMGKQVAPAELEDALLANPLVADCAVIGVMDVDKGTESPRAFVVLRDPKADAVGILKSLNSQMPKYKNLHGGIVVVEAVPRNPSGKVLRRLLRDRKDDVVLGLDVSKL

SEQ ID NO: 14552 - protein, 311 aa, Zea mays
AIPADTTRNQNRRKPICLRQAPSQPSPPPVHRASPPTAFIRHRSTPCSAARPRVPTRPLPTFLSLSLALCSPRAVPAPRATWLPRFTSLLSAANSAAAATASRLPSAAAGRASTFVRFPHHPTGWAGASVAAPRTARKRAPGVAYATAATEKSIYDYTVKDIDGKDVPLKKFKNKVLLIVNVASQCGLTTANYTELSHIYEKYKTQGFEILAFPCNQFGAQEPGSNTQIKQFACTRFKAEFPIFDKVDVNGPNTAPIYKFLKSSAGGFLGDLVKWNFEKFLVDKNGKVIERYPPTTSPFQIEKDIQKLLAA

SEQ ID NO: 14553 - protein, 288 aa, Cyanobium sp. PCC 7001
MAPSPGWPTEGWIDEIHDGVRYGLAGRVIAETDSPFQKVTIIESERYGKGLLLDGCWMTAERQERHYHEALVHPALCGADRIERVLVIGGGDGGTARECLRHAGVRHLDMVEIDGQVVAWSQKHLPAIGGGCWGDPRFHLTVGNGIAWAADAAAASYDVVIVDGSDPAGPAEGLFNRAFFEHCRRILRPGGVFATQSESPEAFREVHLAMVRLLREVFGHADPLYGWVPMYPSGWWSWTFAATDGRRYLRPDPTRAGAVVEGCEIWSPRWQRGAFEAVPVAIERALAG

SEQ ID NO: 14554 - protein, 973 aa, Pseudomonas syringae pv. phaseolicola 1448A
MKLTKNNLSRLDADIALPAYTVESTRQGIAHIGVGGFHRAHQAFYTDALMNSGEGFEWSICGVGLRTEDKAVRDALAQQDYLYTLYELGDTPDTETRVIASISGMLLAEDSTQALIDKLSSPDIRIVSLTITEGGYCIDDSNGQFMAHLPQIQHDLAHPDQPKTVFGFLCAALARRRAEGTPAFTLMSCDNLPHNGAVTRKALLAFATLRDADLHDWIKDNVSFPNAMVDRITPMTSAAHRLKLADEKHIDDAWPVVCEPFVQWVLEDKFVNGRPAWEKVGVQFTDDVTPYEEMKIKLLNGSHLALTYLGFLKGYRFVHETMNDPLFVRYIRAYMDLDVTPQLASVPGIDLEGYKDTLIERFSNQAIADQLERVCSDGSSKFPKFTIPTINRLIVDQGNFERASLVVAAWSLYLQGVDENGTTYKIPDPRAEFCQALVADDELITQRLLQVEEIFGVAIPKSAEFVAAFEQNLNDLRTLGVSGTIDCGTQGTKVLVLDTESSTVLGEGSASHSLISDHNGRREQDVGQWLDALQQATRDALAQSGVSGQQILGIGVSGQQHGLVLLDAQGEVLRPAKLWCDTESAPENQRLLDYLGGAQGSLQRLGLVIAPGYTVSKLLWTKEQYPQLFERIDKVLLPHDYLNYWLTGRCCTEFGDASGTGYFNVRTREWDLPLLAHIDPSDRLGKALPQLVQAHEAVGVLRPEIARLLDLNPAALVSSGGGDNMMGAIGTGNIQPGLITMSLGSSGTVYAYADEARVSEHESVATFCSSSGGWLPLICTMNLTNATTAIRELFALDIAGFNQAVAQAPIGAEGVLILPFLNGERVPALPDATGSIVGLDSTNLTQANLSRAVVEGTTFGLRYGLDLLRDSGIKSEKIRLIGGGSKSAVWRQIVADIMNTPVICTDHAEAAALGAAIQAAWCWSHADGKAEGLQQLCERCVSLDQSSETHPVVHNVAAYQQVYQRYQAQLRKV

SEQ ID NO: 14555 - protein, 120 aa, Salmonella enterica
CHMSLAKNGTNLFSGDKYAGLSEQALYYIGGVIKHAKAINALANPTTNSYKRLVPGYEAPVMLAYSARNRSASIRIPVVASPKARRIEVRFPDPAANPYLCFAALLMAGLDGIKNKIHPG

SEQ ID NO: 14556 - protein, 423 aa, Bradyrhizobium sp. BTAi1
MGSTARAATADTYRQLNLFGDVFERVRSDYVEKPDDSKLVESAISGMLSGLDPHSSYMDAKSFRDMQVQTRGEFGGLGIEVTMEDGLIKVVSPIDDTPASKAGIQANDIITNLDEEAVQGLTLNQAVEKMRGPVGTKIKLKVVRKGADNPLDITLTRDNIRVRSVRSRIESDDIAYIRITTFNEQTTEGLKKSIADLQTQIGDKLKGYVIDLRNNPGGLLEEAVTVSDAFLERGEIVSTRGRNAEETQRRSAHAGDLTKGKPVIVLINGGSASASEIVAGALQDHKRATLVGTRSFGKGSVQTIIPLGAGNGALRLTTARYYTPSGKSIQAKGIVPDIEVLQDVPDELKSRTDTKGEASLRGHLKNDGDEKTGSQSYVPPDAKDDKALKLAADLLHGIKNSANTPAPTTDKAAADKPATKAAN

SEQ ID NO: 14557 - protein, 128 aa, Salmonella enterica
FMPKPMFGDNGSGMHCHMSLAKNGTNLFSGDKYAGLSEQALYYIGGVIKHAKAINALANPTTNSYKRLVPGYEAPVMLAYSARNRSASIRIPVVASPKARRIEVRFPDPAANPYLCFAALLMAGLDGI

SEQ ID NO: 14558 - protein, 609 aa, Mycobacterium tuberculosis
MARAVGIDLGTTNSVVSVLEGGDPVVVANSEGSRTTPSIVAFARNGEVLVGQPAKNQAVTNVDRTVRSVKRHMGSDWSIEIDGKKYTAPEISARILMKLKRDAEAYLGEDITDAVITTPAYFNDAQRQATKDAGQIAGLNVLRIVNEPTAAAPGYGLDKGEKEQRILVFDLGGGTFDVSLLEIGEGVVEVRATSGDNHLGGDDWDQRVVDWLVDKFKGTSGIDLTKDKMAMQRLREAAEKAKIELSSSQSTSINLPYITVDADKNPLFLDEQLTRAEFQRITQDLLDRTRKPFQSVIADTGISVSEIDHVVLVGGSTRMPAVTDLVKELTGGKEPNKGVNPDEVVAVGAALQAGVLKGEVKDVLLLDVTPLSLGIETKGGVMTRLIERNTTIPTKRSETFTTADDNQPSVQIQVYQGEREIAAHNKLLGSFELTGIPPAPRGIPQIEVTFDIDANGIVHVTAKDKGTGKENTIRIQEGSGLSKEDIDRMIKDAEAHAEEDRKRREEADVRNQAETLVYQTEKFVKEQREAEGGSKVPEDTLNKVDAAVAEAEGGTWRIGYFGHQVGDGEAGPGVAGSGASDLRSSSGCVTGHWRCPPRRRAGRCPPRLG

SEQ ID NO: 14559 - protein, 613 aa, Listeria monocytogenes str. 4b F2365
MSKIIGIDLGTTNSAVAVLEGGEAKIIPNPEGARTTPSVVGFKNGERQVGEVAKRAAITNPNTISSIKRHMGTNYKETIEGKDYSPQEISAIILQYLKSYAEDYLGETVDKAVITVPAYFNDAQRQATKDAGKIAGLEVERIINEPTAAALAYGMDKTETDQTILVFDLGGGTFDVSILELGDGVFEVHSTAGDNELGGDDFDKKIIDYLVAEFKKDNGIDLSQDKMALQRLKDAAEKAKKDLSGVTSTQISLPFITAGEAGPLHLEVTLTRAKFDELTHDLVERTIAPTRQALKDANLSASDIDQVILVGGSTRIPAVQETIKKELGKEPHKGVNPDEVVAMGAAIQGGVITGDVKDVVLLDVTPLSLGIETMGGVMTTLIERNTTIPTSKSQTFSTAADNQPAVDIHVLQGERPMAKDNKTLGRFQLADIPPAPRGIPQIEVSFDIDKNGIVTVRAKDLGTGKEQNIVIKSSSGLTDEEIEKMVQDAEANAEEDKKNKENAELRNNADQLVFTVDKTLKELEGKVEEEEVKKAEAARDELQEALKGEDFEAIKEKTESLNEIVQNLSVKLYEQAAAEQQAAGGAEGQEAPQNDDVVDAEFEEVNDDDKENK

SEQ ID NO: 14560 - protein, 378 aa, Streptococcus pneumoniae TIGR4
MKHSVHFGAGNIGRGFIGEILFKNGFHIDFVDVNNQIIHALNEKGKYEIEIAQKGQSRIEVTNVAGINSKEHPEQVIEAIQKTDIITTAIGPNILPFIAELLAKGIEARRVAGNTQALDVMACENMIGGSQFLYQEVKKYLSPEGLTFADNYIGFPNAAVDRIVPAQSHEDSLFVVVEPFNEWVVETKRLKNPDLRLKDVHYEEDLEPFIERKLFSVNSGHATSAYIGAHYGAKTILEALQNPNIKSRIESVLAEIRSLLIAKWNFDKKELENYHKVIIERLENPFIVDEVSRVARTPIRKLGYNERFIRPIRELKELSLSYKNLLKTVGYVFDYRDVNDEESIRLGELLAKQSVKDVVIQVTGLDDQELIEQIVEYI

SEQ ID NO: 14561 - protein, 1103 aa, Magnaporthe grisea 70-15
MPAELVVIDSSESEGKGLGADRCSKTALGKRKAEPVPPPIETIPWTDSEEEAEKERTEKKQAKGRRSAKKKKSIKSEPGNAITNHGRRNARSLAEAIRDLGEDTAPEDNVHADIPEYLKHRKRQFNRDRATLQEAGLLLPPDYTDIDFTDDEDDGQRREVRPQFGDRIKPCRPYEDVELERSAGIIPAPIAQYLRDYQVDGVSFMHEAFVYQRGCILGDDMGLGKTVQVAAFLTAAFGKTGDFRDSKRMRKVKRLGRRYYKVLVVCPSSVMENWRQELARWGWWKVESYHGPGKDDVLDTAKSGRLEVMLTTPATYRLQKERVNTVSWDAVVVDECHNIKERRSEITKAMTEVNALCRIGLTGTAIQNKYEELWTLLNWTNPGRFGTFGEWKTSISRPLTLGQSHNATLQELSMARKTAKKLVQNLLPDYFLRRMKSLIAHQLPKKRDRVVFCPLTDLQTTAYERFIASEEVELVRRSHELCDCGSGEKRGHCHYKHLEDGRTWNMLVFPCILTLQNLANHLTLIVPKIGEPGDKAEKSLARLRICVPDKWEQLYKLRDSPLIQMDPEFCGKWRVLKDLLKFWEGNGDKVLVFSHSVKLLQVLRALFQTTHYSYSYLDGSLAIEERQQIVDDFNSDPQQFVFLISTKAGGVGLNITSANKVVIFDPHWNPSWDLQAQDRAYRIGQTRDVDVFRLVSQGTIEEIVYARQIYKQQQANIGYNASNERRYFTGVQQDNSRKGEIFGLENIFTFRPDRVVLRDIVNKTNVAEAKVGVYLQDIDIESAIKDNEEAGIPIKLEPGSSGDAEERGASQLADFLTSKPQVKPGGENHERSPGHDAIQAILSSAGVGYTHDNAEVVGTSKVEAQLSRKAERDHEIDEKEALKVLFADSQDVGARPLYEHDQEAWDVDEMGEGDAWQSKRPETWFRPRLRYNPPEEVRLRQFCSMAKEFSFSNAIEFALVVESWTQEQRRNCLDMFYKQRESELLKTTLAGEAKKLDKHEPEVKTESTSARTKTEVPEEHGMVGLENVQTKSKVQIKNEAGVADSKVKMEPVNDEPESDSDDLDAVKVKDEDLSKIKYEPGLATIKRQSSIFFFDDDDEDDEL

SEQ ID NO: 14562 - protein, 174 aa, Dendrobium grex Madame Thong-In
MGRGRVEMKRIENKINRQVTFAKRRTGLLKKAYELSVLCDVEVALIIFSNRGKLYEFCSSRSMLKTLEKYQKCSDGAPEMTMTSRETQSSQVEYLKLKSQVEALQRSQRNLLGEDLNPLGGKDLDQLERQLEASLKQIISTRMQYMLDQLGDLQQRELLLFETNKSLGTRVSAL

SEQ ID NO: 14563 - protein, 481 aa, Brucella suis 1330
MSNRELSDWLWTSDAMVEAMEGRPFGNLPAGVTGISIDSRALKPGEAFFAIKGEQFDGHDFATAAMAAGAGLLVVAEHRLPAFGNTKVPMIVVEDVLEALIRLGIAARARSKAQIIAVTGSVGKTTTKEALRHVLSDVGKVHASAASFNNHWGVPLTLARMPADVDYGVFEIGMNHHGEIRPLVKMVRPHVALITLIAPAHLGHFANLEEIAVAKAEIFEGIVPGGYALLNRDDKRFRQLQELAEKAGVEHIATFGENARADYRLRDVKLHPTCSCMTVKIGTHEAAVKVGIPGRHVVQNMLAVLGAAHLVGADIAKVMMAMATLSAQGGRGARHVLQHPEGAFTLIDESYNANPTSMRAALSLLHSTVPEGSRGRRIAVLGDMVELGRQSGKLHADLARPIVDAEVNTLFIGGSEMSVLKNALPVEIQTEYRQSTDELLPLVVKAVRPGDVVMVKSSNRTGFSKIVKALIAQFPPVEAAE

SEQ ID NO: 14564 - protein, 328 aa, Lotus japonicus
MAMQTANLIEHEGIAHNFVGQLSSATSAPWWSAFGSQAVYGESCGQMKPFSLEPPISVDQLAAGKQSARGAEQVLAKGHTTQFTIFPDDCKVLGNAQKPQTTISLQSSPTDTHSRFELGFSQPMICAKYPYTDQFYGLFSTYGPQISGRIMLPLNLTTDEGPIYVNAKQYHGIIRRRQSRAKAVLDRKMTKRRKPYLHESRHLHALRRPRGCGGRFLNTKVSANGNGKTGRDVKKTGGEQLQSSGSQGSDVFQSEVGTLNSSKETNGSGPNVSGLEVTSMYSRGGFDTFSFNHLGSSVYPLADMVDCGRGIMPTKWVAAGGNSCNLNT

SEQ ID NO: 14565 - protein, 488 aa, Brucella suis 1330
MKLKEIALFNELASGEAGEVEITGITSDSRAVQRGFLFAALKGVKADGAVFAADAVKRGAVAIIAGKDTAIADAGVPVLHVDDPRHVLAIAAAQFYGKQPEVMVAVTGTSGKTSVASFTRQIWAYAGFPAANIGTTGVFSPTRSDYNSLTTPDPVELHRVLAELTSEGVTHAAMEASSHGLDQRRLDGVRLAAGAFTNLGRDHMDYHATIDEYLGAKMRLFNALLPKGAPAIIFADDQFSAQAIEAATLAGCDVKTVGRKGNFIALKRVEHERFRQHVEVRIGEEIFEIELPLAGDFQVANALVAAGLAMVTGVPAAAAMRALALLKGAPGRLDLVGATEDGAPAYVDYAHKPEALENVLTSVRPFTTGRVIVVFGCGGDRDKGKRPIMGEIASRLADVVIVTDDNPRSEVPAQIRSEIMAAATGATEIGDRREAIFTAVSMMQPGDTLVVAGKGHEEGQIVGNITLPFSDHAEVAAALAARLEEHPK

SEQ ID NO: 14566 - protein, 247 aa, Dendrobium grex Madame Thong-In
MGRGRVQLKRIENKINRQVTFSKRRSGLLKKAHEISVLCDAEVALIVFSNKGKLYEYSTDSSMEKILERYERYSYAERALFSNEANPQADWRLEYNKLKARVESLQKSQRHLMGEQLDSLSIKELQRLEQQLESSLKFIRSRKTQLILHSISELQKMEKILLEQNKTLEKEIIAKEKAKALVQHAPWEKQNQSQYSSALPPVISDSVPTPTSRTFQARANEEESPQPQLRVSNTLLPPWMLSHMNGQ

SEQ ID NO: 14567 - protein, 1056 aa, Oceanobacillus iheyensis HTE831
MKSIKDIDIQKLFPSAFYKRGLTYYKNDQVKDVVFDRNHNVWTATVQGSEDYFVEIGLTDMEKGSIDTFCDCPAFETFGSCKHIVASLIAISTLENNGDASIRQPNFYRSSRFIEAMSNILTPLDAVEEENYSSSEMSVEYIGSWTYDRRLQLEIKTGEQHRYVVRNVASFLDAVQDQEPFSFTKKFTYEPSIHSFLEADMEILRILHDLCKNEELYDSYTFGGRSTDRRYVTIPPYVVKDLLFKLVDRNFYIVDNVTQYKDIQLQENELPFQFYITKQDEHVVLSMSELKETIFFPLYNILFQQGVFYFPTYEQIPVLQQMEKFRFEDMNFDVPKEQTDTFLSEVIPSLQRIGDIDMDDHLSEELIKAPLQAKCYLELRDGLIIGKLEYQYGSHRIDPFQGKKDHQVMIIRDVPQEKLIMKYIEDANFRYNGKELYMDAEEEDLYHFLYHVLPYLDNYVELFLSSEFRGLFIENEPEPYTSVRMEGQSNLLEIGFNIDGINDNEVNKILQAVIERKRFFRLQSGQMMNLETEEFSSMQRLFDDMRISKEELLDGKVQMPAYRGSQLDDLIETKKHYDPHFRDLLSHLHSPEEQVYEIPENVQANLRSYQKVGYQWFKSLSQYHLGGILADDMGLGKTLQSITYLVSESNGETIGPHLIVVPSSVVYNWKNELEKFAPHLQVAVLTGNPIERHQVMSESTNKDIWITSYATLRQDIEFYQEITFQTLLLDEAQYIKNYQTKTSRAIRQIKATRRFALSGTPIENSIEELWSIFQVVLPGLMPDQRSFKQLEPKKIAAITRPFILRRLKQDVLKELPEKIESVHVSELTREQKDLYVGYLRQVQQEAVQSFKENGFQQNRMKILAGLTRLRQICCHPSMFIENYEGASGKLEQLMETIKTALDNGKRMLIFSQFTSMHEIIQERLKKEGYGYFYLHGQTSSKERVEMSERFNHGENDIFLISLKAGGTGLNLTGADTVILFDLWWNPAVEDQATGRAHRFGQKKVVQVIRLVTEGTIEEKIYDLQQRKRELIDQVIQPGETMLSSLNEDDIKELLSL

SEQ ID NO: 14568 - protein, 1039 aa, Candida glabrata CBS 138
MTSEVYTVADRPKEYWDKRKAKFILADDPKVAKQKDSGDTYNRFKYLLGLTDLFRHFMSLKAKNDKNIQKLLKTLDAESSAKSGKADPGSRHHRKSEKEEDAELMAEEEAEVDEEDDLNFVTESPSYIQSGKLRDYQIQGLNWMISLHENKISGILADEMGLGKTLQTISFLGYLRYVKKIEGPFLVIVPKSTLDNWRREFFKWTPNVSTTVLQGTKEQRQDILQNIVLEARFDVLITSYEMVIREKGYLKRLAWEYIVIDEAHRIKNEQSALSQIIRLFYSKNRLLITGTPLQNNLHELWALLNFLLPDVFGDSEVFDDWFQQNNSDQDQEVVVQQLHAVLNPFLLRRIKADVEKSLLPKIETNVYVGMTDMQVQWYKSLLEKDIDAVNGAVGKREGKTRLLNIVMQLRKCCNHPYLFEGAEPGPPYTTDEHLIFNAGKMIVLDKLLKRLKEKGSRVLIFSQMSRLLDILEDYCYFRNYNYCRIDGSTSHEERIDAIDEYNKPNSEKFVFLLTTRAGGLGINLVTADTVVLFDSDWNPQADLQAMDRAHRIGQKKQVHVYRFVTENAIEEKVLERAAQKLRLDQLVIQQGSGKKTANLGNSKDDLIEMIQYGAKNVFEKNGTTISVDADIDEILKKGEAKTHELNARYEALGLDDLQRFNGMENQSAYEWNGKTFEKKAKDTVTEWINPSRRERRREQTTYSVDDYYKDIIGGGSKSNKGTPQPKLPKAPKVTHGQDYQFFPKEFYELQEKEQLSYKKKINFKVTSSDVSIETEEDDEEGEKQLTSKEKKALTDAKIKEEQEKIDNAPDFTDEDELEKQRMLDTAFTNWNRRDLLSFISACAKFGRSNMNKIKYAIDSKTPEEVEEYAKVFWERYTEINGYEKYINSIENGERKLAKLEFQEQLLNEKLDQYNYPFYELSIQYPPNNARRTYNTMEDKFILMTVRKYGLRAERLYEKIKQDIMESDLFKFDWFIRTRSIHELSKRVTTLLTLITREFDNPDARKKRSRPGTKEDMDGLDEGTENPDHMEKKPKLPSSA

SEQ ID NO: 14569 - protein, 485 aa, Clostridium thermocellum ATCC 27405
MKLKDLVKGLNVLEVEGDMDVEIKDIAYDSRKAKAGSLFVCIEGFKVDGHKFIPQAIENGTRAFLVQKDVDVPDDATVVRVKDTRYALASVADIFFGHPSSKFNLVGITGTKGKTTTTYMIKSILEAFGQKVGLVGTIANMIGHEVLPTDRTTPESYDLQELFSEMVQKNVNSVVMEVSSHALELHRVSCCEYEIGVFTNLSRDHLDFHKTFENYLNAKIKLFGMCKKGLINIDNEFGPKVVDSARCEVYTMGIDNKADLRAVDIVHHPDSVDFTVVSPWFTGDVRVNIPGKFSVYNALAAIGTCALMGVPFEYIKKGLEKVTVPGRAEVLDIKKDYTVMIDYAHSPDSLENILTTVKAYAPGRVVCVFGCGGDRDKTKRPIMGRISGQLADFTIITSDNPRTEDPDAIIRDIEEGIKQTGGLYTTITDRREAIKYALMNAKPKDIILLAGKGHETYIILKDKTIHFDEREVVRDILKELDSGNN

SEQ ID NO: 14570 - protein, 186 aa, Oryza sativa; identical to SEQ ID NO: 13272

SEQ ID NO: 14571 - protein, 189 aa, Oceanobacter sp. RED65
MLRSTITLAFMIGVTLIVSYQAKAGEDNTKDCPQWLDMTLHKLHSKETVDLCSVVTGHPLLIVNTASHCGYTKQFSGLEALHQDFQDMGLVIIGFPSNSFNQEASSEAKTASVCFKNFGVTFLMSKPVNVRGEDAHPVFKHLNQQRGEPSWNFNKYLVSPNGEVLKRYESSVTPSSQRLRNDIRTQFSL

SEQ ID NO: 14572 - protein, 614 aa, Bacillus halodurans C-125
MSKIIGIDLGTTNSCVAVMEGGEATVIPNPEGNRTTPSVVAFKDGERQVGEVAKRQAITNPNTVISIKRHMGTNHKENIEGKEYTPQEISAIILQKLKSDAEAYLGEEVTKAVITVPAYFNDSQRQATKDAGKIAGLEVERIVNEPTAAALAYGLDKEDDQTILVYDLGGGTFDVSILELGDGFFEVKATSGDNKLGGDDFDQVIIDHLIAEFKKENGIDLSQDKMAMQRLKDAAEKAKKDLSGVTSTQISLPFITADATGPKHLELTLTRAKFEELSSHLVERTLGPTRQALQDSGLSASEIDKVVLVGGSTRIPAVQEAIKNLTGKEPHKGVNPDEVVALGAAVQAGVLTGDVKDVVLLDVTPLSLGIETMGGVFTKLIERNTTIPTSKSQIFSTAADNQPSVDIHVLQGEREMAADNKTLGRFQLTDIPPAPRGVPQIEVTFDIDANGIVNVKAKDLGTNKEQSITITSSSGLTDEEIDQMVKDAEANAEADKKRREEVELRNEADQLVFTTEKTLKDLGDNVDEAEKTKAEEAKEKLKKAIEANNIDEIRTAKEELQQVVQALTTKLYEQAAQQAQQAQSAEGDQGTAEKGQDDNVVDADYEEVNEEDKK

SEQ ID NO: 14573 - protein, 183 aa, Parvularcula bermudensis HTCC2503
MTDRPFDSIPLRTIAGDPLSLADFAGKVILIVNVASKCGLTPQYAALQALYEAKKDQGLVILGVPANDFAGQEPGTDEEIQTFCATTYDVDFPLLSKAVVTGPSKHPLYAALTDAQPVKTGDADGFRAKLRSFGSEPTEDPEVLWNFEKFLIGKEGKVIGRFVPTTAPDDPALISAIDAALAA

SEQ ID NO: 14574 - protein, 170 aa, Vitis vinifera
MEQYMPIANLTRVMRRVLPAHAKISDDAKETVQECVSEFISFITSEANDRCHHELRKTITAEDVIAAMSKLGFDDYIDPLTLYLHRYRESENERDRMPLRRGREYGSLGAAANYGPPPPPWTTLHIGSQQGLYDAAPIVTRDYFKEGSSAGGSTSSRLPPEYNLIHIKKS

SEQ ID NO: 14575 - protein, 327 aa, Thalassiosira pseudonana CCMP1335
MVRPLRVPTHSSSSSANPTPQRYGAPAPPGSYPHALPPPSGAVSSGQIRMSDHRRSSGYPTAPLPPPPPRYEMVPSSRSADAHLKMSPIDVLKGGKAVTPDAQNSPHSKHYVNAMKNAGCSEDGQGRQHTLSVPSPERAFCVSSIHSPYRGSPSGAHHGHHHYMSASNTSNLDPSIFSTPSHSKTKYQPSPIHSSDQPRPQFTKPTKGKSKPSSTPNNCDSRDSMSPVTDEALTRSKFDSSLGVLTKKLVYLLKRAASHGTLENGTYIGLKAKGGEGTLDLNAAVKELNVQKRRIYDITNVLEGIGLIEKRSKNHIAWIGDMEEKDA

SEQ ID NO: 14576 - protein, 156 aa, Cyanobium sp. PCC 7001
MTVNVSDVVVRDAEGGERRLGEWNGQVLLIVNVASRCGFTRQYAGLQKLQDTYGPKGLAVLGFPCNDFGAQEPGTLPEIQQFCSTTYGADFTLFDKVAMAEAPYTTLTQADPAGPVAWNFEKFLVGKDGTVLARFKSGVEPESAEITGAIEAALAA

SEQ ID NO: 14577 - protein, 123 aa, Zea mays
MSQSDVDYSCGSCGYPLNLSSSNRSTSEVGSYKKSLKKGLISFISVDLSRFTQVDEVSCFPLTWRGYRPKTKLLCRICGASIGYGYGEPAVLCSFDPASSSSSSTSQKYLIKIQALQPLDRTQ

SEQ ID NO: 14578 - protein, 479 aa, Marinobacter sp. ELB17
MLSTSTALVWLVLFAALFAIPGLIYARHKQDKLDDFLVARNSQSSSATLLTLLATTMGTWILFGPAQAATWGGIGAVTGYALGALAPRLIMIPLGKRIRTLMPEGHTLTEFVLGRYGRIMYGFVLVIMVFYLFISLTAGLTAIAKMVSLLAPVPLWLTASIVMGATLLYTLYGGLRVTIFTDRVQMLVILPFLALLIGFGWQATGGLAPALQGLQEKAPHLLNPLDINGLKSGLTFFLAVVLTGLFYQGTWQRVFAARDNKVIRNGFILSGLLSFPIIFIMGLFGLAFVGLGLPGDGSVALFSVLLADVPVWFAIGLLPFGLALIMSSADSTISGLTSIMVIDLRRLLPKLGNHSLLSLSRWLIVLLSIPVLFVAAQGYSVLYLFLLADLLCCAAAFPVFFGFYNARYQSYNAAISTFAGLATGLMLFPAPGAPLTYLLESFLLATFVPIAVSLLLLLLPKGKLFDFSLLAQRVRKLEG

SEQ ID NO: 14579 - protein, 338 aa, Populus trichocarpa
MGEISCSNGIGNGNGVNGKTHSSLNGYRKSCWYEEEIEENLRWCFALNSILHTGASRYQDIALLDTKPFGKALIIDGKLQSAEVDEFIYHESLVHPALLHHSSPKTVFIMGGGEGSTAREILRHKTAVKVVMCDIDEEVVDFCKAYLVVNREAFCDPRLEVIINDARAELEIGKECYDVIIGDLADPIEGGPCYKLYTKSFYEHTVKPKLNRGGIFVTQAGPAGIFSHTEVFSCICNTLKQVFKYVVPYSAHIPSFADTWGWVMASDTPFTLSADESDSRIKQRIKGENRYLDGKTFSSASTLSKAVRKSLDNETHVYTEGTARFIYGHGSVQKQNQA

SEQ ID NO: 14580 - protein, 609 aa, Fusobacterium nucleatum subsp. vincentii ATCC 49256
MSKIIGIDLGTTNSCVAIMEGGNVTIIPNSEGARTTPSVVNIKDNGEVVVGEIAKRQAVTNPTSTVSSIKTHMGSDYKVEIFGKKYTPQEISAKILQKLKKDAEAYLGEEVKEAVITVPAYFTDSQRQATKDAGTIAGLDVKRIINEPTAAALAYGLEKKKEEKVLVFDLGGGTFDVSVLEISDGVIEVISTAGNNHLGGDDFDNEVINWLVTEFKKETGIDLSNDKMAYQRLKDAAEKAKKELSTLMETSISLPFITMDATGPKHLEMKLTRAKFNDLTKHLVEATQGPTKTALKDANLDANQIDEILLVGGSTRIPAVQEWVENFFGKKPNKGINPDEVVAAGAAIQGGVLMGDVKDVLLLDVTPLSLGIETLGGVFTKMIEKNTTIPVKKSQVYSTAVDNQPAVTINVLQGERSRAADNHKLGEFNLEGIPAAPRGVPQIEVTFDIDANGIVHVSAKDLGTGKENKVTISGSSNLSKEEIERMTKEAEAHAEEDKKFQELVETRNKADQLISATEKTLKENPDKVSEGDKKNIEAAIEELKKVKDGDDKSAIDSAMEKLSQASHKFAEELYKEAQAQAQAQQQAGAGANAGSDKKDEDVAEAEVVD

SEQ ID NO: 14581 - protein, 125 aa, Salmonella enterica
PKPMFGDNGSGMHCHMSLAKNGTNLFSGDKYAGLSEQALYYIGGVIKHAKAINALANPTTNSYKRLVPGYEAPVMLAYSARNRSASIRIPVVASPKARRIEVRFPDPAANPYLCFAALLMAGLDG

SEQ ID NO: 14582 - protein, 552 aa, Oryza sativa Japonica Group
MASASVPAAGYGADGVYRSLRPPAPVASDPGLSLTDLLLRRADACPSAVALADAAAGGRALTFAELRSAVLSTAVALSSRAGVRPGDAVLLLAPNCVLYPVCFFAVTALGAVGTTVNPDYTPREIAKQVSDARAKLVITISALVPKIAGLRLPVILLDDDANAAAASLPPDATVTLYTNLVAGVKEADYRRPPIKQSDTAALLYSSGTTGDSKGVILTHRNFIAAARMVTSDQDERREGPNVFLCFLPMFHIFGLSVITYAQLHRGNAIIAMSRFDINSLMEAVQRHRVTHLFCVPPVIIALAKHGKAGKYDLSSLKFIGSGAAPLGKDVMEVVAKKFPDSEIVQGYGMTETCGIISLEYPEKGQAREFGSTGTLVSGVEAKIVDIKTLKHLPPNQVGEICVRGPNVMQGYFNNVQATEFTIKQGWLHTGDLGYFDGGGQLFVVDRLKELIKYKGFQIAPAELEGLLLSHPEILDAVVIPFPDAKAGEVPIAYVVRSPDSSLTEVDVQKFIEKQVAYYKRLKRVTFVGSVPKSASGKILRRQLIAQVRSSKL

SEQ ID NO: 14583 - protein, 129 aa, Salmonella enterica
GSGMHCHMSLAKNGTNLFSGDKYAGLSEQALYYIGGVIKHAKAINALANPTTNSYKRLVPGYEAPVMLAYSARNRSASIRIPVVASPKARRIEVRFPDPAANPYLCFAALLMAGLDGIKNKIHPGEAMD

SEQ ID NO: 14584 - protein, 178 aa, Oryza sativa Japonica Group
MMMMDLGFLEGGAGMADAGHDESGSPPRSGGVREQDRFLPIANISRIMKKAVPANGKIAKDAKETLQECVSEFISFVTSEASDKCQKEKRKTINGEDLLFAMGTLGFEEYVDPLKIYLHKYREMEGDSKLSSKAGDGSVKKDTIGPHSGASSSSAQGMVGAYTQGMGYMQPQYHNGDT

SEQ ID NO: 14585 - protein, 479 aa, Bacillus licheniformis ATCC 14580
MNQKIVRLIIALSLLCGLVTGAGPIPLHDVVSKASAAEEAAAKSTARNELEKIEKAYDLISNEYVEQVDREKLLEGAIQGMLSTLNDPYSVYMDKQTAKRFSDSLDSSFEGIGAEIGMEDRKIIIVSPFKQSPAEKAGLKPNDEIISIDGDSMSGMDLNDAVLKIRGKKGSTVTLKVHRPGMKDQLTFTIKRDEIPLETVFASIKKVQDKPVGYIAISSFSEHTAKDFTAELKKLEKKGIKGLVLDVRGNPGGYLQSVEDILKHFVTKDHPYIQIAERNGNKKQYFSKLKEKKPYPVSVITDKGSASASEILAGALKEAEGYDVVGDPSFGKGTVQQAVPMGDGSNIKLTLYKWLTPKGNWIHKQGIQPTVPVTQPAYFSAGPLQLKEPLKPDMNNNEIKRAQFLLKGLGFVPGREDGYYNESTKKAVMAFQAANKLKQTGIIDQKTANTMNLRIEEKKMDEKNDLQLQAALKVLFNKK

SEQ ID NO: 14586 - protein, 212 aa, Zea mays; identical to SEQ ID NO: 1137

SEQ ID NO: 14587 - protein, 131 aa, Salmonella enterica
FGDNGSGMHCHMSLAKNGTNLFSGDKYAGLSEQALYYIGGVIKHAKAINALANPTTNSYKRLVPGYEAPVMLAYSARNRSASIRIPVVASPKARRIEVRFPDPAANPYLCFAALLMAGLDGIKNKIHPGEA

SEQ ID NO: 14588 - protein, 162 aa, Parasponia andersonii
MSSSEVNKVFTEEQEALVVKAWAVMKKNSAELGLQFFLKIFEIAPSAKNLFSYLKDSPVPLEQNPKLKPHATTVFVMTCESAVQLRKAGKATVKESDLKRIGAIHFKTGVVNEHFEVTRFALLETIKEAVPEMWSPEMKNAWGVAYDQLVAAIKFEMKPSST

SEQ ID NO: 14589 - protein, 484 aa, Clostridium perfringens str. 13
MILKSLLKGLDYEVIKGNEESKVQNIRYDNRKIEQGDAFVCVKGFKVDGHSFIGDAIKKGAKTLIVQEDVSVQEDITIIKVRDTRKALAIMSSNYFGNPKDKLKIIGITGTNGKTTSAFIIKSILEKAGFMTGLIGTIANYIGNKKVDAVRTTPESYELHELFKNMVDAGVEYCVMEVSSHSLELDRVYGIQFEEGIFTNLTRDHLDFHKTFENYYNAKFKLFERSNHSIINLDDPYGANIVKDIEERGVKTKVSTFSIEKESDFKAFEIKSHSNGSEFKVNLEGIEEFSINIPGEYNIYNSLGCIICAYNLNIPMDKIKEGLSDVVIPGRCELVAKEKNLPYSIIIDYAHTPDGLENILSTVKAFTKNRMISVFGCGGDRDKVKRPQMGKIGCELSDIAIITSDNPRSEEPMDIINDIVKPLNYDNFVIEVNRKEAIRKAMNMALEGDVIVIAGKGHETYQILKDETIHFDEREVVYDILEGK

SEQ ID NO: 14590 - protein, 332 aa, Lotus japonicus
MAMQTVYLKEHERMGHSSVGQLSSVTSAPWWGSQSVYGDSCGQIKPFSLEFSNYVDHFAANKNPVRGAEQLFDKGLTTQFTIFSDDCKMSGEAQNLEATLSLQPSVTVAEPRNRFELGFNQPMICAKYPYMDQFYGLFSAYGPQIPGRMMLPLNLSTDDGPIYVNAKQYHGIIRRRQSRAKAVQENKLIKRSKPYMHESRHLHAMRRPRGCGGRFLNTRNSSDGNGKSGSELHKKTGGLGRHMQSSASQSSEVLQSEVGTLNSSKETNGSSPNISGSEVTSMCSLGGLDSFAVNHLGSAIHHSLADMIDGGHGIIMPTKWVGAAGSCFNLKV

SEQ ID NO: 14591 - protein, 276 aa, Oryza sativa Japonica Group
MFKIIKEMLPPDVRVARDAQDLLVECCVEFINLLSSESNEVCSREDKKTIAPEHVLRALQDLGFREYIEEVQAAYEHHKHDTLDSPKASKFTGVEMTEEQAVAEQQRMFAEARARMNNGAAKPKEPEPEAQQQTQQPPQPQLHPQPQQPLQPQLQLHPQPQQQPSQLHPQQLLHPQSQQTPQPQPQVHPQPQQPPQLQPQPQLLQQPQLPQQLQPQSQLPPQPQQPPQLQLQSQLHPQPQQPPQLQPQPQLHQQPQPQAELQSQSQPQTEHGLDSS

SEQ ID NO: 14592 - protein, 185 aa, Zea mays
MAEAPASPGGGGGSHESGSPRGGGGGGSVREQDRFLPIANISRIMKKAIPANGKTIPANGKIAKDAKETVQECVSEFISFITSEASDKCQREKRKTINGDDLLWAMATLGFEDYIEPLKVYLQKYREMEGDSKLTAKSSDGSIKKDALGHVGASSSAAQGMGQQGAYNQGMGYMQPQYHNGDISN

SEQ ID NO: 14593 - protein, 170 aa, Glycine max
  misc_feature (110)..(110): Xaa can be any naturally occurring amino acid
  misc_feature (122)..(122): Xaa can be any naturally occurring amino acid
MDPMDIVGKSKEDVSLPKSTMTKIIKEMLPPDVRVARDTQDLLVECCVEFINLLSSESNDVCSRDDKKTIAPEHVIRALQDLGFKEYVEEVYAAYEQHKLETLDSPKATXFTGIKMTEKKAXVLDSRECLLDPSKMNNGTAKPRSWIKPRFNPRPPKLFWGLSSRRRIQT

SEQ ID NO: 14594 - protein, 342 aa, Glycine max
MAAENVVEFTDLPVKRPREEEEEEEEQTNGVSNDAVSTLPNDPQYPGISAVIPGWFSEISPMWPGEAHSLKVEKILFQGKSDYQNVMVFQSSTYGKVLVLDGVIQLTERDECAYQEMITHLPLCSISNPKKVLVIGGGDGGVLREVARHASVEKIDICEIDKMVVDVSKQFFPDIAVGFEDPRVTLTVGDGVAFLKNVPEGTYDAVIVDSSDPIGPAQELFEKPFFASVAKALRPGGVVCTQAESIWLHMHIIEDIVANCRQIFKGSINYAWTTVPTYPSGMIGFMLCSTEGPLVDFKHPVNPINENDSQQSRPLKFYNSEIHTAAFCLPSFAKRKIGSKTN

SEQ ID NO: 14595 - protein, 540 aa, Bacteroides fragilis YCH46
MKRIIYLLIGLCSVLGLQAQNFGSPAMRKLQLAEFAISNLYVDTVNENKLVESAIIEMLAQLDPHSTYSDAEEVKKMNEPLQGNFEGIGVQFQMIEDTLLIVQPVSNGPSEKVGILAGDRIIAVNDTAIAGVKMGTEEIMGRLRGPKDSKVNLTIIRRGVKEPLLFNVKRDKIPILSLDAAYMIQPKIGYIRINRFGATTAEEFLKALKELQKKGMKDLILDLQGNGGGYLNAAIDLANEFLGQKELIVYTEGRSAQRSEFFAKGNGNFRNGRLVVLVDEYSASASEIVTGAIQDWDRGVVVGRRSFGKGLVQRPIDLPDGSMIRLTIARYYTPAGRCIQKPYDSSINEKPGKGKSSESSIEKYNQDLIDRYNHGEMVSADSIHFPDSLKCQTKKLGRTVYGGGGIMPDYFVPVDTTLYTDYHRNLVAKGVVIKTTMNFIEKNRKALLDKYKTFEKFNEKFEIDDQLLNYLREAADKEKIEFNEEQYNKALPLIKAQLKALIARDLWDMNEYFQVMNATNKSVERALEILNDKEYEKILK

SEQ ID NO: 14596 - protein, 117 aa, Arabidopsis thaliana
  misc_feature (19)..(19): Xaa can be any naturally occurring amino acid
HQTLRPSSTLSSATMVASXAQAGIYTPGNGLKSSAAFPATRKANNNITSITSNGGRVNCMQVWTTIGKKNFETLSYLPDLTDSELAKEVHYLIHNKSIPCVQFKLQHPFVYRKHSNS

SEQ ID NO: 14597 - protein, 218 aa, Aspergillus niger; identical to SEQ ID NO: 1146

SEQ ID NO: 14598 - protein, 988 aa, Oryza sativa
  misc_feature (873)..(873): Xaa can be any naturally occurring amino acid
MASPPPFDICGDLDDDPTPPAPTPLAAPTPNGLNDRLLRLTRTHQRGPSQNPNPNPNPNPKPPPPPPPQEPEPAKVKLAGRRRLCKLSTAGDESAGDDDSIRDILDDLTTRLDSLSVDRSTARPRPHVSPLPCALHADPDPSQSQLNDGTKPSSSFVDCDDDDDDAGGAYGGFGVKEEVTRKVFKASSSFGGRGNDDKMKAKGAYAFDTVSRKTTTESKASKFFGDYDDEDDIDQDAENGKENHADDVGWEKTEDFKMEPTGTGVTRKPYNLPGRIFNMLYPHQREGLRWLWVLHCRGTGGILGDDMGLGKTMQVSAFLAGLFHSRLIKRVLVVAPKTLLTHWTKELSVVSLKDKIRDYSGPNANARNYELKYAFKEGGILLTTYDIVRNNFKMIKGNFTNDFDDEEETLWNYVILDEGHIIKNPKTQRAQSLFEIPCAHRIVISGTPIQNNLKEMWALFYFCCPEVLGDKEQFKARYEHAIIQGNDKNATNRQKHIGSNVAKELRERIKPYFLRRMKNEVFLDSGTGEDKKLAKKNELIIWLKLTSCQRQLYEAFLNSELVHSSMQGSPLAAITILKKICDHPLLLTKKAAEGVLEGMDAMLNNQEMGMVEKMAMNLADMAHDDDDVELQVGQDVSCKLSFMMSLLQNLVSEGHNVLIFSQTRKMLNIIQEAIILEGYKFLRIDGTTKISERERIVKDFQEGPGAPIFLLTTQVGGLGLTLTKAARVIVVDPAWNPSTDNQSVDRAYRIGQMKDVIVYRLMTSGTIEEKIYKLQVFKGALFRTATEHKEQTRYFSKRDIQELFSLPEQGFDVSLTQKQLQEEHGQQLVMDDSLRKHIQFLEQQGIAGVSHHSLLFSKTAILPTLNDNDGLDXSRRAMPMAKHYYKGASSDYVANGAAYAMKPKEFIARTYSPNSTSTESPEEIKAKINRLSQTLANTVLVAKLPDRGDKIRRQINELDEKLTVIESSPEPLERKGPTEVICLDDLSV

SEQ ID NO: 14599 - protein, 120 aa, Zea mays
ASRRRTNGYGGHSKDADEIDCGTVKLSEDFIVADIAIHPRHARIMKPHQLEGFNFLVKNLIGDKPGGCILAHAPGTGKTFMLISFIQSFMARYPSARPLVVLPKGILGIWKTEIKRWQVQ

SEQ ID NO: 14600 - protein, 239 aa, Zea mays
MELRRPASSPLVDNYVVPGDVVLDLSEMNNQTIKLGAGLRQECDTIQATSAGKLRQLKPNKYWIENSQKRYIPSVEDTVLGIVVDTKPDNFLVDIKGPNLAFLPVLSFEGGTRRNIPKFEIGTLIYARVVKANSIMNPELSCMDATGKAAEFGQLKDGYMFDTSTGMSRMLLSSPTCPVLEVLGKKLSFEIAVGLNGRVWVNAPAASTVILVSNAIMRSESLSGIKQRAMVENLLERLS

SEQ ID NO: 14601 - protein, 221 aa, Larix griffithiana
KAAGARIIVTQAAYVDKLADLQSDDMIVIAIDGAPKEGCQHISILTEADETQCPSVEIHPDDVVALPYSSGTTGLPKGVMLTHKSLVSSVAQQVDGENPNLYFHSEDVILCVLPLFHIYSLNSVLLCALRAGAATLIMQKFNLTTLLELIQRYKVTVAPIVPPIVLEISKNPIVSRYDVSSVRIIMSGAAPLGKELEDALRERFPKAIFGQGYGMTEAGPV

SEQ ID NO: 14602 - protein, 221 aa, Larix griffithiana
KAAGARVIVTQAAYVEKLADLQSDDVIIITIDGAPKEGCQHISVLIEADETQCPSVEIHPDDVVALPYSSGTTGLPKGVMLTHKSQVSSVAQQVDGENPNLYFHSEDVILCVLPLFHIYSLNSILFCALRAGAAILIMQRFNLTTLLELIQRYKVTVAPFVPPIVLDITKNPIVSQYDVSSVRIIISGSAPLGKELEDALRERFPKAIFGQGYGMTEAGPV

SEQ ID NO: 14603 - protein, 212 aa, Verbena x hybrida
MGRGKIEIKRIENSSNRQVTYSKRRNGIMKKAKEISVLCDAQVSVIIFASSGKMHEFCSPSTTLVDMLDQYHKLSGKRLWDAKHEQLDNEINRVKKENDSMQIELRHLKGEDISTLNYKELMVLEEALENGISTLKAKQMEFVRMMRKHNEMIEEENQSLQFKLRQLHLDPMDDNVMEAQAVYDHQGVADYEAQMPFAFRVQPMQPNLQERF

SEQ ID NO: 14604 - protein, 167 aa, Oryza sativa Japonica Group
GRWSATRPGGGGGGGGGVREQDRFLPIANISRIMKKAIPANGKIAKDAKETVQECVSEFISFITSEASDKCQREKRKTINGDDLLWAMATLGFEDYIEPLKVYLQKYREMEGDSKLTAKAGDGSVKKDVLGSHGGSSSSAQGMGQQAAYNQGMGYMQPQYHNGDVSN

SEQ ID NO: 14605 - protein, 500 aa, Arabidopsis thaliana; identical to SEQ ID NO: 10558

SEQ ID NO: 14606 - protein, 332 aa, Ustilago maydis 521
MVEATSTEGPSESARRTSPTALRSLSAEFGILARSDASASFSFGPVNVVASVSGPTEVRIRDELTDRATLDVIYQPQHGVAGIPARAVSDALTTAFSSVLLLHHHPRSLIQLVLQTLSSPSLPQSAGQPLQTDTGDNHRHVPRQPLLLGPDVPPSATEQAALINAASLALLDAGIPARASVAACACAILPATQGLVLRQNSHITEMSQSQLAGLVRQYKQEQDESDDVDRYDEKDSNKRYTAETVVLLDPTPLELDYALSTHVFAFAFSQALDEQDKEATPREISEQIFAESQGAVDLDELQHARRLCLSGCSAIVAFMRTAVQKRVASQVA

SEQ ID NO: 14607 - protein, 435 aa, Sinorhizobium meliloti 1021
MTLDLSTFAREKGVKYFMISYTDLFGGQRAKLVPAEAIADMQKGGAGFAGFATWFDLTPAHPDLFALPDASAVIQLPWKKDVAWVAADCIMDDAPVEQAPRVVLKKLVAEAAQEGLRVKTGVEPEFFLISPDGSKISDTFDTAEKPCYDQQAIMRRYDVIAEICDYMLELGWKPYQNDHEDANGQFEMNWEYDDALRTADKHSFFKFMVKSIAEKHGLRATFMPKPFKGLTGNGCHCHISVWDLAGEVNAFADNKAEFGLSAEGRHFLGGIMKHASALAAVTNPTVNSYKRINAPRTISGATWAPNSVTWTGNNRTHMVRVPGPGRFELRLPDGAVNPYLLQAIIIAAGLSGVRSKADPGRHYDIDMYKDGHKVTDAPKLPLNLLDALREYNRDEELQEALGREFSAAYLKLKQGEWNTYCSQFTEWEHQTTLDV

SEQ ID NO: 14608 - protein, 542 aa, Capsicum annuum
MPMENETRDLIFRSKLPDIYIPKHLPLHSYCFENISEFNSRPCLIDGANDQIYSYAEVELTSRKVAVGLNKLGVQQKDTIMILLPNSPEFVFAFMGASYLGAISTMANPLFTPAEVLKQAKASSAKIIITLACYIGKVKDYATENDVKLICIDSAPEGCIHFSELTQSDEHEIPDVKIQPDDVVALPYSSGTTGLPKGVMLTHKGLVTSVAQQVDGENANLYMHSEDVLMCCLPLFHIYSLNSVLLCGLRIGASILIMQKFDIVHFLELIQKYKVTIGPFVPPIVLAIAKSPLVDHYYLSSVRTVMSGAAPLGKELEDTVRTKFPNAKLGQGYGMTEAGPVLAMCLAFAKEPFEIKSRACGTGARNAEMKNVDPDTGCSLPRNQPGENCIRGDQIMKGYLNHLESTTRTIDKKGWVHTGDMGFIDNDDELFIVDRLKELIKYKGFQVAPAELEALLLNHPNISDAAVVPMKDEQAGEVPVAFVVRSNGSTITEDEVKDFVSKQVVFYKRIKRVFFVETVPKSPSGKILRKDLRARLAAGVTN

SEQ ID NO: 14609 - protein, 472 aa, Desulfococcus oleovorans Hxd3
MSDVIAATGGELVQGKGNEMFENISIDSRTLGKGDLFVAIQGQQHDGHDFIDRVLAQGAGGVMIDQAHASRINTPRATGRGARVVVKDTVVALGDLARHRRRSVNPRVAAITGTNGKTSTKEMAAMVCGRRYRVLATTGNFNNEIGLPLTLLRLEKGHQVAILEMGMNAPGEIGRLAKICEPDMGVVLNVGAGHLEGVENIDGVARAKAELLEALTDKDTAIVNADDMRVMKMAQKVRGRVVTYGMRQKADITAASVRRQDGRVCFDLCLSATDEQVAVALPASGTFMVSNALAAAAIGAGLGLSAPEIKAGLENFSPVPGRMTITQTRAGFTLVDDTYNANPESMKAALAGLRELKGAGRGILIMGDMFELGDHAPVMHGKTGVMAAESGVDRLYVTGEFAEAVAGGAAAAGMTPEKIMIESKETIIEAVCPVLEPGDWVLVKGSRGMRMETVVQALSAYGNGAADREGGR

SEQ ID NO: 14610 - protein, 560 aa, Salicornia europaea
MLSQLSSLFYSKMDMLSTSDHASVVSMNLFVALLCGCIVIGHLLEENRWMNESITALLIGLCTGVVILLISGGKSSHLLVFSEDLFFIYLLPPIIFNAGFQVKKKQFFRNFITIIMFGAIGTLVSFSVISLGAMTIFKKMDIGSLELGDYLAIGAIFAATDSVCTLQVLNQDETPLLYSLVFGEGVVNDATSVVLFNAIQNFDLTNIDHRIAIQFSGNFLYLFFASTMLGAMTGLLSAYVIKKLYFGRHSTDREVALMMLMAYLSYMLAELFYLSGILTVFFCGIVMSHYTWHNVTESSRVTTKHAFATLSFVAEIFLFLYVGMDALDIEKWRFVSDSPGTSVAVSSILLGLLMVGRAAFVFPLSLLINFSKKSHSEKITFNQQIVIWWAGLMRGAVSMALAYNQFTRSGHTQLRGNAIMITSTITIVLFSTMVFGLLTKPLILFLLPHSKHFNSASTVSDLGSPKSLSLPLLDGGQDSEADMDNQDEAVNNRYEGTHNRTIARPGSLRMLLNAPTHTVHYYWRKFDDSFMRPVFGGRGFVPYVPGSPIEQNTDNLLDRT

SEQ ID NO: 14611 - protein, 1834 aa, Ustilago maydis 521
MACLLARHFASDILHTLVFVTLLSVLRLGPLTRLNSHALGSSPILALAQHHSRAQPKRPCPLRYRIVGTPVPLAIPAEPSHSAQIPTSNLAIRLGLSSLLLLILHLVLSQLATMSGAALPHPRSLTATDHDVKSRADASPAPIKTDDSEQPKLNRPRRDSSPLSDVSQKGEPRSVKNHPLDRRDDTDDNHDHDPDDAKPNHHQLDRVKAVSPASSSHSRSSAKPDRKHLLEAENDPDLYGLRRSGRASRKSYTDLNDEAADSDDADASVSSRRRHHTKAGRTSIRSSVQATDDEANEAAADDSDDLDDSDDAEDDEFGPAKSKRKRKHKRSAAAARLSSADLEASRVSSRNGKRIPNYTDDYADFGDDDPFEDEADVQAQKSANLAGDVEEEDVIESIVGHERHEDRLDDKEDIPTQNMRFIVKWKGYSHLHDTHETYDFLRRYRGFKRVDNYIKSVLLREKALLSDPNASREDVEALQIEKERQIELIESFKTVERIIAQRDNHANKDIPYPHLAYLVKWKGLPYADCTWEAEQEIKDIAQDAINAYVKRSATTTVPWRSQNFSQGRPKYTRMTEQPAYISAGTLKDFQMTGLNWLAYLWSKNENGILADEMGLGKTVQTVSFLSYLFHSCYQYGPFLVVVPLSTLPAWMNQFEHWAPDLNAIAYMGNSASREMIREYEFGPAKKMKFNVLVTTYEFILKDRAELGQVKWQYLAVDEAHRLKNSEAQLYEALNSFHAAGKLLITGTPLQNNVKELIALLHFLRPDQFDLDVDFDINNVDQTVIKELHEKLDNVMLRRLKKDVIKELPTKSEKILRVEMSAMQQRMYKAILTRNYSLLSGATTAQFSLLNIAIELKKASNHPYLFDGTEIISDNREETLKGLVMHSGKMVLLDKLLARLKADGHRVLIFSQMVRMLDILSDYMSLRGYIHQRLDGTVSSEIRKKAIEHFNAEGSPDFAFLLSTRAGGLGINLETADTVIIFDSDWNPQNDLQAMARAHRLNSKFHVSVFRFLTKDTVEEDVLERAKRKMVLEYAIIHQMDTSGTNFAPKASAKNQQQFSKEELGAILKFGAQNMFKSDNEDGQQKKLDEMDLDDILSHAEAHETEADPTGSSAGGQEFLKSFAQVQDFKADLSWDDIIPLEERQKAEEEERKKAVEEAAAAASTSRRRAAAQVAPGTYDNGEADDPSTSPGAAKDAAAKRARKTAAQRSVEMKERDLRVLIRGIQRWGDIRYKTDPIIKEGKLQDKNRSVLFQISDELVKTCEDAVAEHQAFMKGKQERGEEISSALRQKAVLVSCRGITGINAETVLIRHYELRLLAETLDNIEDPLEWRVPSEHLKATLNWAGGWDAKDDAMLLVGIWKYGFGAWEQIEADPDFGMAGKFFLEEGKKANQEPQASEKDTPRSGTSGPPQGKPRPIPNAIHLVRRGDYLLKVLREYDDNAKAYQKSLAEGGGGAKSSKKARKSPSPSTHSPAPAGKLGKGSGGGGGAADKRRPAPVYSSDSSDDSEYASMDEAECKELMRPCKKQLKRLRDGTDHLERDQKVSVLKECLSAIGGHIDHLLDTKFASLSSKEKDRWFHHLWAFSAFFWPKKVKPSKLRAIFNKLVMNGPAGTTPAASTPAAGGGNNGAAGSPVAASAGGRVKSESAAAEGAGENGSSHAASAAAATGTASGEVKRKANALQDAPIPKKPRTSMEPSSSGGGSGGRSSYGNGYSGSPSGANAAYPPSYYPASASSGGYGSSGHGHGHGYHAPPPPPPTHHYGAGREPYPSSYPDRRGSPYREGRERDYRDGRYAHPTLPPPPPPPPGGAGYGGYHSYQPLPPPPPPPSHGYDYRR

SEQ ID NO: 14612 - protein, 1146 aa, Arabidopsis thaliana; identical to SEQ ID NO: 12611

SEQ ID NO: 14613 - protein, 126 aa, Porphyra yezoensis; identical to SEQ ID NO: 1170

SEQ ID NO: 14614 - protein, 166 aa, Zea mays
MTFFERLLVKKKGWHVGREIFMISGDTSQEDREAAVDRFNSSADAKVLFGSIRACGEGISIVGASRVVILDVHLNPSVTRQAIGRAFRPGQQKKVFVYRLVAADSDEVKVHETAFKKEVIQKLWFEWSEQCTTEDFKLGQVEIDDSGDELLDTRAIRQDIKALYRR

SEQ ID NO: 14615 - protein, 294 aa, Gibberella zeae PH-1
MSNEEITHPTIVDGWFREISDMWPGHAMTLRVEKVLVHEKSKYQDVLIFKSTDFGNVLVLDNVIQCTERDEFSYQEMIAHLALNSHPNPKKVLVIGGGDGGVLREIVKHDCVEEATLCDIDEAVIRLSKEHLPSMACGFDHPKSKTHVGDGFKFLNDYKNEFDVIITDSSDPDGPAEALFQKSYFQLLHDALREGGVITTQGSESPWLHLPLIARLKKDCGAIFPVAEYAYTTIPTYPSGQIGFMVCSKDPKADVKNPIRSWTKEEEDEKLRYYSSEIHKASFVLPKFAAKALE

SEQ ID NO: 14616 - protein, 1034 aa, Corynebacterium efficiens YS-314
MTSHLLHGLWIKDRGLQLWIEQVEGHRIVLPEAVPAGTFPPVVDRILEGRTFRARMNVQLRTPKGRQVALPTPTAAFTPEEAVTVLAQLSFLQAELPAATRAQRETIAADLRWIITMHQGLTRFVQAGRVTLRTVMMDNAWWPQWQLAASLSERGWLAEMNNAAPGILLKNGGRDLAGTMANELPHWIANRILSDYRDEVLPYARHEFLDALLYNRPLRKGSTTLTHALNQWKNTISSAALQLVIIVEEPPAESDYEDPMDSIWPVRLMVRSGVDAPQPIQKHSLDTGGLESLRQQFETAKTISWLLDPARDDAIPAHEHNTVPTGDWDVFLNTAEIIDFIGHDVAKLKKAGITVMLPKAWSAYETRAKVEARTPGDPADSSTQSIIGLDQLVEYDWKISVGEVELTDDEMRELVESKTGLIRLRGDWVMADQDALRRITGYMDELSKSSRKRAKAEMEEAAMQAQLAEASGAEGWQLLAARAEELRQRFNEQFSGDGTGEVTLQELREIALKAAENEPVEFTGSQWYTSLLGGTETPAPRRVDIPETVTADLREYQRRGVDWLYWMSENNLGAVLADDMGLGKTLQLLSLLAVERAEHPDREPKPTLVVCPTSVVGNWAVEAAKFVPDLKVVVHHGPQRENGEAFLEKARRADLVVTSYGVVTRDFKLLGDVTFDRVVLDEAQAIKNSSTRISKAVRSLPSRHRVALTGTPVENRLAEMRSILDFCNPGVLGSASFFRNHFAKAIERDQDDEMTERLRQLTAPFILRRLKTDTAIIDDLPEKSEQIIRVDMTAEQASLYKALVDDVQQQLSQRQGMSRKGLVLATITRIKQICNHPAHFLNDGSPLTLRGRHRSGKVEALMDLLDDAVAQERRMLIFTQYTAFGQLLAPYLSDRLGVDIPFLHGGVSKLGRDRMVARFQAGDGPPAMILSLKAGGTGLNLTAASIVVHMDRWWNPAVENQATDRAFRIGQKNNVDVYKMITAGTMEESIQDILDGKMHLASAIVGEGEGWITELNPEELAALMSYREREGADV

SEQ ID NO: 14617 - protein, 390 aa, Alternaria alternata
MSYEKKAVHFGGGNIGRGFVAEFLHNSGYEVVFVDVMDSIIESLQKTKTYTVTEIGDDGERKFTIDHYRAINSKHEMDKVVQEIASADVVTCAVGPNILKFVAEPVAKAIEARTLDYPIAVIACENAINATTTWRGFIESKLSEETKKNIDSKARFANSAIDRIVPQQPPNGGLDVVIEKFHEWCVEQKPFENGGKKPDVKGIHYVDDLEPYIERKLFTVNTSHATAAYYGHQNKVQYIHEVLHDKKLHDTVRDAVKETAHLIVTKHGVETAEQDAYVEEIIKRISNPVLKDNVERVGRAPLRKLSRKERFIGPAAQLAERGEKVDALLGAVEQAYRFQNVEGDEESVELAKILKENSAEEVVTKVNGIEKGQPLFDRLVAIVKKVQGGS

SEQ ID NO: 14618 - protein, 530 aa, Mycobacterium marinum M
MFGLVVIVALVATVVIGTVLGRRYRVGPPVLLILLGALLGLVPRFGDVQIDGEIVLLLFLPAILYWESLNTSFRELRWNLRIVIMFSIGLVIATAVAVSWTARALGMESHAAAVLGAVLSPTDAAAVAGLAKRLPRRALTVLRGESLINDGTALVLFAVTVAVAEGSAQLGPAALAGRFVVSYLGGIVAGLLVGGLVTMLRRKIDAPLEEGALSLLTPFAAFLLAQSMHCSGVVAVLISALVLTYTGPRVIRARSRMQSYAFWDITTFLINGSLWVFVGVQIPGAIDHISNVDGGLRRATFIALAVTGVIIATRIVWVEVTTVLGVALDRFLKKDTRHVGFRQRCITSWAGFRGAVSLAAALAVPMTTHSGAPFPDRNLIIFVVSVVILVTVLVQGSSLPAVVRWARVPGDVAHADEVQLARTRSAEAALEVLPDVASELGVSPDLLKRLTKEYEERATIIRENGDDSAPSDLAQRTDLVRRVRLGVLEHQRHAITALRNQNLIDDIVLREVQADMDLEEVQLLDPVEHD

SEQ ID NO: 14619 - protein, 92 aa, Physcomitrella patens subsp. patens
VIEQEPLIPIASVVRIMKKILPHNTKISKEAKETMQLCTSEFVSFITDEAFDKCQREKRRTITGDDVLWAFRSLNFDDYAELLEIYLQKYRQ

SEQ ID NO: 14620 - protein, 475 aa, Borrelia burgdorferi B31
MKNKFLICVYFLLTLGISSLVIVESIFAFDESNNKLSRSNYEQMMIQAFEFVKENYVDPVSDEVIFEGALKGIFQSLGDPYSQYLTKKDLEEISKTTVGDYVGIGISIIKKMHSQDKQDKAKDFDPNSACVSIVTPFEGGPAYKAGIKSGDCITAVDGKSVYSMEVDQVVDLLKGKEGTKVKVSILRGKNLTLDFELTREKIEIQTIKYDVINSDIGYIRIVSFNPHTSVDFRKALDNLKNKNIKSLILDLRLNTGGYFQAAIKMADDILSKGIIVSTKSRNSSKPIDYKASSKQVLPSNIKIVALIDRSSASASEVFVGALKDNKRAYIIGEKSYGKGLIQHVVPFYTGGFKITSSKYYTPSGKSIHKVGIEPDLEIKSPDFSEEEALIYKEIFDKKLIEGFLKGKKFITEQEIDFFVENLVKENPKYKIDKEFLGKYVFFNYYQDNNKELPIYNLHYDKVLKTACEYLSKLGN

SEQ ID NO: 14621 - protein, 494 aa, Staphylococcus aureus subsp. aureus MRSA252
MDASTLFKKVKVKRVLGSLEQQIDDITTDSRTAREGSIFVASVGYTVDSHKFCQSVADQGCKLVVVNKEQSLSANVTQVVVPDTLRVASILAHTLFDYPSHQLVTFGVTGTNGKTSIATMIHLIQRKLQKNSAYLGTNGFQINETKTKGANTTPETVSLTKKIKEAVDAGAESMTLEVSSHGLVLGRLRGVEFDVAIFSNLTQDHLDFHGTMEAYGHAKSLLFSQLGEDLSKEKYVVLNNDDSFSEYLRTVTPYEVFSYGIDEEAQFMAENIQESLQGVSFDFVTPFGTYQVKSPYVGKFNISNIMAAMIAVWSKGTSLETIIKAVENLEPVEGRLEVLDPSLPIDLIIDYAHTADGMNKLIDAVQPFVKQKLIFLVGMAGERDLTKTPEMGRVACRADYVIFTPDNPANDDPKMLTAELAKGATHQNYIEFDDRAEGIKHAIDIAEPGDTVVLASKGREPYQIMPGHIKVPHRDDLIGLEAAYKKFGGGPVGQ

SEQ ID NO: 14622 - protein, 118 aa, Zea mays
MPDSDNDESGGPSNADFSSPREQDRFLPIANVSRIMKKALPANAKISKDGKETVQECVSEFISFITGEASDKCQREKRKTINGDDLLWAMTTLGFEDYVEPLKLYLHKFRELEGDKAA

SEQ ID NO: 14623 - protein, 440 aa, Picrophilus torridus DSM 9790
MQEDEGFYLERLKADKIDFLQIQFTDITGHLKSLTVPKNRFEDVLYDGITFDGSSIPGFKPIENSDMKAMPDLSTYTIISQNSLGKTARFISKIFNPDGTRFDGDPRYVLERQIDRLKKENKHFYIGPEIEYFIFKRDDKNRPTVIPSDQGVYFDKNTDSSILLKEEIVKRLEDIDYYPEASHHEVAPGQHEIDVKYADAITMADRLIVIKSIVKDVAAKHGYYATFMPKPIKGINGSGMHVHQSIFNGDNNAFYDENNRYGLSKYALSYIAGILKNIKGASPILAPLVNSYKRLVPGYEAPVYICWANRNRSALVRVPAPSGKAKRIELRFPDSTGNHYLQFAVMLGMGLDGIENKAEIPDPVERNVFEMPLNERAELGIETMPGSLGEAIKEMERSETIKEILGEHIFENYIKLKRMEWEDYTTYVTDWEINRYLEVY

SEQ ID NO: 14624 - protein, 504 aa, Burkholderia cenocepacia J2315
MLHKRALVLSILVLASCGLGYELISSALSSYLLGDSILQFSSVIGCYLFAMGIGSWLAKFVEDDDVLDRFVDIELLVGLLGGVSAALLFVVFAWLAAPFRAALYALVLALGLLIGMEIPLVMRAFQQRRQAFRHTVSEVLTFDYLGSLAVSLIFPLVLAPRLGLLRTSFLFGLLNALVALWTTHLFRDEIRNVRGKLMRASLVIGLLVAGFALSDRITHWAEHGVYGDETIYSETTPYQRIVLTQWHDDMRLYLNGNLQFSSRDEHRYHEALIHPTIEALPWAKRVLVLGGGDGLAVRELLKHRNLEQITLVDLDPAMTKLFSTSVPLVKLNQGALKDPRVHVINDDAVRWLESNADVYDAIVVDFPDPTNFGLGRLYSVPVFRLLARHLSENGYTVIQSTSPYFAPHAYWTIIATLHEAGLNTWPYHCYVPSFGDWGFVIAGKRRNFTVPTHYSVPTRWLDTQTATEMFHFPADMPALSMSPNELNDQPLVRRFDDDWKHVLR

SEQ ID NO: 14625 - protein, 966 aa, Oryza sativa Indica Group
MPANPKLAAKPSPSPPTAAAAASRPKATAKPPLGAGYRDNDDDDDDFQSPPRASSRAARALKPSGNGAASRRPSKRLKPSSSCCSGKENLPAAAGSGRAPAGRAASKGAGVGETLGVVSRVSSGVPGGDKARGGGICGLLRCGSDDFSSVSNGKKGLDRYWRRDGGLHSRPNPMDSTVSMPDATCDLENGGSQVAQMLSSNDRISVQLEGNAKVELGKSESDPTTMRKERNGSGACESDHPARLIEPRLLTLVTNCDFGGADSMDSKELGSAIHPSVSKDRNVENESGGASVCTFALHNRNCHSSCVESELELLNAKYDLGPRDCKESQEGPGLCSLISEERTVAAEGDATFTFEERGNTSSGLEACKGSHCLDPVEPKLMDSCATHALEGDGCDDFEIGTQLNELINLCMEDYTEGPLSNKVACLEGNGMDCGSFNSSCEVQCPLCGSNISDLSEELRLVHTNSCLDGDKPAKEPNSDNQNEPCGESNVEKRRVMEWLRNLGLSKYEEIFIKEEVDWETLQWLTEEDLLGMGITSLGPRKKIAHALCELRKKNDDANDLAADMLNLENTKKAKIPMNGNKLITEYFRCPSSDQRQKKACKVNTPSNLNSQKNSNAKATGGRRTVKGKVKDTPIWCCIPGTPFRVDAFRYLRGDCCHWFLTHFHVDHYQGLTKSFCHGKIYCSSVTANLVHYKIGIPWDRLHVLPLNEKITIAGVNLTCFDANHCPGAVIILFEPSNGKAVLHTGDFRFSSEMANNRVLQSSPIHTLILDTTYCNPRYDFPTQEIVIQFVIEAIQAEAFNPKTLFLIGSYTIGKERLYMEVARLLQKKIYVGAAKLQILKHLGLPQEIMHWFTANEAESHIHVVPMWTLASFKRMKYLSTQYADRFDLIVAFCPTGWSFGKGKKRTPGRKWQQGAIIRYEVPYSEHSSFTELREFVRFISPEHIIPSVNNDGPDSANAMLAQLLND

SEQ ID NO: 14626 - protein, 160 aa, Pseudoalteromonas tunicata D2
MVPFYQFEAISLQGKPISFEEYQGKVVLVVNTASQCKLTPQFKALEALYQKYQSQGLVILGFPCNQFRQQEPGNAEDITQVCSLNYGVTFAMFDKIAVNGKHSSPIFQYLKQQLPGIFGSIIKWNFTKFLIGRDGQPIKRYAPITNPANIEQAIINALKN

SEQ ID NO: 14627 - protein, 179 aa, Glycine max
MKKCELCKVPARIFCESDQASLCWDCDAKVHSANFLVARHVRTLLCRTCRSPTPWKASGASLAHAASVCDRCAAAEETEESEAGNDDEPDTEDDDDVDNQVVPWSSTPPPPPPSSSSGSECSECKNNVASFSASEQETTTSSLKRQREDDDDASSDPDPSLSLEIRVLRRVGRLNGGCV

SEQ ID NO: 14628 - protein, 170 aa, Oryza sativa Indica Group
MSGSAWRSTLWSIVGRVKWHGIGIALIYAITLSIFPGYITEDVHSEALKDWYPIMLISAYSVFDLVGKSLPAFYFLENANIAVAGSFARLLFYPLFYGCLHGPSFFRTEIPVTILTCLLGLTNGYLTCILMTLAPKAVPIQHSETAGIVIVLFLVAGLVVGSFVAWFWVI

SEQ ID NO: 14629 - protein, 220 aa, Oryza sativa Indica Group
MAGGEYTPADAEADLLLPPPAGSEPDEPAARPAPADTLGVAYAIFFTLGTGFLLPWNAYITAVDYFSYLYPGAPVDRVFSVSYMLACFLPLVLIVLCFPKSSAPARINTGMSLFTVALLVVPVMDAVYVRGVPGLYGAFDVTVAATVLCGVADALVQGGVIGFAGELPARYMQAVVAGTATSVKMVSCRLSIGQLQMCELRNSIRIIHCASLLLCINKVI

SEQ ID NO: 14630 - protein, 520 aa, Mycobacterium sp. JLS
MTTTEPAPPESATGRPSPRWRALLLAAVAACAACGLVYELALLTLSSSIHGGGIVATSLIVAGYVAALGAGALAVKPLLGHAAITFVAVETLLGVIGGLSAAALYVTFAFIGGSTWVLVVGTALIGGLVGAEVPLLMTLLQRGRTAGAADSGRVLANLNAADYFGALVGGLLWPFLLLPHLGMIRGAAATGVINLVAAAGVAVFLLRHIVSGRQLAVALGALSAALVLLVTLLIRADGIETTTRQRLYNDPIVAFARSPYQEIVVTRRGDDLRLYLDGGLQFSTRDEFRYTESLVYPALGQGARSVLILGGGDGLAARELLRQNQIRDITQVELDPAVIDLARTTLREANRGALDDPRVTVVVDDAMTWLRSVDRTFDAVIVDLPDPDTPVLGRLYSTEFYALVTRALAPDGLMVVQAGSPYSTPTAFWRTVSTIESAGFAVTPYHVHVPTFGDWGFALARRGPTPPAPTVPEGVGPLRFLNQEVLDAATVFSADVARQRLEPSTLEHPRIVDDIRKGYR

SEQ ID NO: 14631 - protein, 192 aa, Chromobacterium violaceum ATCC 12472
MGWLGRENAMKRWGAMLMLWGQAALAACPALLNHSVPGLMGGQINLCQYADRPLLVVNTASHCGFTPQFTQLESLYKQYGPRGLMVIGFPSNDFFQELDKPSEIGAFCQANYGVTFPMAGKGHVRGADAQPLFKDLIAATDDAPSWNFHKYLILPGASKVISIGTRTKPDAPEVVNAFLPYLQPETQAAAKP

SEQ ID NO: 14632 - protein, 221 aa, Larix mastersiana
KAAGARIIVTQAAYVDKLADLQSDDMIVIAIDGAPKEGCQHISILTEADETQCPSVEIHPDDVVALPYSSGTTGLPKGVMLTHKSLVSSVAQQVDGENPNLYFHSEDVILCVLPPFHIYSLNSVLLCALRAGAATLIMQKFNLTTLLELIQRYKVTVAPIVPPIVLEISKNPIVSQYDVSSVRIIMSGAAPLGKELGDALRERFPKAIFGQGYGMTEAGPV

SEQ ID NO: 14633 - protein, 1142 aa, Triticum turgidum subsp. durum
METEEAGSPSPDDAVLFFGVALVLGIASRHLLRGTRVPYTVALLVLGVALGGLEYGTKHGLGKLGAGIRIWSAINPDLLLAVFLPALLFESSFSMEVHQIKKCMAQMVLLAVPGVVISTVLLGAAVKLTFPYDWNWKTSFLFSGLLSATDPVAVVALLKDLGASKKLSTIIEGESLMNDGTAIVVYQLFYRMVLGKTFDAGSIIKFLSQVSLGAVALGLAFGIASVLWLGFIFNDTIIEISLTVAVSYIAFFTAQDALEVSGVLAVMTLGMFYAAFAKTAFKGDSQQSLHHFWEMVAYIANTLIFILSGVVIADGVLQDNIHFERHGTSWGFLLLLYVFVQISRAVVVGVLYPLLRHFGYGMDIKEATVLVWSGLRGAVALSLSLSVKRASDSVQTYLKPEVGTMFVFFTGGIVFLTLILNGSTTQFLLHLLGLGKLSATKLRVLKYTQYEMLNKALEAFGDLRDDEELGPVDWVNVKKYITCLNNLEDEQAHPHDVPDKDDHVHTMNLKDTRVRLLNGVQAAYWGMLEEGRITQSTANILMRSVDEAMDLVSSQSLCDWKGLRSNVHFPNYYRFLQMSRLPRRLVTYFTVERLELGCYICAAFLRAHRIARRQLHDFLGDSEIARIVIDESIAAGEEAKKFLEDVRVTFPQVLRVLKTRQVTYAVLTHLSEYIQDLGKTGLLEEKEIVHLDDALQTDLKKLKRNPPLVKMPRVRELLNTHPLVGALPAALRDPLLSNTKETIKGHGTVLYTEGSRPTGVWLVSSGIVKWTSQRLCTRHSLDPILSHGSTLGLYEALTGKPYICDIITESVVHCFFIEAEKIEQLRQSDPSIEDFMWQESALVIARILLPQIFEKMAMREMRVLISERSSMNVYIKGEAIELGHNNVGILLEGFLKTENRTLITAPAVLLPSNTDLNLFGLQSSAMNQIDYCYTAPSYQVEARARAIIFEIGRLDIEADLQRSASLLSSTLGPSRTQSKEHVGLLRWPESFRRSSGPGNASLAEIRSQPGSFSARALQVSMYGSMTDGMHRARRQPRLAHVEGNQKHSVSYPKVPSRAADTRPLLSVRSEGSNAMKRKSAPAPAIAPALAPFPPPLAEGRQRRAVGEDDDSSDESVGEEVIVRVDSPSMLSFNPPSGPPRGS

SEQ ID NO: 14634 - protein, 221 aa, Larix mastersiana
KAAGARIIVTQAAYVDKLADLQSDDMIVIAIDGAPKEGCQHISILTEADETPCPSVEIHPDDVVALPYSSGTTGLPKGVMLTHKSLVSSVAQQVDGENPNLYFHSEDVILCVLPLFHIYSLNSVLLCALRAGAATLIMQKFNLTTLLELIQRYKVTVAPIVPPIVLEISKNPIVSQYDVSSVRIIMSGAAPLGKELEDALRERFPKAIFGQGYGMTEAGPV

SEQ ID NO: 14635 - protein, 139 aa, Triticum aestivum
  misc_feature (31)..(31): Xaa can be any naturally occurring amino acid
DGGVLREITMHDLLETIHICETDHLAIDVSXDSLPPLYVGYKDPGDRLHVGDARQLLRNSPEGKYDAINCDSSDPIGPAQELVEKPFFQTIAWASKPGRVLHNIAESMMVYTHVIQDMLSICREGFMAGLPYAWASVTT

SEQ ID NO: 14636 - protein, 1082 aa, Shewanella sp. ANA-3
MNRLSPQEPIQLTQTAIESLFTPPTLMRARDYVMQGRVLSAKANADFRHIEGTVTGTETTPYRQDIRLVSVNHKLVMNGFCSCPASGNCKHMAAVLYSLLTDKTVEDQRIAQWLHLLDEADDPNMNDVESLYDDRVLYILSKDDNGVFIELRRGKLGKKGGYNKGTKIALSDVQYYMPAWIGAEDVLILNLIMSTRRHGASRLYLKAQLGAVAIEKMLATERCFWEESRLALTAGEAITPQFLWQDIDSEHKQMRLVLPERDNWELVPTEPPYYIELDYFHIGLIDTDISVDKLRLLSQMPPVPSTQVELVSHRLIKHFSARTVPPPSAIDFVELRDKLQLRLTLKAIPAGTMPLGSTQPSALDTRIAQPYLALEFVYGDLVLSGNAAKEALTLVTQGGTTYQINRTLEEELQAVSKLQTLGFSRFSLEGAANGASLWSLGNLPDAIREWLAFIDEEVPKLQTQGIEVRFAPEFSLKVVDTPLTVELDDSQEGWFSLSLHADINGQRLPMLPLVATWLKQHGEPADDAELLLPSPSGEWLKIKASVIKPLMSIIQELFEQHRGQSIALPKYRAHLLNELAESEISLLNGERVRQLATKLAEFNGVVAVSAPTGLNAQLRAYQQQGLNWLCFLKEYQLGGILADDMGLGKTIQTLAFLLKQQEAKSVGQPRLPSLIICPTSLVGNWAKEAAKFAPSLTLAVIHGAQRGPLLSRLSEFDVVVTTYPLMVRDYDYYQAQPFEHIVLDEAQQIKNAQAKVSQQIKALQAPFRLCLTGTPLENHLGELKSLMDFCLPGLLGTTAYFNKAFRYRIERYGDSEQAKVLSQRIAPFVLRRTKAEVVTELPPKTEILQTLELEKDQRNLYESIRLSMEKKIRELFATQGVAGSHIEFLDALLKLRQACCDPRLVKLEQAQKVKNNAKLNWLNQNLPEMVQEGRKILIFSQFTSMLLLIEELLQSLNIDYSKLTGQTRLRQGQIDKFQEGDTPVFLISLKAGGTGLNLTAADTVIHYDPWWNPAAEKQATDRAHRIGQENPVFVYKLIAEGTVEEKIQEMQQHKQGLADSILEGKGKGAWQGSADELLSLFH

SEQ ID NO: 14637 - protein, 834 aa, Debaryomyces hansenii
MNSGPPDISLTFSELSLNEEKDESQRKHSKEKPKPSLNAQVKSNDRSKDKHKYKPKPQFPIAKSKYNNIENRTTKPDESKASTKQTIKPSSLERDEKKTSIRSADTRKSMSTLKSGKFSSLNNNKSFGTQVETNRVVTTFKSNIYASLGSHKKAATPRTEKIKPPTTKNSSREYFKVHDRWANYSKTKNPGLVVANSRNKESEVFGAKRTNDDESASNSLLANLANKYEHDFEEEEVKPEDCIVDGLNVSLLPHQVSGLRFLKRREAIKGSSQGGLLCDDMGLGKTIQTITLILENKGKCEHKTNLIVCPVSLTNQWKSEIESKASGLSVMIFHGPDRPKKYEELAEYDVVITTYATVSSEFHKSGSPSALYSPEFRWWRIILDEAHQIKNKNSKQAIAVFNLDADRRWCLTGTPLQNNLGELQSLFKFIRVSKYADDKIWSDTIQRSLQERDMYTALFELRDELSNLMLRRTKAILSSSHNTFKLPPKNVHKIMVEFSEFERSIYNNVKHIILSNLNNGPARDKKTEVVRDNAPTLKLKKEITQAKTGNVNYMSALVYLLRLRQLCCSWNLLFEDTEDSLNFEGKLTTSNDKDTSLDNLITSMGGLSVDSKNCEICMKRLDANNQSTDGTRFCKACGESVKVPKHHEDDYYVSSKIKQVLEILMTNRDRKTIIFSQFPSLFKVLGDTLSTKGFKILTYDGSMDIKARNFALNSLKNDPDMNVLLCSLKCGSVGLNLTCASQVILFDPWWNPQIQEQAIDRVYRIGQTKPVDIYELTVKNTVEDNILKLQKTKRQLANAVTSNSSKINANSISNNLTKKELLQLFGIEEPNNLS

SEQ ID NO: 14638 - protein, 218 aa, Bdellovibrio bacteriovorus HD100
MIKSKVRTASKGFPRAFSCDLPPPPLEYAHQGETMRIFTLIALILCTSFAWAKDTPSSFFDLSANSLSGKKVNFSTYRGKVVLVVNTASQCGFTPQLKELEEMYKKYADRGFVVLGFPSNDFKQEKGTNDEVQTFAAKEFGVTFPLFDKAPVSGKDIQPVYQFLTTQKPGLIFKDVAWNFEKFLINRKGQVVERWSSITKPSSDSITKSVEKALNEPL

SEQ ID NO: 14639 - protein, 730 aa, Ostreococcus tauri
MDATANDRETIAPRVVCETPTKPTRPSSSARGVVKETPVKHELVRVRSMHDASARGALTFATATECEEMCSREKHARCQLGVTCDPYVSGKLREHQRAGARWMYRALHGLDERERSNAGTRGVVLADEMGLGKSLQVLAVLWTMLTQGPSGEPTCRRAVLVCPASLIGNWGAEFKKWLGGVRAQASLCEGNAEAVDAACDRWCAEPRTDSKSAFDRWPVLVMSYETARRLAPRVRAMRPELMICDEAHRLRNAMGSQTMTALREIEAPMRVLLTGTPVQNNLNEYAAVLDFAQPGILGSLEDFQRDFAQPIQRQYERGASEQEIAKGRKMAEELNRRTSGKILSRKASTNAAYLPKKTEIVVLCPPTQSQRMAYESGAKLVETWTKKDNSASFGAAALCAIGILRQAANEVDQILMQANSVAEVQTDAEKELDVEVESDAIARATTTETSVDELKAVMADALPSGYGGGIDGSGKFTVLQRMLEALKDRGDCLERVVIVSGYSASLASADKICKKLDLPTSRLDGTVPVDLRTSIVKDFNNGDGGQVMLLSVVAGGAGLNLVGANRLILMDVSWNPAHDRQAMGRVWRDGQRKPVTIYRLITSGTVEQKVFERQLGKEVLKNTVESGYAGYEGDGFVTKDSLTGLVKFTGDGASSNVLWGHALDVVDCPLLRFANARGAMFSVIEVDDARANEQPASAPKRAAPKDVLAGKLARKRIAFADLFSAAARRK

SEQ ID NO: 14640 - protein, 547 aa, Zea mays
  misc_feature (188)..(188): Xaa can be any naturally occurring amino acid
MGLGLGALLKSGGLSVSDHDAIVSINIFIALLCSCIVIGHLLEGNRWVNESITALVMGLITGGVILLVTNGTNSRILVFSEDLFFIYLLPPIIFNAGFQVKKKQFFRNFITIILFGAIGTLISFVIISLGAMGLFKKLDVGPLELGDYLAIGAIFSATDSVCTLQVLNQDETPLLYSLVFGEGVVNDXPTSVVLFNAIENLDIDNFDAIVLLNFVGKFLYLFFTSTILGVATGLLSAYIIKKLCFARHSTDREVSIMILMAYLSYMISMLLDLSGILTVFFCGIVMSHYTWHNVTESSRVTTKHTFATLSFIAEIFLFLYVGMDALDIEKWKLASSSPKKPIALSAIILGLVMVGRAAFVFPLSFLSNLSKKEARPKISFKQQVIIWWAGLMRGAVSIALAYNKFTASGHTEVRVNAIMITSTVIVVLFSTMVFGLLTKPLLSLLIPPRTGLNTSSLLSSQSMLDPLLTSMMGSDFDVGQINSPQYNLQFILTAPARSVHRLWRKFDDRFMRPVFGGRGFVPFVPGSPVERSVPESHLGTVTEAEGS

SEQ ID NO: 14641 - protein, 160 aa, Arabidopsis thaliana
MESEGKIVFTEEQEALVVKSWSVMKKNSAELGLKLFIKIFEIAPTTKKMFSFLRDSPIPAEQNPKLKPHAMSVFVMCCESAVQLRKTGKVTVRETTLKRLGASHSKYGVVDEHFEVAKYALLETIKEAVPEMWSPEMKVAWGQAYDHLVAAIKAEMNLSN

SEQ ID NO: 14642 - protein, 429 aa, Pyrobaculum aerophilum str. IM2
MPDGLAVWRVLRGAGVKLVKFIVVDIFGRPRAEVLPIEAAREAFLDGVAYDGSSIPAYTTVNKSDLVAVPDLNAVYVESWNGGKTAIVFTNTVDGGKPHPMDPRNVLRQAADYAKSRGYAPVVGAEVEFFLVRGVPPAPADSGVYFDGYLHGDSYAAVEEILGHLEASGIGLSKTHHEVAPGQYEVNIPAGDPVQVADQILVFKIMAKAVAKRRGLTATFMPKPFWGVNGSGMHVHVSFWKDGVNLFASRGEPTQELKWAVAGVLENALRNSAFVAPTVNSYKRLVPHHEAPTRVVWGLGNRSVMVRIPYYGGRINRLEYRHPDPSANPYLAFAVIILSALAGIEKKREPPPPVAEVAYELEEARETPPNLGEALKMARDGTPLPGQFLEAYLRLKEREWEEYITAEGSWETTWNKITKWEYEKYLEEA

SEQ ID NO: 14643 - protein, 387 aa, Zea mays
MATTSTPRLATLLVLLAARFMAAGTQLKRSPPRFPTPPSARPWADGWADAWASAADNVFSRFLPDDHHIRDDKPSPAHFPSAADMASHHQQEQMMLHSQSQSQHQQETGRSGGGLYRTVSSAMEAGGTGVGAASSLIRQSSSPAGFLDHFGMDNGYGAMLRASMGMGFQEGVASDSLAGGGGGGGSGRLGGQLSFSSRQGSLMSQISEMDSQEDVVGASSPDAGGGGDAAYMPGYPMSSGGWDDSSSALLPDSLPATNKRPRDSLEHGGGLAHQFSLPKTSSSEVAAIEKFLQFQDAVPCKVRAKRGCATHPRSIAERVRRTKISERIRKLQELVPNMDKQTNTADMLDLAVDYIKDLQKQVKVTSSGGRRSSVSSSRAPIARSESQ

SEQ ID NO: 14644 - protein, 469 aa, Pectobacterium atrosepticum SCRI1043
MSAEHVLTMLNEHEVKFVDLRFTDTKGKEQHVTIPAHQVNADFFEEGKMFDGSSIGGWKGINESDMVLMPDASTAMIDPFFEDTTLIIRCDILEPGTMQGYDRDPRSIAKRAEDFLRSSGIADTVLFGPEPEFFLFDDIRFGSSTSGSHVAIDDVEAYWNSGKAYEGGNKGHRPGLKGGYFPVPPVDSSQDIRSAMCLTMEQMGLVVEAHHHEVATAGQNEVATRFNTMTKKADEIQIYKYVVHNVAHAYGKTATFMPKPMFGDNGSGMHCHMSLSKDGTNLFAGDKYGGLSEMALFYIGGVIKHAKAINALANPTTNSYKRLVPGYEAPVMLAYSARNRSASIRIPVVASPKARRIEARFPDPAANPYLCFAALLMAGLDGIINKIHPGDAMDKNLYDLPPEEEAEIPKVAGSLDEALAALNEDREFLTRGGVFTDDAIEAYIELRKPEIDRVRMTPHPVEFELYYSV

SEQ ID NO: 14645 - protein, 932 aa, Cryptococcus neoformans var. neoformans B-3501A
MPSIRPSLSTLPSYLALPSRRTKWKALIVGSLNFYRIHLITFTVVPLITSSIMFACNTEYHISYIDCLFCCMSAMTVTGLATVDLSTLSPFQQVILFLQMIIGSLSFVSIVMILVRQYFFRQTFKHVLQERERRRTRLTKTITRVATAAPPISAIRKRFGAGFRQFDKGDTELKNGSPERSAPSSLELKAVSHSPKKPEDHHHKHWKKGHQKLRPDMIKRVQGGGVGLVNPMGWYDVERAEIATPAPTPELRSDTPLPSGKTVAADGKDLSQALEAVVVSGVAQARQSAGEAEQEVSEVENKEPKTKLSEAEAGAKVADKVSTGSNEGDRTPTPPPSPARHKIPYAGLQLTDEAFPRSKTIAFEDTIDDSHDHRERGPTTQREGGTFPRTATFRNNAVDPRLPHSATMQSNAGNFPRTYSLRPMNSRRTDAKMEGFGGFPTPLAIGKKVFGKVFPETSKSLSKTFTVPRTNTLSGRSTGGGTEGKDAPYISFSATVGRNSRFQGLTTEQMDELGGVEYRALRVLLYIVVGYVIFMPLAGFVIIAPYISAGNRYDYVFNEQPRNVGIPWFALYQSISAFTNTGMSLCDMSMLPFQRAYLMIVVMIILIFAGNTALPVFLRCTVWVIYKCVPESSRVRESLKFLLDHPRRCFVYLFPSTQTWVLALVMLTLTLIDWVSFLVLDLGTEAIMSLPIGTRIAAGFLQSAAVRAAGFSIVPLGDLAPAVKVLYVVMMYISVYPIALSVRSTNVYEEKSLGLFGDEVEDDDLSEEGSGAHAVAKYIGWHARRQLAFDIWWLAFALWLVCIIERGHIDNDQEWFSIFNIIFELVSAYATVGLSLGVPYDNYSFSGGFRKLSKLVVIIVMLRGRHRGLPVAIDRAVMLPKDFTTAEETAFEEERSRRASRMGSLFNEDVFDMRRGSYGGDVPNYRASDPAS

SEQ ID NO: 14646 - protein, 399 aa, Brassica napus
  misc_feature (235)..(235): Xaa can be any naturally occurring amino acid
  misc_feature (380)..(380): Xaa can be any naturally occurring amino acid
LFSQTQQMLDILESFLVANEYSYRRMDGLTPVKQRMALIDEFNNSDDVFVFVLTTKVGGLGTNLTGANRVIIFDPDWNPSNDMQARERAWRIGQKKDVTVYRLITRGTIEEKVYHRQIYKHFLTNRILKNPQQRRFFKARDMKDLFILNDDGDSNASTETSNIFSQLSEDINIVGAQTENTTDSTTQLDTHDAAEELSGEKDAETNGEPVDEETNILKSLFDAHGIHSAVNHDAXINANDEEEKMRLEHQASQVAQRAAEALRQSRMLRSRESISVPTWTGRSGCAGAPSSVRRRFGSTVNSRLTTADKSSAVKNGISAGLSSGKAPSSAELLNKIRGSREQAIGVGLEQTQTSSSSSSRVGSLQPEVSIRQICSFVQRXGGSTDTSSIVNHFSDRVPG

SEQ ID NO: 14647 - protein, 240 aa, Petunia integrifolia subsp. inflata
MGRGRVELKRIENKINRQVTFAKRRNGLLKKAYELSVLCDAEVALIIFSNRGKLYEFCSSSSMLKTLERYQKCNYGAPETNISTREALEISSQQEYLKLKARYEALQRSQRNLLGEDLGPLNSKELESLERQLDMSLKQIRSTRTQLMLDQLQDLQRKEHALNEANRTLKQRLMEGSTLNLQWQQNAQDVGYGRQATQTQGDGFFHPLECEPTLQIGYQNDPITVGGAGPSVNNYMAGWL

SEQ ID NO: 14648 - protein, 285 aa, Xylella fastidiosa 9a5c
MTTNDSWFTEHFQATGSAIGFRITGKLDEVQSPFQKIEIYNSTDWGKLMVIDGALMLTSRDNFLYHEMISHPALFTHTAPKCVVIIGGGDCGTLREVLKHPDIEQVTQCDIDEQVTRMAEKHFPELCTSNNDPRATLLFSDGVAYMTDCPTNSVDVIIVDSTDPVGPAKGLFNRTFYESCFRALKNDGLLVQQSESPLALLELIKEMRHEMSKAGFKAFKTLPFPQPCYPTGWWSVTLSSKQPNANFAFRQTDAQTKPFDTLYYNAHLHHGVLVPPPFIAHALGE

SEQ ID NO: 14649 - protein, 95 aa, Arabidopsis thaliana
  misc_feature (39)..(39): Xaa can be any naturally occurring amino acid
  misc_feature (84)..(84): Xaa can be any naturally occurring amino acid
  misc_feature (87)..(87): Xaa can be any naturally occurring amino acid
  misc_feature (89)..(89): Xaa can be any naturally occurring amino acid
  misc_feature (91)..(91): Xaa can be any naturally occurring amino acid
  misc_feature (93)..(93): Xaa can be any naturally occurring amino acid
MASSMLSSATMVASPAQATMVAPFNGLKSSAAFPATRKXANNDITSITSNGGRVNCMQVWPPIGKKKFETLSYLPDLTNFEKAXEVXDXLXPXKW

SEQ ID NO: 14650 - protein, 537 aa, Oryza sativa; identical to SEQ ID NO: 11870

SEQ ID NO: 14651 - protein, 500 aa, Kineococcus radiotolerans SRS30216
MTLDEFSRVLLLSSGVLLLAVLAVRLSARTGLPSLLIYLGLGLVLGEDGLGIPFADAEIAQVLGYGALVLILAEGGLTTRWSAIRGVVAPAAVLSTAGTLVSIGVVGVGAHLLLQTTWPVSLLIGAVVSSTDAAAVFSVLRSVPLPRRLSGLLEAESGLNDAPVVIAVLALTEVAGGTAHHAWWYFAGEAVLELVLGTAVGVGIGAAGAFLLRRTALPSSGLYPVAVLALTVMAFAVADVLHASGFLATYLCGLVLGNARLPHRHATRGFAEGFGWLAQIGLFVMLGLLASPSRLPNALVDALLVGLVLTLLARPVSVLVSLAGFRMPGRELLFLSWAGLRGAVPVVLATVPVVAGVEGSERLFDLVLVLVVVFTLVQAPTLAPVARRLGLIPSTPTQELDVEVSPLGTLSADVVQVRVGPASRLHGVEVFELRLPRGANVSLVARDGATFVPQPRTVLRRGDDLLVVTATSERSAVEERLQAISRHGKLAGWRSSPNGE

SEQ ID NO: 14652 - protein, 473 aa, Synechococcus sp. CC9605
MSKSPQDVLRQIKDEGIELIDLKFTDLHGKWQHLTVCTDLLEEESFTEGLAFDGSSIRGWKGIQASDMAMVPDANTAWVDPFYKHKTLSMICSIQEPRTGQPYERCPRALAQRALNHLASTGLADMAFFGPEPEFFLFDDVRYNSAEGGSFYSVDTIEAGWNTGRIEEGGNLAYKIQVKEGYFPVAPNDTAQDIRSEMLLLMSQLGIPTEKHHHEVAGAGQHELGMKFAELIQAADNVMTYKYVVRNVAKKYGKTATFMPKPVFNDNGSGMHVHQSLWKGGQPLFFGEGTYANLSQTARWYIGGILKHAPAFLAFTNPTTNSYKRLVPGFEAPVNLVYSEGNRSAAVRIPLTGPSPKAKRLEFRSGDALANPYLAFSAMMMAGLDGIKNQIDPGDGEDRDLFELPAEELSKIATVPASLNGALEALNADRGFLTAGGVFSDDFIDNWIDLKYEEVQQLRQRPHPHEFTMYYDA

SEQ ID NO: 14653 - protein, 618 aa, Candida glabrata CBS 138
MKHYKLYLLLAGVYAETVVGPLDEDLPSMEPVADPELSPVTEEMFSSWALFILLFLLISALWSSYYLSRRRIRAVHETVLSIFYGMVVGLIIRMSPGHYIQDTVTFNSSYFFNVLLPPIILNSGYELNQVNFFSNIVSILTFAIPGTLISAVVLGTILFIWTSLGLEGVNISFLDALSVGATLSATDPVTILSIFNAYKVDPKLYTIIFGESLLNDAISIVMFETCQKFHGQPAKFSSLFAGAGLFLMTFSVSLLIGVLIGMLVALILKHTHIRRYPQIESCLILLIAYESYFFSNGCHMSGIVSLLFCGITLKHYAYYNMSRRTQVTVKYIFQLLARLSENFIFIYLGLALFTEVELVYKPLLIIVTAISICVARWCAVFPLSNFVNWIYRVRTLHSIRPSVGESIAVPDEIPYNYQVMTFWAGLRGAVGVALAMGLQGEFKFTLLATVLVVVVLTVVIFGGTTAGMLEVMNIKTGCVDNGDPEEDEFDIENVGEDPLDDEPLQFNANSRNLMRPYTDLPTPVGNVRDFDENDFPSMSATPDRMSEQAASSQRPSGERTNLKDAIGNMLRTDSQWFQNFDEQVLKPVFLDSTSSPMTNRDEGLNSNRDSPRFMSSRK

SEQ ID NO: 14654 - protein, 375 aa, Chlamydomonas reinhardtii
MHRLRSCVALAHPRVFANRRIPSGQQRRIDRDRSNEGLAALVQSGLGRRPKVTVCFYALYIMANYAKRLWLEEDLGDDYRWSYRVSEVLFSGRSEFQEIDLVDTPTWGKVLLLDGKMQSTEADEQVYHELLVHPPLLHHACPKRVYIMGGGEGATAREVLRHKTVEQVVMVDIDKVVTDFCSKHLERNTQAFADPRLTLINDDARTQLEQAPDGSFDVVIGDLADPLDGGPCYQLYTQEFYRNVVLKKLAPGGIFITQSGPAGFLSCKEVFTAIHSTVRSVFPVVVPYAQHIPSFCDIWGYNMAFSDAAQAPLSPEELDSRIGARLDGVPLHFLDGVTFQGLRHLNKMVRVALQEEKEVYTVDSARFIHGAGVKA

SEQ ID NO: 14655 - protein, 283 aa, Clostridium perfringens str. 13
MELWYTEEHTDKVRFSIKVDEQLYSGKSDFQRIDVFKSQEFGTFFTLDGLMMVTEKDEFIYHDMIVHVPMATNPNIKNVLVIGAGDGGTVRELTRYETIEKIDMVEIDKLVVDVCREYLPQTANKLDDPRVSLFFEDGLKFVRSVENKYDLIIVDSTDPFGPGEGLFTREFYGNCFKALKEDGILVNQHESPYYEEYARGMKRAHKRIKECFPVCRVYQAHIPTYPSGHWLFGFASKKYDPLNADIEKWNDLGLKTKYYNTDLHKGCFALPNYVKEMLENVDE

SEQ ID NO: 14656 - protein, 857 aa, Arabidopsis thaliana
MDRTIVWVAIKIASNSRVRVSQLRSTSERGKPKRIQFTSSSPKFSSKFSTFTGLMDILQTDQASSNGYYKNVHKRKQNQVDDGPEAKRVKSSAKVIDYSNPFAVSNMLEALDSGKFGSVSKELEEIADMRMDLVKRSIWLYPSLAYTVFEAEKTMDNQQVVEGVINLDDDDDDDTDVEKKALCVVPSSSEIVLLDSDDEDNERQRPMYQFQSTLVQHQKNQGDVTPLIPQCSFEEVDLGRGKEMPSAIKAIVEGQTSRGKVLPIENGVVNEKGVYVGVEEDDSDNESEAADEDLGNIWNEMALSIECSKDVARETSHKEKADVVEDCEHSFILKDDMGYVCRVCGVIEKSILEIIDVQFTKSFLAKYPQAKPLVVLPKGILPTWKKEFVRWQVEDIPLLDFYSAKAENRAQQLSILKQWMEKKSILFLGYQQFSTIVCDDTTDSLSCQEILLKVPSILILDEGHTPRNEDTNLLQSLAQVQTPRKVVLSGTLYQNHVKEVFNILNLVRPKFLKLDTSKSAVKRILAYTPCDVRGRLTGSNSDMASMFNETVEHTLQKSEDFTVKIKVIQDLREMTKKVLHYYKGDFLDELPGLADFTVVLNLSPKQLNEVKKLRREKRKFKVSAVGSAIYLHPKLKVFSDKSDDVSDTTMDEMVEKLDLNEGVKAKFFLNLINLCDSAGEKLLVFSQYLIPLKFLERLAALAKGWKLGKEVFVLTGNTSSEQREWSMETFNSSPDAKIFFGSIKACGEGISLVGASRILILDVPLNPSVTRQAIGRAFRPGQKKMVHAYRLIAGSSPEEEDHNTCFKKEVISKMWFEWNEYCGYQNFEVETIDVDEAGDTFLESPALREDIRVLYKR

SEQ ID NO: 14657 - protein, 618 aa, Candidatus Phytoplasma australiense
MAKSNKIIGIDLGTTNSCVALMEGGEAKVIPNAEGGRTTPSVVSFKGNDIMVGEIAKRQVITNPNTISSIKRHMGEANYTVDVNGKKYTPQEISAMILTNLKKTAEDYLGAEVTDAVITVPAYFNDAQRQATKDAGKIAGLNVKRIINEPTAAALAYGADKSNKEQTILVFDLGGGTFDVSILDLADGTFEVLSTSGDNALGGDDFDLRIVDFLVKEFKKDNGVDLSKDKMAMQRLKDVAEKAKKELSGVTSSQISLPFLTMSASGPLHLEYNMTRAKFNELTKDLIDRCLGPVKRALSDAKLTIEKIDQVLLVGGSTRIPAVQELVKKELQKTPNKSINPDEVVAIGAAIQGGILAGDVKDILLLDVTPLSLGIETLGNVFTKLIERNTTIPTSQKQVFSTASDNQSAVDIHVLQGERPLAADNKTLGQFRLTDIPPAPRGIPQIEVTFDIDANGIVSVKAKDLGTQKEQKITISGSGALKEEEIKRMIREAEENAEADRVKKEGIDARNEADNMIFLTKKSLDDLKAEVTPEEKEKVEKQIQELETALKGEDISLIKEKTASLSKESQGIAMKAYQKAQQQQQNQNEANPEQPNSSDKDKKDGVDEVVDADFEEKK

SEQ ID NO: 14658 - protein, 163 aa, Gossypium hirsutum
MATYEGKVFTEEQEALVVKSWTVMKKNAAELGLKFFLKIFEIAPSAKKLFSFLRDSNVPLEQNTKLKPHAMSVFVMTCESAVQLRKAGKVTVRESNLKKLGATHFKYGVVDEHFEVTKFALLETIKEAVPDMWSDEMKNAWGEAYDRLVAAIKIEMKACSLAA

SEQ ID NO: 14659 - protein, 261 aa, Coccidioides immitis RS
MSAPLILLPGDTVPSHLKTASNNSLKLGQNLHVLSHATSPIPITSTQAGLLLQDPKRNSVNILTFPRRRYIPQPSDLVIAQIHHSSADYFHCTLSPHTPHVFLPQLAFEGATRKTRPQLKSGELVYARVLSVGLGPGAEIELTCVNPATGKAEPGGLGPLNGGMVFDVSVGLAGRLMSPGGSGGVVVLEELGKKLESLGGFEIAVGKNGRVWVDSSAGGEEGIKMIVAVGRCLREVDEENLEVGEQKKLVSRVLKQMGLGA

SEQ ID NO: 14660 - protein, 190 aa, Gleditsia triacanthos; identical to SEQ ID NO: 7792

SEQ ID NO: 14661 - protein, 1006 aa, Myxococcus xanthus DK 1622
MSATAELLDAVREEARPDTWSAGTGLARAGAVSVQSVDEEEAVLRVRVPSRPAPVKTVLYLDEAIWECDCRGRVDPCEHVVAAALILHQHATARRTPAQRPATPAARPGANTITRPSAPAAGAPKPERMVYRFKRVDGGLQLERLVVRPDNTARLLARSLASLLTNPVEAARIQTQPCDLLADKLLLKPTRGALPPERLNALLRVLEPARTVLFDGALVSVTSEPLMPRVTVEDRGENTVLKVEKDPRVTEVVSPGLALCSGTLCPLGEQGLTGPWLEKLPQERAFAPHQMGDLTGKVLPDIARRMPVDVRSQRLPPIDRTLKPRISLELNQLDTGLSVLPTLVYGSPPTVRIDSGRMVYLKGAAPVRDEAAEQMLIHQLRDELNMAPGRRVTVQGKEAVQLADKLRRWRGGLTGDGAAVVTNPNVQLRPVLKVDTGAVTEGVPHVGFSFDFQVEGEDRESPRSVDAAAVMRAWEEGLGLVPLEGGGWAPLPAEWLKSHGQRVADLLSARGRDGRLANHAIPQLTGLCEALEHPSPPGLERLAPLVKGFEKLPEPQLPEDLTATLRAYQLQGVSWLTFLRQAGLGGVLADDMGLGKTLQTICTLGPGTLVVAPTSVLPNWEAEVKRFRPSLKVSVYHGPGRALDESADVTLTTYALMRLDAEVLGAKQWSTVVLDEAQAIKNPDSQVARAAYGLQADFKLALSGTPIENRLEELWSLMHFTNQGLLGGRKDFEERWARPVADNHKGAAERLRARIRPFILRRLKRDVAPELPPRTDAVRHVTLTERERAVYDAIYAATREEVVSQLEAGGSVLKALEALLRLRQAACHPALVPGQQAKTSSKVQALVEALGTAVEDGHKALVFSQWTSMLDLIEPALQEAGIGFIRLDGSTANRGAVAASFQDPKGPPVMLISLKAGATGLNLTAADHVFLVDPWWNPSVEAQAADRAHRIGQQRPVMVYRLVSQGTVEEKILTLQAKKRELFEAALGGGSGATAITRADLMQLLE

SEQ ID NO: 14662 - protein, 320 aa, Oryza sativa Japonica Group; identical to SEQ ID NO: 11744

SEQ ID NO: 14663 - protein, 241 aa, Oryza sativa Japonica Group
MSEGFDGTENGGGGGGGGVGKEQDRFLPIANIGRIMRRAVPENGKIAKDSKESVQECVSEFISFITSEASDKCLKEKRKTINGDDLIWSMGTLGFEDYVEPLKLYLRLYREGDTKGSRASELPVKKDVVLNGDPGSSLVNYGAQRADANANHLDLFFLLRKNPESTTANCMREDEAKPVTVKIIETVYVEADTADDFKSVVQRLTGKDAVAGDAPELNSAQRFGSGREASRHGDHKVRIYE

SEQ ID NO: 14664 - protein, 387 aa, Arabidopsis thaliana
MGRVKLKIKKLENTNGRQSTFAKRKNGILKKANELSILCDIDIVLLMFSPTGKAAICCGTRSSMEEVIAKFSQVTPQERTKRKFESLENLKKTFQKLDHDVNIREFIASSNSTVEDLSTQARILQARISEIHGRLSYWTEPDKINNVEHLGQLEISIRQSLDQLRAHKEHFGQQQQAMQIENANFVKDWSTCSMQDGIQIPLEQQLQSMSWILNSNTTNIVTEEHNSIPQREVECSASSSFGSYPGYFGTGKSPEMTIPGQETSFLDELNTGQLKQDTSSQQQFTNNNNITAYNPNLHNDMNHHQTLPPPPLPLTLPHAQVYIPMNQREYHMNGFFEAPPPDSSAYNDNTNQTRFGSSSSSLPCSISMFDEYLFSQVTKTKLSQRFG

SEQ ID NO: 14665 - protein, 285 aa, Xanthomonas oryzae pv. oryzae KACC10331
MSTNDNWYIEHFQPTGSAIGFRISGKLDEVQSLFQKIEIYQTTDWGKLMLIDGAVMLTSRDNFFYHEMISHPALFTHPTPKRVVIIGGGDCGTLREVLKHPGVESATQCDIDEQVTRMSEKYFPELCDSNHDARAELLFDDGVAYMANCPAGSVDIVIVDSTDPVGPAEGLFNKAFYESCFKALKDDGLLVQQSESPLALLDLIKEMRTEMGKAGFQSFKTLPFPQPCYPTGWWSVTMASKQAKADFAFRQGAAQAKGFETLYYTAHLHTGVLVAPPFVAKALGE

SEQ ID NO: 14666 - protein, 675 aa, Haemophilus somnus 2336
MKLPQQLRYLLCLLFGFVLSLNYAVAVEPKLKLTDLVIPQITQENQLATKRTAARLVHSHYQAVELNDEFSQRIFDRYLKALDFNRNTFLQSDIDNMRATYADKIDDVLNEGKLDIAFNMYELLMKRRYERYRYALSLLDEEPDLNGNDQIEIDREKADWPKNETEANKLWEHRVKNDVINLKLKGKKWPEIQTRLVKRYNLAIQHLSKVKSDDIVQLYLNAFAREIDPHTSYLAPRTAKNFNENMNLSLEGIGATLQSEDGETTIKSLVPGAPADRSKKLKAGDKIIGVGQATGEIEDVVGWRIDDVVDKIKGKKGTKVRLEIEPAKGGKSQIITLVRDRVRLEDQAAKLTVETVAGNKIAMIKIPGFYNGLTEDVRKLLAEVEAKKAEALIIDLRGNGGGSLPEAIELTGLFITDGPVVQVRDAHQRIRIYDDPDTEQVYSGPLLVMIDRFSASASEIFSAAMQDYNRAIILGQNTFGKGTVQQSRSLNFVYDSNSMAPLGLLQYTIQKFYRINGGSTQLKGVAPDIIFPSSIDDEEYGEEKEDNALPWDKIPSASYSEVGNARLPVDILNQKHLERIAKDPEFIALDEDLKIRDERKKRKFLSLNFAQRKAENDKDDEKRLKDLNARFKREGKKPLKDLEALPKDYEDPDFYLKEAQKIAVDLIEFNKKMAE

SEQ ID NO: 14667 - protein, 463 aa, Actinoplanes teichomyceticus
MIRMTLGEIAGITGGRLVNSDGSAEVTASVEYDSRKVVPGGLFVAFPGERVDGHDFASAVVAAGAAGVLGTRDTGEPGVVVEDSLRAVATLAHEVVARLPELTVVGLTGSSGKTTTKDYIGQLLSRLGPTVALPGSLNNELGFPYTVLQAGADTRFLVLEMGARGVGHIRHLTGIARPSIGVVLNIGAAHIGEFGSVEGTALAKGELVEALPQTGVAVLNADDALVSAMASRTGARVVTVGEAAGAQLRAVDVTLDPAGRASYVLEHGERRGTVRLRVAGRHQVANSLSAAAVALTAGLAFDDLVTALSEMSMVSDRRMDVFERPDGVTVIDDSYNANPSSTAAALRALAAMSAGRRTTAVLGYMAELGEFEVSGHAEVGRLAAELGVDRLIAVAENARPILDGAAEVGAWRGTARFAADQAAAIEILQDDLRADDVVLVKGSRYRTWDVADWLRRSEEVQPT

SEQ ID NO: 14668 - protein, 639 aa, Bacteroides fragilis YCH46
MGKIIGIDLGTTNSCVSVFEGNEPVVIANSEGKRTTPSIVAFVDGGERKVGDPAKRQAITNPTRTIFSIKRFMGENWDQVQKEIARVPYKVVKGDNNTPRVDIDGRLYTPQEISAMILQKMKKTAEDYLGQEVTEAVITVPAYFSDSQRQATKEAGQIAGLEVKRIVNEPTAAALAYGLDKAHKDMKIAVFDLGGGTFDISILEFGGGVFEVLSTNGDTHLGGDDFDQVIIDWLVQEFKNDEGADLTQDPMAMQRLKEAAEKAKIELSSSTSTEINLPYIMPVGGVPKHLVKTLTRAKFESLAHNLIQACLEPCKKAMQDAGLSNSDIDEVILVGGSSRIPAVQKLVEDFFGKTPSKGVNPDEVVAVGAAVQGAVLTDEIKGVVLLDVTPLSMGIETLGGVMTKLIDANTTIPARKSETFSTAADNQTEVTIHVLQGERPMAAQNKSIGQFNLTGIAPARRGVPQIEVTFDIDANGILKVSAKDKATGKEQAIRIEASSGLSKEEIEKMKAEAEANAEADKKEREKIDKLNQADSLIFQTETQLKELGDKLPADKKAPIEAALQKLKDAHKAQDMTTIDSAMAELNTAFQAASAEMYAQSGAQGGAQAGPDMNAGQSNAGQNNGKQDDNVQDADFEEVK

SEQ ID NO: 14669 - protein, 496 aa, Listeria innocua Clip11262
MEQSPQNKEEKVEKPEEEKTKPGNGYIKMKLFPFIMLLFAFVFVTALVTTIVMSLGDDKQVKVSIPERKEFTKLYDVYDEISEKYYKDTKSTNMIDGAITGMVNSLDDPYSTFMSKKESAEFNDTISSSFEGIGAEIQEKDGAIVVVSPIKNSPAEKAGLRPQDIITQVDGKSVKGDTATEATKKIRGEKGTDVTLTIQRSNEDKPFDVTITRDEIPIETVYKEMGNDKIAHVTISTFSENTYDELEKALKALEKDGMKGLVIDLRGNPGGLLDQAVSISSLFVPDGKIVVQEQGKDGDKSAIKADSSSHGDYKVKVPTTMLIDGGSASASEILAAAAKESGGIKLVGNKSFGKGTVQTATTLSDDSTLKLTVAKWLTPNSEWIHEKGITPDVVVNMPSYATMTIPSSTKVYKNGDFGDDVKTIETLLKALDYNVGKVDGLYDIDTEYAVQRFQAANNLDVTGIMTGVTTDKLVELTQKHLKETDPQLQKAKALVK

SEQ ID NO: 14670 - protein, 754 aa, Streptococcus thermophilus LMG 18311
MTLNQLLQKLEATSPILQANFGIERESLRVDRQGQLVHTPHPSCLGARSFHPYIQTDFCEFQMELITPVAKSTTEARRFLGAITDVAGRSIATDEVLWPLSMPPRLKAEEIQVAQLENDFERHYRNYLAEKYGTKLQAISGIHYNMELGKDLVEALFQESDQTDMIAFKNALYLKLAQNYLRYRWVITYLFGASPIAEQGFFDQEVPEPMRSFRNSDHGYVNKEEIQVSFVSLEDYVSAIETYIEQGDLIAEKEFYSAVRFRGQKVNRSFLDKGITYLEFRNFDLNPFERIGISQTTMDTVHLLILAFLWLDSPENVDQALAQGHALNEKIALSHPLEPLPSEAKTQDIVTALDQLVQHFGLGDYHQDLVKQVKAAFADPNQTLSAQLLPYIKDKSLAEFALNKALAYHDYDWTAHYALKGYEEMELSTQMLLFDAIQKGIHFEILDEQDQFLKLWHQDHVEYVKNGNMTSKDNYVVPLAMANKTVTKKILADASFPVPSGDEFTSLEEGLAYYPLIKDKQIVVKPKSTNFGLGISIFQEPASLDNYQKALEIAFAEDTSVLVEEFIPGTEYRFFILDGRCEAVLLRVAANVIGDGKHTIRELVAQKNANPLRGRDHRSPLEIIELGDIEQLMLAQQGYTPDDILPEGKKVNLRRNSNISTGGDSIDVTETMDSSYQELAAAMATSMGAWACGVDLIIPDETQIATKENPHCTCIELNFNPSMYMHTYCAEGPGQAITTKILDKLFPEIVAGQT

SEQ ID NO: 14671 - protein, 528 aa, Thermobifida fusca YX
MVDTTPAQPAEQKERLPLPPRIARFVVLFAVFVCAACGLVYELALVALGSYLLGDTITQASVVLAVMVFAMGVGSLASKQLTHRPAFWFAVVEGLLSLLGGLSVLILYAAFAWFSLYQPALVSLSFLIGVLIGAEIPLLMTLIQRIRRQEAASAVADLFAADYVGGLIGGLAFPFLLLPVFGLLEGVLLVGILNAVTGIAIVLWLFRHSLTRGGRIGLAAGLALVMAVSGSALALSERFEVDARQALYRDPVVYAERSDYQEIVLTENLARTDLRLFLNGDLQFSSLDEYRYHESLVHPVMNGPRRTVLVLGGGDGLALREILEYADVARVVLVDLDPAVVDLARTHPRITALNRDAFADERVTVVHDDAFTWLRTTTEQFDAIVVDLPDPDDVNTAKLYSVEFYGLVRQAMAEEARVVVQAGSPYFASRAYWSVGQSMEEAGLHTTPYHVDVPSFGDWGFFLAATDRAPALTLPDDLPDTDFLDAAVLHAAQVFPKDRRPGAQGESQPSTLLNPRIIDYHRTAWEGY

SEQ ID NO: 14672 - protein, 546 aa, Physcomitrella patens subsp. patens
MTVVSICLFVSLLCACIVVGHLLEENQWTNQCETALLLGLGTGIIVLIASKGYSSHVLKFNEELFFIYLLPPIIFNAGFSVKKKEFFRNFIAIMLFGIVGVFISFAIISVGTWLLFPKLGLKNLPVRDILAIGVIFSATDSVCTLQVLDQDSTPMLYSLVFGEGVVNDATSVVLFRAFQTYNFDHFTPLDGLKIGGNFLYLFFTSTVLGIVSGLVSAYIIRKIYFGRESTDREIAIMILMAYLSYTFAELFELTGILSVFFCGIMMSHYTWHNVTEHSRTTTKHTFATMSFIAEVFIFLYVGMDAVDIDKWRRTQSSFRESAGLLGGLMFIIMLGRAAFVFPLSACSNFMTNSPRAKINLRQMSIIWWAGLMRGAVSIALAFNQFTMEGDAQRIYQNATVITSTITVVLTSTIVFGTLTSPLIAWLYPPQHRPTHPSKTVISPTASLNSHFHIPLLHDEEQQDTEDGPQDGTTVGRFFAGIPRPHNATALITAPRSTIHDAWRKFDDAFMRPKFGGKCYERIHSHKNSKNPSQDLDDDEDEEYDQS

SEQ ID NO: 14673 - protein, 467 aa, Alkaliphilus metalliredigens QYMF
MKNIIKLMKMKKPTIVLVFLIALLTTSAVYAQPASDYEMELIRHYIRGSYVEPIDLDEITGQTPEEMFSGLDDYSTYFPKEDLEMFLEDVRGEFAGIGVYITEQMGKVIIAEPIENSPAQRAGIQPGDEILSVDGEDVKGRPLDVVAAMVKGPEGTQVKIEVKRQGQEDTIIFSMDRAFITVNPVAHQVIEDIGYIEIKSFNEHMTENIEKVLMGFKEQNVDKLIIDLRNNPGGSLDEAVKLSRLLLPKGPIVHIQYRDHQTTVVSYLEEPPFENMVVLINEASASASEIFAVAAKESGIATLIGKTTFGKGSVQRVYTLPTGTGFKLTEARYLSPEENEIDNVGVAPHIEVERFVPDVLTVDFLPLKMTRKPQIGDEGSDVEGAQQRLKAMGYTIKDPQGVMGESTYQAIYQFQEDAGLYPYGILDFSTQGALDRLFNQWIQGPDQDEQLKHAVRHFSGYSMFVVK

SEQ ID NO: 14674 - protein, 841 aa, Thalassiosira pseudonana CCMP1335
IPASINRYLQGYQRVGSQFMYSSVIRGVGCVLGDDMGLGKTVQVISLVAALLEKTGTGEDIERMIREMLMGGVQKKDVVDPLDGITVPNFAPILIVVPSSVIDVRGYFNVGVYRGGNREKAIDDVREGNNFILITGKSLFTRESDYSYFAGIKWKLVIIDEFHEYKNHKSNAFKCLEGVRDSEPFPPLIGLTGTLMQNNHDELFTLIDLVRPGILEDRKSFMDGTSKPIMRARAKGASGETLSLGKQREAELKKALENVYLERRKDVVLKDTLTEKDEKVIFCELSEVQKKLYRRIISLPDYYMLSTANAPCDCGVNQAYFRGYSKLKTQQEKINYQVTELCNEFVCCYKLYKVCSHASLLQVDKSLSDSEIHKKLEFAKAAFTPEILREMPGQSYYKSDGIMNDHLNLSGKMKTLDYCLRKYQKKRHRVLVFSYSTATLDLIQQHVKTQGWTHLRLDGQTATSTRQALVDQFQRDQAIFVFLISTRAGGLGLNLTAANKVIIFDVNWNPSYDEQAQDRSFRIGQEKNVEVLRLVARGTIEEQMYARQVYKTQLKKQTLGFNDDGKNQPQSFRGVDRDKHRKGELFGLENLLKFKDGSFMELLIVRFNEDDLENAVEEDGFEEDETRQATKFEQEESDDDDDAEMKKNGYKHEDFFNENQAKAEVDEESEEELGGESQMIQVMTSIACQGMNEDESSYTDEGSVLTSPPDKKPPSKPIAEDDVIDLAGPSPVKTANKDEADMVDKTNATPDVAKSNGKTESPNSPYSPLKTQQPATQSQQPETVASSQAAAASSTSTASKAKTPPPVSLMGVVLGKSKKKKAEPANKNKAGGLYIPAYARG

SEQ ID NO: 14675 - protein, 548 aa, Salmonella typhimurium LT2
MEIFFTILIMTLVVSLSGVFTRVLPFQLPLPLMQIAVGALLAWPTFGLHVEFDPELFLVLFIPPLLFADGWKTPTREFLEHGREIFGLALALVLVTVVGIGFLIYWLVPGIPLIPAFALAAVLSPTDAVALSGIVGEGRIPKKIMGILQGEALMNDASGLVSLKFAVAVAMGTMVFTVGGATLEFFKVAIGGILAGFVVSWLYGRSLRFLSRWGGDEPATQIVLLFLLPFASYLIAEHIGVSGILAAVAAGMTITRSGVMRRAPLAMRLRANSTWAMLEFVFNGMVFLLLGLQLPGILESSLAAAEADPNVETWMLFTDIVLIYAALMLVRFGWLWTMKKFSLRFLKKKPMEFASWTSREILIASFAGVRGAITLAGVLSIPLLLPDGSGFPARYELVFLAAGVILFSLFVGVIMLPLLLQHLEVADHAQQLKEERIARAATAEVAIVAIQKMEERLAADTEENIDNQLLTEVSSRVIGNLRRRADGRNDVESSIQEENLERRFRLAALRSERAELYHLRATREISNETLQKLLHDLDLMEALLIENQ

SEQ ID NO: 14676 - protein, 1061 aa, Microcoleus chthonoplastes PCC 7420
MKILHGTWIPQPSDAFIQTGAFYLWVETDTPSPQKTAHRNTHPAQLTQADLANLLVNELGVSPTSSSQIQDQITPQYFILPTTHGQPLPSPELSRYLEIELPESVEWHIWMIDCYQISPVYQTSGRKSGTIAPVIKCLNDLHFLALYNPSELQLGSDLLFWYHYTQSFKQIILKDQYIPALKYRELPPPKSKRKRSAKTQLFELYPAWQIISDHYEETIDYYQDYMPLACVSGYASPPKPIEFYAKETLLRHFSECLLTEIVTNTPIPAVLDKRINHSLITDCLYSSQTPLAQAPEPALELYKQWSSWKQQIRGGSDTSTFHLCFQLEDPAAESSDSWQIQFIVASKKDPSLKLAVAEYWTLTKKKKATVHQQFGQDFEKTLLLNLGYAARIYPQIWRGLETDQPTGLNLTLAEAFTFLKEQAWVLEDAGYKVIIPAWWTPAGRQRAKLRLKASPKTSQSAKAASKGYFNLDTIIQYHYQLSIGGQVITPKEWQQLVAAKTPLVQFRGQWIELDKNKMQQMLDFWQSHQEETAEMTLLELLKKTSEADTEIEVEHDAILGQMMACLNNPSRLEPIDNPAQLKGTLREYQKRGVSWLQYLEQLGLNGCLADDMGLGKSIQIIAQLVKERETESAVSPTLLIAPTSVVGNWQKEIEKFAPHLRTLVHHGSNRIKTEKEFKSASQSLDVIITSFTLARKDEKLFKRVTWHRLVLDEAQNIKNPKAAQTKAILKLPAHHRVALTGTPIENRLLDLWSIFNFLNPGYLGKQAQFRKAFELPIQKDNNRRQSTVLKQLVQPLILRRVKTDKQIIKDLPDKLEHKQYCQLTQEQASLYEAVVKDVEAKLEDAEGINRKGLILSTLLKLKQVCNHPAQFLQDNSEFSPTRSHKLERLLEMIEEVNAEGESLLIFTQFTDIGSALTNYLKQTLHYNTYYIHGGISRAKREQMITAFQDPDTEPSAFILSLKAGGVGITLTKANHVFHFDRWWNPAVEDQATDRAFRIGQKKNVFVHKFVALGTLEERIDQMIEEKKKLSGAIVGADESWLTELDNERFKQLIALNKTAIL

SEQ ID NO: 14677 - protein, 486 aa, Cryptococcus neoformans var. neoformans JEC21
MGRQRRKNRTHLKGPPKGETEENVPKSFVIKSGHVTKSISQLVRDTRKVMEPNTASRLRERPNARLRDYLTIAPSLKVTHLLAFTLTDAANVHLRVARFPQGPTMTFRVQKYSLMKDLFNSGLRNVGRSPAGEYRNPPLLVLNGFQQPQNGPALPQLRLMSTMFQGIFPPIQVEKSALPTFRRVLLISYSHVTGCISFRHFTITVRPHGVSRRVRKLLSSTVTSANPTSSKSRKTVDLSNTDDIADYLLRRTGSETSGASTAGYDSASETEASEAESDTNAVELPEDYVGRGNKKGERKAVRLVETGPRMEWRLIKVVEGLVGSKKGEGETVFHEFVHKSAKDANAQAQAHERKRKAKEARRAEQAANVARKKAERAKKKGKAVGDGEEDEDNDSEEEPDIEGLSDIDPEEELERLRERKVGFQDEDDDEDFEYEDRGANADDEDDDDWGEDVGAGEGDVTSDDEESSEDEEAKPPPKKRASGKRK

SEQ ID NO: 14678 - protein, 810 aa, Oryza sativa Indica Group
MSEVRSVPGMKVEASPAAAAAATVDSPTSVLEDDEKISECKNGDVLDTTEAIKQEEDHLDVLIEEKVDGFVDASSSLNVEPAANNSDLSPLTVPVKEEGQLLEPVKEEKANDFVDAVPSLPIDLEAKNGDASLITDAMKEEEEKLHEARVKAEEEEVARKREEAARLAFDPNARFNKLDELLSQTQLYSEFLLEKMETIADVEGVQTHAEEEPVEKKNGRGRKRKATSAPKYNDKKAKKAVAVMLTRSHEDCSPEDCTLTEEERWEKEQARLVPLMTGGKLKSYQIKGVKWLISLWQNGLNGILADQMGLGKTIQTIGFLAHLKGKGLDGPYLIIAPLSTLSNWVNEISRFVPSMTGLIYHGDKAARAEIRRKFMPKTTGPDFPLILTSYEMAMSDAKHLAHYKWKYVIVDEGHRLKNSKCLLLRELKRLPMDNKLLLTGTPLQNNLAELWSLLNFILPDIFSSHQEFESWFDFSAKGGEEEQEDSEEKRKVDVVSKLHAILRPFLLRRMKEDVEHMLPRKKEIIIYANMTDHQKQIQNHLVEQTFDQYLHEKSEIGLYPPVEKLLEQCGKFQLLNRLLSLLLARKHKVLIFSQWTKVLDIIEYYLETKGLQVCRIDGSVKLEERRRQIAEFNDLNSSMNIFILSTRAGGLGINLTSADTCILYDSDWNPQMDLQAMDRCHRIGQTRPVHVYRLATSHSVEGRIIKKAFGKLRLEHVVIGKGQFEQDRAKPNALDEAELLALLRDEQGDEDRMIQTDISDEDLLKVMDRSDLTGPPANADAAPLVPLKGPGWEVVVPTKSGGGMLTSLTS

SEQ ID NO: 14679 - protein, 99 aa, Ustilago maydis 521
MSDDEHFSSGAGAADDELSLPKATVQKLISEMLPKDVSCSKDTRDLLIECCVEFIHLLSSESNEVCEKDSKKTIAPEHVLKALDDLGFPAFIQEAKSQG

SEQ ID NO: 14680 - protein, 155 aa, Vitis vinifera
MEPMDIVGKSKEDASLPKATMTKIIKEMLPPDVRVARDAQDLLIECCVEFINLISSESNDVCSREEKRTIAPEHVLKALEVLGFGEYIEEVYAAYEQHKLETMDTIKGGKWSNGAEMTEEEALAEQQRMFAEARARMNGGASIQKQSELDPSLES

SEQ ID NO: 14681 - protein, 778 aa, Saccharomyces cerevisiae
MSRCSNAALMTVVEDAVGARVAARTRNMSNGVNYREKEVNDLTADISDSDSDLDSEDNKHGKGDNDTAPIWLQDDVHSDEDIQLDSEDDSDTEAVQAQVVDKLAKDTKSEQKSLDDELSEMDTKTVSLKLKKLNEFVRQSQVYSSIIADTLLHRSNEVANANTKDNSNSDDEEHSSKKRKTKKKSITDFFKKQKKNEDTTTQNGAPDDAAIKQPRLLKNCILKPYQLEGLNWLITLYENGLNGILADEMGLGKTVQSIALLAFIYEMDTKGPFLVTAPLSTLDNWMNEFAKFAPDLPVLKYYGTNGYKERSAKLKNFFKQHGGTGIVITSYEIILRDTDLIMSQNWKFLIVDEGHRLKNINCRLIKELKKINTSNRLLLTGTPLQNNLAELWSLLNFIMPDIFADFEIFNKWFDFDSLNLGSGSNSEALNKLINDELQKNLISNLHTILKPFLLRRLKKVVLANILPPKREYIINCPMTSAQEKFYKAGLNGKLKKTMFKELIKDFFTLNDEYIGHVSNRSIRDFINYKLSGNETSNTDNKINPTLLQMDKLYKKNLQMEISNKKLQNMMMQLRQIIDSTFLFYFPYLHPEDLTLETLLKTSGKLQILQKLIPPLISEGHKVLIYSQFVNMLDLIEDWCDLNSFATFRIDGSVNNETRKDQLEKFNSSKDKHNIFLLSTRAAGLGINLVGADTVVLFDSDWNPQVDLQAMDRCHRIGQESPVIVYRLCCDNTIEHVILTRAANKRNLERMVIQMGKFNNLKKLALNEGFFFEGKQSGC

SEQ ID NO: 14682 - protein, 482 aa, Pseudoalteromonas tunicata D2
MKWELLLAFLGYLGFMIWFGWWVSRNTKGGDDFLLGGRNLPFFLTLGTTVATMVGTGSSMGAVGFAYLNGWAGMIYGLGGACGILLLAKVFAPVREHQFMTMSEEVSYYVGAHPIVKNTIAVFIFIASIGWLGAHILGGGMYLAWLTGLSPFSAKLIIALGFSIYVVIGGYVAVVWTDSIQAVVLFVGFFLMAGVALYEVGGVAEMASAQPVLNQSFLSLDKVGVLPGLSLFFAVLVGVLVAPSFRQRIYSGKHVKSIRQSFYTSGGLYLLFAIVPAIIGMAAFKLNPDLENSAFSFPYMAMELLPFGLAALVIIAGLSATISSASSDAIAAVSVLIRDLYCLVFNRMPHANEVVMLSRFGLVLTIGIALLLALLTNDVIGYITNMIATLMSGLCVSVLFGHFWSRFNWQGVMTALFVSLLVSFAIILTPDWLAYWSNPIIPATTISAILAAVVTLLTPVQTRTSMEALAILKAQREEMQHD

SEQ ID NO: 14683 - protein, 129 aa, Zea mays
SRWRRRGWTATRCWRRRCSWSRCRLLQAAATVTLTITIKNTNNFKFHITALTRSQYFGIVTKNIDVANTVSRSIRAGAIWINCYFAFDPDAPFGGYKMSGFGKDMGMDALDKYLQTKTVVTPLYNTPWL

SEQ ID NO: 14684 - protein, 429 aa, Pyrobaculum aerophilum str. IM2
MPDGLAVWRVLRGAGVKLVKFVVVDIFGRPRAEVLPIEAAREAFLDGVAYDGSSIPAYTTVNKSDLVAVPDLNAVYVESWNGGKTAIVFTNTVDGGKPHPMDPRNVLRQAADYAKSRGYAPVVGAEVEFFLVRGVPPAPADSGVYFDGYLHGDSYAAVEEILGHLEASGIGLSKTHHEVAPGQYEVNIPAGDPVQVADQILVFKIMAKAVAKRRGLTATFMPKPFWGVNGSGMHVHVSFWKDGVNLFASRGEPTQELKWAVAGVLENALRNSAFVAPTVNSYKRLVPHHEAPTRVVWGLGNRSVMVRIPYYGGRINRLEYRHPDPSANPYLAFAVIILSALAGIEKKREPPPPVAEVAYELEEARETPPNLGEALKMARDGTPLPGQFLEAYLRLKEREWEEYITAEGSWETTWNKITKWEYEKYLEEA

SEQ ID NO: 14685 - protein, 602 aa, Listeria monocytogenes str. 4b H7858
MDLNPELFLLLFMAPILFNDGASTDKKSLWKNRKAILSLSIGLVFVTVGVLGAFIHYLIPAIPFAAAFALAAALAPTDAVAVGALAEKVRVPHKIMHILEGESLINDASGLVSFQFAVLALVTGTFSFMSAGTSFLLLSLGGIALGAALSLLKIMLMRGLRQLGIENMTSFMLMEILLPFLIFMVAEKVGVNGILAVVSGGMVHSFSYKGLNPEIAQLNLLSKNTWSVIIFSLNGLVFILLGTQLPQILMTIWQDANIQKGMLFVYILGITFLLLGLRFLWILFFRNYEENPKVDLVSRLKNTFLYTVAGVRGTITLVSALSLPFVLGNGNAFPERDLLIFIAAGVIITTLLLANFTLPLFADKKDKIAADHTTDIVLLRDIVQQLQAYKTDENTVEMNKVLNMYNNRIFSLMEHKEVNATEKELRRLTQEWQLENTRRLVFERKIDTGVGLSHMMRLGKRLYVQTRAEKYRARMRYRQLLSHRFRDFRFVPLTFEERRKEIAKLQNENNLFVIQKLQELDSNEYNPEIISLYLMNFERALGRGKNKKESNDEALQTTIDLASQIERETIQHYFEKGTITRKEMKVYRDNLLAIEANMQLEF

SEQ ID NO: 14686 - protein, 279 aa, Pyrococcus abyssi GE5
MEFIEWYPRGYGVAFKVKEKIFEGHSKFQKIEVYETEGFGRLLALDGTVQLVTEGEESYHESLVHPVMLAHPNPRRVLVIGGGDGGTIREVLRHEEVEEAIMVEIDEEVIEVAIKFIGIDGGLLDKMMKGECKRAKLIIGDGVEFIKENSGFDVVIVDSTDPVGPAKMLFSREFYERAYEALNDPGIYVTQAGSVYLFTDELVTAYENMSRVFDKVYAYSFPVIGYASPWAFLVGIKGDLDFRKIDLERAKKLNLKYYDPENHETIFQMPRYVREMLKP

SEQ ID NO: 14687 - protein, 138 aa, Gibberella zeae PH-1
MSDHEFGGNEDLSLPKATVQKIVSEILPPQAGVAFAKEARDLLIECCVEFITLISSEANEISEKEAKKTIACDHITKALEQLGFTDMVPAVLEAAAEHKEVQKGREKKADKFANSGMSMEELARLQEEQFAAARERHG

SEQ ID NO: 14688 - protein, 309 aa, Pinus banksiana
DGATDRTYCFSEVELISRKVAAGLAKLGLQQGQVVMLLLPNCIEFAFVFMGASVRGAIVTTANPFYKPGEIAKQAKAAGARIIITLAAYVEKLADLQSHDVLVITIDEAPKEGCHHISVLTEADETQCPAVKIHPDDVVALPYSSGTTGLPKGVMLTHKGLVSSVAQQVDGENPNLYFHSDDVILCVLPLFHIYSLNSVLLCALRAGAATLIMQKFNLTTCLELIQKYKVTVAPIVPPIVLDITKSPIVSQYDVSSVRIIMSGAAPLGKELEDALRERFPKAIFGQGYGMTEAGPVLAMNLAFAKNPFP

SEQ ID NO: 14689 - protein, 181 aa, marine gamma proteobacterium HTCC2080
MNTFIRLTILFVAAFSLAANACPDYLNNEMRKLSSKETVNFCDAYAGKAMLIVNTASNCGYTPQFDGLEALHREYGDKGLVVIGFSSDDFFQEENDEGDVAAVCYEKYDVSFPMMATSEVRGKGANPVFRGLGEAQGYPTWNFNKYVVDTQGNVVEHFGSNVGPDSQKLRGSLDAALASAE

SEQ ID NO: 14690 - protein, 876 aa, Bacillus sp. SG-1
MKINRVRYLKGPNYFSYKPTMWIELDLEEYEYLPSNEISGFPHTLETLIPSLKTHTCSRGYEGAFIERLHEGTWMGHILEHISLELQHLAGIKVKHGKTLTSSKKGIYFVTFEYKEKKSGFYSFQAAMEIVQRILDGETSFSIEPYIEKTASLYYEHKLGPSTEAIYSAAIEAKIPVERVGTNSMLRLGTGSKQRFVQATITSQTSHLAVENACDKDAAKQILQQAGLPVPKGEPASSTEEIFAAAERIGYPLVLKPLHGRQGKGVITNIKTREELFNAVHCLERLEDEYIVERFFEGSDYRLLIINNKLSAASLRTAPFLIGNGKDTIEKLIEVENQNPLRGVGHEKPLTKIPFNHTVKCFLESQNLSFQSILEKGQVIQVVGSANLSTGGQAIDVTDEVHPSIKTIAESAATAIGLDVAGIDLICPDITKPFDPLTTAILEVNAAPGIRMHLYPAKGKRREAGKEIVNYLFTKRSEAAIPIISVTGTNGKTTTTRLVKHLLEGSGMTVGMTNSDGVYIGAKQVDSGDCSGPISARKVLRNPQTDIAVLETARGGILREGLAFRYCDVGIVTNVSEDHLGLDGIETYEQLVKLKRLIPEVVHEKGFCILNADDESTVNMATHTKGTVIYTSLNESNPYIEKAVAERGTAWYVNEDGCIIFHNRGTSHTFLPIREVPITINGTAKHNVSNLLQALAAAHSQGISLEELKERALTFNPDAKHSRGRFNRTRVQGKEIIIDYAHNQAGLKAIYDAVEHIERNRTITVISAAGDRQDSAIRQMARIASANSDHLIIKEDKDLRGRMTGEVPMLMMEEAETYYRTSDYSTIIIDEEQAYQYAWDHSNEGDLLLFLYESFSIAENFIKRIQSTELYSDASE

SEQ ID NO: 14691 - protein, 418 aa, Synechococcus sp. WH 5701
MTDLARYAADHGLRHFLFSFSDLFGVQRAKLVPASAVNQLARDGAGFAGFAAWLAMTPADPDVLGLPDPASLAVLPWQRSVAWVATDLQVEGRPLEQSPRWVLRRQLERATQLGYSFRTGVEAEFFLLQPGGTAIADVHDTQSKPCYDQLALMRQFELIGGLLEAMEELGWGPYQADHEDANGQFEINWTFADALVTADRHALFRVMAQSMAEPLGARVSFGPKPFPQLTGSGAHLHHSLWDDSGRNLFHDPRGELGLSRLAYHFLGGLLEHAPALCAITNPTAESYARLGGQTTNSGATWSPGWISYGGNNRSHMVRIPDDQRLELRLADSAANPYLLPAAVLAAGLDGLERQLDPGPRNDANLYTDPPAPGTATPLPATLKEALAAFAADTVLREALGESFCQAYESLRARHSASL

SEQ ID NO: 14692 - protein, 2054 aa, Coccidioides immitis RS
MGFVMEKNPLENKDPFDWSIDEVVAYLCRASFDSWSHSKVPPPRPAPEILEKALRENDVTGYVLLTEINKQTLSEEFGLKSLGQRATIVRAVKYLQGTSPKYNEYVGQLSSADIIPDPHASSGNPTQLCPSKYDQQTPSVARPTTHPQRHSLPAAPSTLTSLQPSTSVFVEASTNNAENALFQPVSYEVADHIPISKESHPPSRSKVRSLSTLNDSEANTRHDEHYIIDKNGRKRRKLNLSALTTQQSEPQQLQRRYLDHRKMSISGVFYPDNTINEDESGEDTFCIMAPDSLPTGHRLFVNQKMQYYLRQRPQYLKTKTGKPAIAVFPYRGSSAVQGDSQFFSLFVKNGKKVNVTRENMFDWPEFDLGSDRLHYLLAKYPPRGEQDALPAYGDSASEGDYDSETWNEIQEEIEQKKDSSKRSTDLSPAAVDAIIDVCIADYISKWHLKKRPIEERKARRLWRRARAKRTRLAGIKAASSEIAHLDHRLKEIRKAIKMSPWSQAKDVQLQCQAMEQTVFQREFQKWTITVLETEKCPPKIASNSKASRPRPPRHIQLPDDEESLGSDTEDSGNDTDDFVVPDDEPPGHGQRPADALLSSSPCPTIEPSDDQDTVSPRKQVRFRGDGRGHAGNTVAGRVEGSSSLPSSRNLVGVEIVDLTRSDNENGSNIKTSRERIAIHVRTPPMSSHRRDASSSRLLDDSEGSTSASISSTASTLVADLDLDHIMSLTTEQLQLHRTHLMAWYAHYMGEEDRIGLTRIFNTKSFRYLKSIVYKGLQNLLEHRTTIPGTSAKDSKLYLRMTVMYISWIVRRKIIAEKGIKKQDIEHSMRKKKTRHFLSLVADILRTYPFKKSKGQEEKDSSTEASAEMKTNLDDEPDGSPRDEDGLPNSTHTPHRKRKRAVKQSQEALDTQKSAQRRVKLQEQQQQRLLQRLGSSGVANSDPERQAVSFDEPVIYLDPHIGRLVKPHQLHGMQFMWRELIKDDKRQGCLLAHTMGLGKTMQVISFLVTIAKAANSPDPEIRKQIPDCFRESRTLILCPPSLIENWSEEFMRWLPQDPATKRSLGPVRKVLSNIQSRERLQEIAAWYTEGGILLISYDIFRSLVHNASTKRRPRPLEPNQHESVKKQLLNGPNIIIADEAHKMKNRTTGIAAAACGFKSKSRIALTGSPLANHLEEYYAMINWIAPGYLGDFVQFKAKYIEPIEAGLYVDSTRAERRESLKKLQVLKKDLDPKINRADISVLAGDLPPKVEFVITVPLTALQEEAYKLYVETLMDTGDDVASTRVWAWLAILSLLCNHPSCFMEKLLGKNIDKRAKALIQDSEYESFPEDTPATQDSSPEDTPVTQVLAPETISKLKRVFDGINDLKSTAHSHRAAMLDQIIKQSVNAGDKVLIFSHSIPTLNYIEDVLKVNRWRYCRLDGTTPITSRQSATKSFNKIDSPMQVYLISTKAGGLGLNIPGANRVVIFDFAFNPTWEEQAVGRAYRFGQRKPVFVYRFIAGGTYEDIMYNKTVFKTQLSFRVVDKKNPIRYATRSKKAYLFPPKEVKQQSLTEFIGKDPKVLDKILEQPNFVRKITLTETFQREDNDNLTPEEEQAVQAEVDDERLKRNDPAAWARKQSERLRQAEATLPMEQPYMFNNNAPSSQLPPRMTIQRPIMLSMGFSGPAPRPPSGYVNPNILFTAPSSSAPQYGPPNPGSGPPPLQPDTSLFATPSSQPPNSRLATFTSLSTNFPIPVRHSAPPRSPTNTTPVPPDANLSNPVHQNPLISPTSAPSTAPPTPSVANIPGSNLPNPLIHPAGASKVATLPLSTASIANSSHSNAPQLMRPPVNEPNAQTRTSTLASTNEASTESRPPANFAAATSNVPVTPNQPPSKAATFAKTSTPLRPANRPAVTPTTQSASNTSTSSMPGIPSKPTNPSTDSPSMPALSCSQSPINVGISAKPIAHPAKPPNTPATTSTQSPSNVATPTRANAPLESSTDSPANLRNAPAATPSNDPDFAKSDVPSNPSSHSPKKSRPVGFDGADERERESGDDSDLVDNSPKTPTMEEESTRCATQ

SEQ ID NO: 14693 - protein, 431 aa, Ralstonia eutropha JMP134
MEPSVELTLRIGCLLAVIAACNVAAIKLRLPDALTLTAAGLALGTGLLITSTVAPTFTAQTIQPFLSPSLRPEGYLWIFLPPILFQAALEADAGAMARDLLPILVLAIGAVFAATLLVGVTAHAISGANLAVCLLVGAIVSTTDPSAVIDLFRSSGVPARMVRLVEGESLLNDAAAITLASHLMARIVGQPAHAMTGSVLGDLFGSLFAGGLLGALAGALLARACRAIPAAPLSRFTLSLALPNLLYPIADLWLHVSGVVTVVSAGLTAGTLLRRSSTPEEHAIFRHLWRSMGGMAGGMVFLLAAMHVPDLLRGLRGSDLWLILGVLVAALFSRWAVLGSSLPLLSRLGMCAPLPRAHRLAITWGGVRGPVTLVLALCAAQATSLPPEARHLASVVAVGFVLVNLTCNGLTLRPLVRRLGIGGDVNAGNHA

SEQ ID NO: 14694 - protein, 274 aa, Bacillus sp. SG-1
MSVGELLIIGGNEEKYNGVSILQTFADLAKKNQGKVGILPAASRVPEEISSIYEEIFQKLGIENPVTLSIPSREKAQSPELSECLDGMAALFITGGDQSLLSELIAGTSFHKSLLRRWKEGMILAGTSAGASIMGKEMIVSSQLKLHDETLKVYMGKGFGILEDLIIDQHFSQRGRFGRLIGAMAEMPGKIGLGIDENTAILYKDNEFEVIGEHQVFIIDGQEGKIFKTRNSEDDSELTGTNFKLHTLTSGFKFNLVTKSVIHSTVKRGNADEN

SEQ ID NO: 14695 - protein, 439 aa, Thermotoga sp. RQ2
MTIEEIKKIIEKENVRFIRLQFTDINGILKNVEITPEIFLDSWEEGIMFDGSSIEGFVRIEESDMYLKPVLDTFAVLPWTVDGAKSARVICDVYTPDGKPFEGDPRYRLKRMMEKAKELGYTPYAGPEMEFFILPTNEKGEPIPEFLDHGGYFDLLPLSKAEEIRRDVAIALEKMGVIVEATHHEVAPSQHEVDFRYDTFLKTADNAQTVKLVIKTMAIFHGYYATFMPKPFFGVNGSGMHVHMSLFKGDQNAFYDPNKPLELSDDLRYFVGGILKHAKALAAVTNPTVNSYKRLVPGYEAPVYITWSVGNRSALIRIPKARGKATRLEYRSPDPSCNIYLAFAAILAAGLDGIVNKIEPPEPVEENIYHMTPERREELNIDSLPGTLKEAIEELKKDDVIIDALGEHIFEKFVEAAEKDWKEYSTYVTNWELQRYLYL

SEQ ID NO: 14696 - protein, 488 aa, Mannheimia succiniciproducens MBEL55E
MRKLTALFGRDDRFDAIKLNRMTLDSRSVRTGCLFVAIKGHSVDGRQFIPQAISAGASAVLKECDNADEHLQVSEQNQIPVISYYHLSEHLSDIADQFYKAPSQHLTLVGVTGTNGKTTVSQLLAQWAQLLGRKPAVMGTIGNGLFGALKPAANTTGSAIEVQSSLADFVQQGADFAAIEVSSHGLVQHRIEALHFAAGIFTNLSRDHLDYHHSMENYASAKKRLFSELSCQQKIINADDEIGVQWLRELPDAVAVSCNPAYQPTQENWLKVTAVSFNSQGATITFNSSWGGAILTSRLIGAFNVSNLMLVLATLLSLGYSLDELLKTVSQLTGVCGRMEMLHAAHKPTVIVDYAHTPDALEKALQAARAHCTGRLWCVFGCGGDRDRGKRPLMAQVAERFADYVIVTDDNPRTEDRHQIVQDIVAGFKRPESVNIVYDREQAIRTAVQSAVENDVILIAGKGHEDYQIIGHTKHHFSDQEAVKKYLG

SEQ ID NO: 14697 - protein, 216 aa, Arabidopsis thaliana
MTEESPEEDHGSPGVAETNPGSPSSKTNNNNNNNKEQDRFLPIANVGRIMKKVLPGNGKISKDAKETVQECVSEFISFVTGEASDKCQREKRKTINGDDIIWAITTLGFEDYVAPLKVYLCKYRDTEGEKVNSPKQQQQRQQQQQIQQQNHHNYQFQEQDQNNNNMSCTSYISHHHPSPFLPVDHQPFPNIAFSPKSLQKQFPQQHDNNIDSIHWG

SEQ ID NO: 14698 - protein, 918 aa, Bacillus cereus G9241
MINQTEVTIRLQHVSHGWFLWGEDDSGTPLSVTSWKRNAFTWHSTSFYGTFLKEATFEGKQGVMLTNAQAFEYIANKPMNSFARIQMNGPITALTEDANELWDAFISGSFVPDMERWPKQPAWKVQHTPIEDDTLASLFSSAVNESILQDNRSSDGWEDAKRLYEHYDFTKRQLDAALHEEDWLRKIGYIEDDLPFTIGLRLQEPQEEFEMWKLETIVTPKRGAHRIYVYESIDSLPKRWHDYEERILETQEGFSKLVPWLKEGDTFRSELFETEAWNFLTEASNELLAAGITILLPSWWQNLKATKPKLRVQLKQNATQTQSFFGMNTLVNFDWRISTNGIDLSESEFFELVEQNKRLFNINGQWMRLDPAFIEEVRKLMNRADKYGLEMKDVLQQHLSNTAETEIVEEDSPFTDIEIELDGYYEDLFQKLLHIGDIPKVDVPSSLNATLRPYQQHGIEWLLYLRKLGFGALLADDMGLGKSIQTITYLLYIKENNLQTGPALIVAPTSVLGNWQKEFERFAPNLRVQLHYGSNRAKGESFKDFLQSADVVLTSYALAQLDEEELSTLCWDAVILDEAQNIKNPHTKQSKAVRNLQANHKIALTGTPMENRLAELWSIFDFINHGYLGSLGQFQRRFVSPIEKDRDEGKIQQVQRFISPFLLRRTKKDQTVALNLPDKQEQKAYCPLTGEQASLYEQLVQDTLQNVEGLSGIERRGFILLMLNKLKQICNHPALYLKETEPKDIIERSMKTSTLMELIENIKDQNESCLIFTQYIGMGNMLKNVLEEHFGQRVLFLNGSVPKKERDKMIEQFQNGTYDIFILSLKAGGTGLNLTAANHVIHYDRWWNPAVENQATDRAYRIGQKRFVHVHKLITTGTLEEKIDEMLERKQSLNNAVITSDSWMTELSTDELKELLGV

SEQ ID NO: 14699 - protein, 115 aa, Chlamydomonas reinhardtii
IFFYVLLPTIMFDAGYSLDTRSFIRNVGSVCMYAFIGTTISCFTIGLMMWAFGIWGWCFKMPLLANLTFGALISATDPVTVLAVFQRLNAQPDLYMNVFGESVLNDAVRDRTKRD

SEQ ID NO: 14700 - protein, 158 aa, Clostridium perfringens ATCC 13124
MEIYDISVKDINGENVSLERYRGKVLLIVNTASKCGFTKQFDGLEELYEKYKDEGFEVLGFPCNQFKEQDPGSNSEIMNFCKLNFGVTFPMFEKIDVNGENESLLYSYLKEQKSGMFGSKIKWNFTKFLVDREGNVIKRFSPQTTPKSIEKDIEELLD

SEQ ID NO: 14701 - protein, 383 aa, Leifsonia xyli subsp. xyli str. CTCB07
MKAVHFGAGNIGRGFVGLLLHEAGYEVVFADVNAELIEALAAADSYDVRLVGDETVTKTVTGFRALNSATAEDELVGEIATADVVTTAVGPRILRFVAPVIARGLGARASGAPRLVVMACENAIGATDLLAAELMDGLQDGDTRDELAARAVFANTAVDRIVPAQDPASGVDVTVEAFFEWVVDRSPFAGAEPPIPGAHFVDSLGPYIERKLFTVNTGHATTAYTGFLEGAATISEAIAKPSVLATVEAVLEETSAALTAKHGLDPEELAEYRAKILNRFRNPHLVDEVTRVGREPLRKLGRNDRFIGPASDYARYVGGAPSALLAAVGAALRFDLPGDSQSAELQQLLRKTEPGGIVTEVMGVEPGDALYEPLVAVVRTAQG

SEQ ID NO: 14702 - protein, 443 aa, Mesorhizobium loti MAFF303099
MMRKLSLLFAGALMGASAMSLVYGAPGSSANAAGSETYKQLAIFGDIFERVRAQYVTPPDDKSLVENAINGMLSSLDPHSSYMNAEQAQDMRVQTKGEFGGLGIEVTMENDLVKVITPIDDTPAAKAGVLAGDYIAKIDGEEVRGLTLNDAVDKMRGLVNTPIKLTILRQGADKPIELTVVRDIIKVKAVKFRVENDIGYMKITSFTEKTYDDLENAIDTIKKQVPDDKLKGYVLDLRLNPGGLLDQAVSVSDAFLKRGEIVSTRGRDPKDVTRFDAKPKQTDDINGKPMIVLVNGGSASASEIVAGALQDLRRVTVVGTQSFGKGSVQTIIPLGENGALRLTTALYYTPSGKSIQGKGITPDIKVDQPLPPELQGRDLTRGESDLKGHIKGADESKTGSGSAAYVPPDPKDDLQLIFAEQLLRGQKTDPAFPPNPEKAVLNQ

SEQ ID NO: 14703 - protein, 182 aa, Arabidopsis thaliana
  misc_feature (15)..(15): Xaa can be any naturally occurring amino acid
MASSMLSSAAVVTSXPAQATMVAPFTGLKSSAAFPVTRKTNKDITSIASNGGRVSCMKVWPPIGKKKFETLSYLPDLSDVELAKEVDYLLRNKWIPCVEFELEHGFVYREHGNTPGYYDGRYWTMWKLPLFGCTDSAQVLKEVEECKKEYPGAFIRIIGFDNTRQVQCISFIAYKPPSFTEA

SEQ ID NO: 14704 - protein, 583 aa, Xanthomonas campestris pv. campestris str. ATCC 33913
MRCGGSTPARKRGMFHHRCRVAVPHALPRRGRFFSGFCMHSIDVVLAMLLAVAASGYLIRILPFSLPLPLVQIALGAVVSGVFDAGHELEPELFFLLFLPPLLFLDGWRIPKQGLFRDKAAILELALGLVVFTVVGAGLLIHWLIPAMPLAVAFALAAIISPTDPVAVSSIASKVQIPKRLMHILEGESLLNDASGLVCFQFAVAAVLTGTFSVATASLTFLWVALAGLGLGVATTFGLSRIQAWIWRHFGEEPGSAILVNLLTPFAAYLLAEAFHASGILAAVAAGITMSYVEMAGNAPGNMRLQRSAVWDTVQFTFNGIIFVLLGEQLPGILDGAVRSVQEAGHLNPWWLAVYVATISASLMALRFVWVFLSLRWNLFKAQRRGEAHVSPPWRIVVAVSLAGVRGAITLAGVLTLPLVLEDGSPFPARQLAIFLAASVILVSLLVASVALPRLLRGLELPEEEDEQLKEDLAVKAASQAALEAVEKLRQRLVEDSAHAERYNAAANQVSQRYQRKLGAVDMAETDPEEAGAFEQALRQFRHAALVAERNELFKLARRREISDDLSRRLVRNLDLIESRKRA

SEQ ID NO: 14705 - protein, 427 aa, Campylobacter lari RM2100
MIVKIENTFICDNSKECEKDCFFLKTSQNEKFTHQALEKQAKIISIAECKSLLNIDENIKIIGITGTNGKTTTAGAIYSILLDLGYKCALMGTRGSFINDKNITPKGLTTAPILQTLEILSLASEQKCEFLIMEVSSHALVQNRIEGLEFKAKIFTNLTQDHLDFHGSFENYKQAKESFFTDECMKFINKDASAIAFNVKNSFSYGIENPSYYHIKAYALKNGIEAVVNFGKNNFTIESSLVGLFNLYNLLAASACVNELVRPNLKELEKAISNFGGIEGRMQVVAKDVIVDFAHTPDGIEKVLDALKYKNLIVVFGAGGNRDKTKRPLMAKIAKYYAKKLIITSDNPRFEEPMDIINDILSGIKKDENVFVECDRKKAIKKALEFKNDDEFVVILGKGDETYQEIKGVKYPFNDKEVVLEILKEGK

SEQ ID NO: 14706 - protein, 165 aa, Oryza sativa
ALVEDNNAVAVSFSEEQEALVLKSWAILKKDSANIALRFLLKIFEVAPSASQMFSFLRNSDVPLEKNPKLKTHAMSVFVMTCEAAAQLRKAGKVTVRDTTLKRLGATHLKYGVGDAHFEVVKFALLDTIKEEVPADMWSPAMKSAWSEAYDHLVAAIKQEMKPAE

SEQ ID NO: 14707 - protein, 443 aa, Dehalococcoides ethenogenes 195
MTRAESVEYVLKTAKDHNVRFIRLWFTDILGTLKSYSIAYNELERALEDGMGLDGSSIEGYARIDESDMLALPDPDTFRIMPWSNGEYQVGRMFCDIKHPSGEQFEGDPRYVLKRNLKKAADMGFTFYVGPELEYFYFKNDRSTEFLDEGGYFDLTPRDLATDLRRETIVALQDMGIIVEYAHHEVAPSQHEIDIRYTDALTMADNVMTYRLLVKEVALRHGLHASFMPKPVGSVNGSGMHTHQSLFKGDKNAFFDAKDSYYLSTMAKQYIAGILKYAPEFTAVTNQWINSYKRLVPGFEAPVYLSWARRNRADLVRVPEYKPGHEKSTRIELRSADPGCNPYLAFSVMLASGLKGIEEKLTPPAPIEENVYEMNEAERAKRGIGTLPGSLLEALKLTEGSDLMREALGDHVHKAFISNKKIEWTEYSAAVTDWELKRYLPLL

SEQ ID NO: 14708 - protein, 165 aa, Oryza sativa
ALVEDNNAVAVSFSEEQEALVLKSWAILKKDSANIALRFWLKIFEVAPSASQMFSFLRNSDVPLEKNPKLKTHAMSVFVMTCEAAAQLRKAGKVTVRDTTLKRLGATHLKYGVGDAHFEVVKFALLDTIKEEVPADMWSPAMKSAWSEAYDHLVAAIKQEMKPAE

SEQ ID NO: 14709 - protein, 182 aa, Arabidopsis thaliana
  misc_feature (172)..(172): Xaa can be any naturally occurring amino acid
MASSMFSSTAVVTSPAQATMVAPFTGLKSSASFPVTRKANNDITSITSNGGRVSCMKVWPPIGKKKFETLSYLPDLSDVELAKEVDYLLRNKWIPCVEFELEHGFVYREHGNTPGYYDGRYWTMWKLPLFGCTDSAQVLKEVEECKKEYPGAFIRIIGFDNTRQVQCISFIXAYKPPSFTEA

SEQ ID NO: 14710 - protein, 449 aa, Streptococcus agalactiae
MTITAEDIRREVKEKNVTFLRLMFTDILGVMKNVEIPATDEQLDKVLSNKAMFDGSSIEAFVRINESDMYLYPDLDTWIVFPWGDENGAVAGLICDIYNAEGEPFCRRFHVKFQRNMKRMNRVGYNSFNFRTRPDFLLFKLMKCNQHLIDCYCPRRPTLTLAPTDLANNNRREIVSLNTNWALKLKLVIMKLAVGQHEIDFKYDDVLKACDNIQLFKLVVKTIARKHGLYATFMAKPKFGINGSGMHCNMSLFDNEGNNAFFDPEDPRGMQLSEDAYYFLGGLMKHAYNYTAIINPTVNSYKRLVPGYEAPVYIAWAGRNRSPLIRVPASRGMGTRLELRSVDPTANPYLALSVLLGSGLEGIENKIEAPEPIETNIYAMTVEERRQAGIVDLPSTLHNALKALEEDEVVKAALGTHIYTNFLDAKRIEWASYATYVSQWEIDNYLDLY

SEQ ID NO: 14711 - protein, 200 aa, Myrospermum sousanum; identical to SEQ ID NO: 7840

SEQ ID NO: 14712 - protein, 647 aa, Oryza sativa Japonica Group
MARGATWTRRLHLHGLFLAVLLLLTLPAGSTAAAGGGGGTIIANDQGNRITPSWVAFTGGGERLIGEAAKNQAAANPGRTVYDAKRLIGRRFADAEVQRDMRLLPFAVVDKGGKPHVRVEVRGGDVRLLSPEEVSAMVLARMKETAEAYLGEEVTRAVVTVPAYFNDAQRQATKDAATIAGLAVERILNEPTAAALAYGVGKEGAGGKNVLVFDLGGGTFDVSVLAIDGGVYEVLATNGDTHLGGEDFDQRVMEHFVELVRRKHGRDIAGDARALGKLRRECERAKRALSIQHQVRVEVESLFDGVDLSEPLSRARFEELNNDLFRKTMAPVRKAMADARLSNADIDEIVLVGGSTRIPKVRQLLRDYFGGKQPNQGVNPDEAVAYGAAIQANIVGGDTDNKTRDMVVLDVTPLTLGLETAGGVMATLIPRNTPVPTKRAQLFSTYKDKQTTVTVKVFEGERSMTRDNRLLGRFDLAGIAPAPRGAPQIEVAFEVDADGILSVSAADRATGRSERITISGDDRKTSREEIDRMLGEAEEFADEDRRHRERAGARNSLEAYVYGVKNAVVGGEMAGAMDGGEKEKVEAAVMEAYEWLDGNQDVGKEEYEEKLRELEDVCNPVMSAVYQRSGGSRRDGDGGGDDDHDEL

SEQ ID NO: 14713 - protein, 385 aa, Buchnera aphidicola str. APS (Acyrthosiphon pisum)
MKALQFGAGNIGRGFIGKTLSESGFSVIFSDVNQNIVDAINYNREYFVKIIGSNQNKTVNIKRVSAINSNDSNIKKIISSVDLITTAVGPTALEKIALIITQGIIFKIKNQFTKPLNIIACENKIKSSSFLKQVVLKNLPIKYHDYLNKYIGFIDCSIDTIIPAINNKDDLFLTVEEFKEWIVNINQFKGAVPKIVDMKFSNNLDAFIERKLFTLNTGHAIAAYLGLIKNYKTIQDAISDKKIRVIVRSAMEESGSVLIKRYNFNKNDHLDYIEKIFLRFENPFLSDKLERIGRNPLQKLRREDRLIKPFLGAFEYNLPYSNLAKGIAAAFYYHNKNDLESIELSSSIKKQGLESTIIKICDLPVNSKEVYSIILEYNLIKKIIR

SEQ ID NO: 14714 - protein, 546 aa, Triticum aestivum
MGLDLGALALKYTGLAVSDHDSIVAINIFIALLCGCIVFGHLLGGNRWVNESTAALVLGLITGGVILICTKGVNSRILIFSEDIFFIYLLPPIIFNAGFQVKKKQFFRNFATIILFGAAGTLISFVIITFGAMGLFSKLDVGPLELGDYLAIGAIFSATDSVCTLQVLNQDEAPLLYSLVFGEGVVNDATSVVLFNAIQNIDINHFDVFGLLQFIGKFLYLFFTSTVLGVAAGLLSAYIIKKLCFARHSTDREVAIMILMAYLSCMLSMLLDLSGILTVFFCGIVMSHYTWHNVTESSRVTTKHTFATLSFIAEIFLFLYVGMDALDIDKWKLASSSPKKPIALSAVILGLVMVGRAAFVFPLSFLSNLSKKESHPKISFNQQVIIWWAGLMRGAVSIALAYNKFTTSGHTAVRVNAVMITSTIIVVLFSTMVFGLLTKPLINLLIPPRPGTAADISSQSFLDPLTASLLGSDFDVGQLTPQTNLQYLLTMPTRSAHRVWRKFDDKFMRPMFGGRGFVPFVPGSPIERSVHGPGLLGTVTEAEDRS

SEQ ID NO: 14715 - protein, 165 aa, Leptospira interrogans serovar Lai str. 56601
MRFNMNETLYDLTATLNNGKEQKLENYKGKVLLIVNTASECAFTPQYAGLQNLYSKYKTEGLEILGFPCDQFKHQEPGSDETIKNFCQKNYGVEFPIFKKIEVNGDNAHPVFRFLRNKASGFFGNSIKWNFTKFLVDKQGNVIKRYSPITTPENIEKEIQNLLKR

SEQ ID NO: 14716 - protein, 314 aa, Glycine max
KRQKLVNCFNDPSKDEFVFLLSSKAGGCGLNLIGGNRLVLFDPDWNPANDKQAAARVWRDGQKKRVYIYRFLSAGTIEEKVYQRQMSKEGLQKVIQQEQTDSLVAQGNLLSTENLRDLFTFHENIKSEIHENMQCSRCQTFDGPRSTEAQSTITDSESDEETSDIGGFAEIAGCLQNLKRSEKQVGSPLEEDLGSWGHHFFPTSVPDAILQASAGDEVTFVFTNQVNGRLVPVESIMSPKLQQKDPKKELLKSKQNGKQKPTPFSLHNRLPLQSASVGITKNISMNVAFKPQYSLVSKVLPQKRSCPANINDDN

SEQ ID NO: 14717 - protein, 1156 aa, Glycine max; identical to SEQ ID NO: 7849

SEQ ID NO: 14718 - protein, 1569 aa, Physcomitrella patens subsp. patens
MILDGPGPCLCCTAADDPQDSDFDPTDGGSSRGGRHGAGAVEDSDEPSEEDSDESLELSDDSDDDYGKRRASRKRKTTRTSRINHNRTRVIPTRRLRVQGLFSSSDDESSAKDSEQDESDEDSSYGRPQRKAGTSNSRRRQETSGSPPRTRTSSRTLPRKSYAEVEDSEDSEDEREKKPEELEEEEDSGDAIERVLWHQPIGIAEAEAAGGSRAEPFVLDTDPHAELNWDDQEFYIKWKGQSYLHCQWMLLSELEPLSGYKKVLNYMKKVDEDREIRQSLSPEEAELHDVSKEMELDLLKQYLQVERVFADRNRMDNDEEIIEYLVKWKGLSYCDSTWEKDTDIAFAQAQIDEYKAREAATTFQGKLVDAQRRKGKVSMRKLEEQPEWLKGGTLRDYQLEGLNFLMNSWRNDTNVILADEMGLGKTVQSVSMLGFLQNAQQIPGPFLVVVPLSTITNWAKEFRKWLPDMNVVVYVGNRASREVSTCQQHEFYTGRKTGRTIKFNTLLTTYEVVLKDKAVLSRIKWCYLMVDEAHRLKNCEASLYTTLQEFSTKNKVLVTGTPLQNSVEELWALLHFLDSDKFKSKEQFTEHYKNLSSFDEKELANLHAELRPHLLRRVIKDVEKSLPPKIERILRVEMSPLQKQYYKWILERNFNDLNKGVRVNQVSLLNIVVELKKCCNHPFLFESADHGYGGDANMNDNNKVQRIVLSSGKLAILDKLLIRLKETNHRVLIFSQMVKMLDILADYMSLRGFQFQRLDGSTRSDLRHQAMEHFNAPGSEDFCFLLSTRAGGLGINLATADTVIIFDSDWNPQNDLQAMSRAHRIGQRDVVNIYRFVISRSVEEDILERAKKKMANRVLDHLVIQKLNAQGRLEKKEAKKGTGFDKNELAAILRFGAEELFKDDKNEEDQKNKLENMDIDEILARAEKVETKSAAEVDAEGNELLGAFKVANFSNTEDDATFWSRLIPHDSSRQAEDVSGPRVARTVRNYSEDFRSERDGKRRRGDVKEKAPKVGTKASKEYVPPSEIEGAAARAAEWRGGVLTKKEANLFIKAVKRFGDSSRMKLIAKEAGEPVSETSTSLQSELWDVLVNGCKDALRRAGADSKAAVLDFFGVPVKAQDVLGRIKELTLLGKRIKRFKDPVAQFRLKSHPRVPSWSKVCEWSQVDDARLLLGVYYHGLGNWEKIRLDEKLFLFDKLAPQGATAADTSLPRSTHLEARVNALLRKELEVSGEMNGNDESERPARSKGGHKRDWLDDSAKDRSAKPSSGLGRKNSGGSGPQKISARDRAAKRFRTDQDVKEEGEISGTDEGGRQSKEEKWQFWCAQMMEDQSRTLGSLQKLQTNFSLPKEEVLRRVKTYLQTLGRKIDSILAENEANPNPDRMATRLWNYVSTFSNLTGDKLAQIYKKLRQEPTHEHARGTSQDPNHGSAAGPSGRDEQSHLTSNRRQNHVGNTSAQVGEPSRGDYEPWKRRQREDPPGGPPIGPHNATDRRKWDGRPGSVDGWRNRGSPLVGVNGSGWGYDKDLREDRGPWGPHDRSRDWNRRDVNRNPRPQPRPTGPYGHAPPAFTH

SEQ ID NO: 14719 - protein, 650 aa, Listeria monocytogenes EGD-e
MEIFELILLMLSAVFLSNVLSRFLPSIAVPLIQVVLGIILAIPLGDHTMDLNPELFLLLFMAPILFNDGASTDKKSLWKNRKAILSLSIGLVFVTVGVLGAFIHYLIPAIPFAAAFALAAALAPTDAVAVGALAEKVRVPHKIMHILEGESLINDASGLVSFQFAVLALVTGTFSFMSAGTSFLLLSLGGIALGAILSLLKIMLMRGLRQLGIENMTSFMLMEILLPFLIFMVAEKVGVNGILAVVSGGMVHSFSYKGLNPEIAQLNLLSKNTWSVIIFSLNGLVFILLGTQLPQILMTIWQDANIQKGMLFVYIIGITFLLLGLRFLWILFFRNYEENPKVDLVSRLKNTFLYTVAGVRGTITLVSALSLPFVLGNGNAFPERDLLIFIAAGVIITTLLLANFTLPLFADKKDKVTADHTTDIVLLRDIVQQLQAYKTDENAVEMNKVLNMYNNRIFSLMEHKEVNATEKELRRLTQEWQLENTRRLVFERKIDTGVGLSHMMRLGKRLYVQTRAEKYRARMRYRQLLSHRFRDFRFVPLTFEERRKEIAKLQNENNLFVMQKLQDLDSNEYNPEIISLYLMNFERALGRGKNKKESNDEALQTTIDLASQIERETIQRYFEKGTITRKEMKVYRDNLLAIEANMQLEF

SEQ ID NO: 14720 - protein, 765 aa, Mannheimia succiniciproducens MBEL55E
MRFDQGNLMNIQQIVKEKGLGLLFRQGTVGIEKESQRVHADGSIVTSEHPKAFGNRSYHPYIQTDFAESQLELITPPNKKIEDTLRWLSALHEVTLRTIDENEYIFPMSMPAGLPPEQEIRVAQLDNAADVAYREHLVASYGKAKQMVSGIHYNFQLDPKLVETLFNAQTDYKSAVDFQNNLYLKMAKNFLRYQWIPLYLLSATPTVEANYFKDGSPLKPNQYVRSLRSSKYGYVNAPDIIVSFDSIEKYVETLEHWVNSGRLIAEKEFYSNVRLRGAKKAREFLHTGIQYLEFRLFDLNPFEAYGINLKDAKFIHHFILLMIWLEETADQDAVELGRARLGEVAFEDPHSETAYRDEGEQIINQLIDMLKAIGAEQSAVEFAEEKLAQFANPGQTLCARLVDAIEQAGGYQQLGGEIAKRNKVQAFERFYALSAFDNMELSTQALMFDAIQKGLNMEILDENDQFLRLQFGDHFEYVKNGNMTSHDSYISPLIMENKVVTKKVLAKAGFNVPQSLEFTSVEQAVASYPLFEGKAVVIKPKSTNFGLGISIFQQGVHDKADFAKAVEIAFREDKEVMVEDYLVGTEYRFFVLGNETLAVLLRVPANVMGDGVHTVAELVAAKNDHPLRGDGSRTPLKKIALGEIEQLQLKEQGLTVDSVPAKDQLVQLRANSNISTGGDSIDMTDEMHPSYKDLAVGITKAMGAAVCGVDLIIPDLKKPAEPNLSSWGVIEANFNPMMMMHIFPYSGKSRRLTLNVLGMLFPELV

SEQ ID NO: 14721 - protein, 1002 aa, Synechococcus sp. PCC 7002
MALVHGTWIFQAQQSYFFLWSEVWRSESAVSPPAYPFGGDRQSLEAQLQAHGVTMPENAQWLETTFSLPSTKGTKTKPSIPLLSNQTQIPNQLVWADWQIAGLALNARQATNIIQTLPLTDEALAGDLRFWWQVCRWSLDLVVRCKFLPHVTPLPTGEALATWVPLLDSVTEQQRFAQFLQQMPGICAVGQRPAQVLLSFLTAMVDAQVRPHAKPLQNFPKTSVVFPWCDRLSKAKATFEDLPRQLGHAYENWTFPVREYLVNPPDFALKQPLFRACFQLLPPTAAQDHWQLQYGLQALGNAASIVTADQVWQDPSQPQEILLKGLGLASRLYEPIGESLGGPQPCGCPLDAIQAYEFIRSVAWQLRDKGLGVILPEGLGAGSNEVRLGIKISAQVKDESRLNLQSLLQYNLAVAVGETTLTEREFQDLLARRSPLVEVNGQWLALQPTDVRAAQEIYQTKIGEQPLRVEDALRLGAESGQVFAKLPVIGFEASGALRELLDHLTNNESLKLIEPPDSLQGTLRPYQHKGMSWLSFLQKWGLGACLADDMGLGKTIQAIAFLLTLQENKKLTQPVLLVCPTSVVSNWEREISKFAPSLKTLIHHGDRRAKGKTFASTAQQYDVILTSYSLVFRDQKDLATVSWQGVILDEAQNIKNPQAKQSQAVRALDSGFRIALTGTPVENRLKELWSILDFLNPNFLGTQQFFQRRFAIPIEKYGDRQTLQSLRKLTQPFILRRLKTDKTIIQDLPEKQEMEVFCSLSKDQANLYQKLVDESLAEIENTDGIQRRGLILTLLLRLKQLCNHPVLLQSKPKLGKNFAPRSGKLLRLEEMLEELISEGDRALIFTQFSEWGKLLQPYLQERLGQDVLFLYGATRRETRQQMCDRFQNDPNGPPIFILSLKAGGTGLNLTRANHVFHVDRWWNPAVEDQATDRAFRIGQKQNVQVHKFVSTGTLEEKISAMIASKKELAEQTVDTGENWLTELDTNQLRDLLLLERDRLMEE

SEQ ID NO: 14722 - protein, 162 aa, Chlamydomonas reinhardtii
MANPEFYGLSTTTLSGQPFPFKDLEGKAVLIVNVASKCGFTPQYKGLEELYQQYKDRGLVILGFPCNQFGGQEPGDASAIGEFCQRNFGVTFPIMEKSDVNGNDANPVFKYLKSQKKQFMMEMIKWNFEKFLVDKSGQVVARFSSMATPASLAPEIEKVLNA

SEQ ID NO: 14723 - protein, 469 aa, Thauera sp. MZ1T
MNAQDVMKMIQENEVRFVDLRFTDIRGKEHHVGLPVSAFEEEHFEHGHPFDGSSLAGWKGIQASDMILMPEPSTAYIDPFFDETTLVITCDVIEPSDGKGYDRDPRSIAKRAEAYLKSTGIGDTAFFGPEPEFFIFDSVEWSVDMSGVYSKIISEEAAWSTADKFEGGNTGHRPRVKGGYFPVPPVDSLNDVRAAMVLALEACGVPVEVHHHEVANAGQCEIGTKFSTLTQRADWTQVLKYIVHNVAHQYGKTATFMPKPIVGDNGSGMHVHQSIWKDGKNLFAGNGYAGLSETALYYIGGIIKHARALNAITNPGTNSYKRLVPHYEAPTKLAYSARNRSASIRIPYVANPKGRRIESRFPDPLANPYMCFAALMMAGLDGIQNKIHPGDPADKNLYDLPPEEDALIPTVCTSLEQALEYLDKDREFLTRGGVFSNDFIDAYIALKMEEVDRMRITTHPVEFDMYYSL

SEQ ID NO: 14724 - protein, 3571 aa, Arabidopsis thaliana
MTSSSHNIELEAAKFLHKLIQDSKDEPAKLATKLYVILQHMKTSGKENTMPYQVISRAMDTVVNQHGLDIEALKSSCLPHPGGTQTEDSGSAHLAGSSQAVGVSNEGKATLVENEMTKYDAFTSGRQLGGSNSASQTFYQGSGTQSNRSFDRESPSNLDSTSGISQPHNRSETMNQRDVKSSGKRKRGESSLSWDQNMDNSQIFDSHKIDDQTGEVSKIEMPGNSGDIRNLHVGLSSDAFTTPQCGWQSSEATAIRPAIHKEPGNNVAGEGFLPSGSPFREQQLKQLRAQCLVFLALRNGLVPKKLHVEIALRNTFREEDGFRGELFDPKGRTHTSSDLGGIPDVSALLSRTDNPTGRLDEMDFSSKETERSRLGEKSFANTVFSDGQKLLASRIPSSQAQTQVAVSHSQLTFSPGLTKNTPSEMVGWTGVIKTNDLSTSAVQLDEFHSSDEEEGNLQPSPKYTMSQKWIMGRQNKRLLVDRSWSLKQQKADQAIGSRFNELKESVSLSDDISAKTKSVIELKKLQLLNLQRRLRSEFVYNFFKPIATDVEHLKSYKKHKHGRRIKQLEKYEQKMKEERQRRIRERQKEFFGGLEVHKEKLEDLFKVRRERLKGFNRYAKEFHKRKERLHREKIDKIQREKINLLKINDVEGYLRMVQDAKSDRVKQLLKETEKYLQKLGSKLKEAKLLTSRFENEADETRTSNATDDETLIENEDESDQAKHYLESNEKYYLMAHSIKENINEQPSSLVGGKLREYQMNGLRWLVSLYNNHLNGILADEMGLGKTVQVISLICYLMETKNDRGPFLVVVPSSVLPGWQSEINFWAPSIHKIVYCGTPDERRKLFKEQIVHQKFNVLLTTYEYLMNKHDRPKLSKIHWHYIIIDEGHRIKNASCKLNADLKHYVSSHRLLLTGTPLQNNLEELWALLNFLLPNIFNSSEDFSQWFNKPFQSNGESSALLSEEENLLIINRLHQVLRPFVLRRLKHKVENELPEKIERLIRCEASAYQKLLMKRVEDNLGSIGNAKSRAVHNSVMELRNICNHPYLSQLHSEEVNNIIPKHFLPPIVRLCGKLEMLDRMLPKLKATDHRVLFFSTMTRLLDVMEDYLTLKGYKYLRLDGQTSGGDRGALIDGFNKSGSPFFIFLLSIRAGGVGVNLQAADTVILFDTDWNPQVDLQAQARAHRIGQKKDVLVLRFETVNSVEEQVRASAEHKLGVANQSITAGFFDNNTSAEDRKEYLESLLRESKKEEDAPVLDDDALNDLIARRESEIDIFESIDKQRKENEMETWNTLVHGPGSDSFAHIPSIPSRLVTEDDLKLLYETMKLNDVPMVAKESTVGMKRKDGSMGGLDTHQYGRGKRAREVRSYEEKLTEEEFEKLCQTESPDSPQGKGEGSERSLANDTSNIPVENSSDTLLPTSPTQAITVQPMEPVRPQSHTLKEETQPIKRGRGRPKRTDKALTPVSLSAVSRTQATGNAISSAATGLDFVSSDKRLEAASHPTSSLALTSPDLSGPPGFQSLPASPAPTPIRGRGRGRSRGRGAGRGRRVEGVLHGSNSSITQRTETATSLASDAEATKFALPRSASEIVSRVPKANEGSTSNPDQVSPVHSATTALRSDKAADKDLDAPPGFDSGSHVQTLNVLENSSERKAFAVKKRPLIQGVSSQHPGPNKQPLDLPVSTSSTLLGGGPVQNQNAVSSVCDGSKSPSEGRTYTALQGVTTAPSDATLPMSSQPSDATLPMSSQPVGSTVEAQEANVPSLPAALPAKRRVRNLPSRGETPKRQGKRRGQPLPATDASSARSTGLTPQIEVKVGNLSGTKAKFDAVAKEQPHFSQSVAPDIHSSGSLSQEIRRDTSGTGGSARKQTADVTDVARVMKEIFSETSLLKHKVGEPSATTRTNVPDAQSPGEMNLHTVETHKAEDSSGLKNQEALYNLSKADKLVSDIPHPVPGDLTTSGSVANKDVDIGSSKVAAENELVKIPGGDVDSSVIQLSLGNTLTAKSSLEKCTADQLLGEKLSQEGETTPASDGETCHLAEETASSLSYVRSEPTASASTTAEPLPTDKLEKNISFQDEVKTLNGDKREAILLSSEEQTNVNSKIETNSEELQASRTDEVPHVDGKSVDVANQTVKEDEAKHSVEIQSSMLEPDELPNAGQKGHSSIDLQPLVLVTSNENAMSLDDKDYDPISKSADIEQDPEESVFVQGVGRPKVGTADTQMEDTNDAKLLVGCSVESEEKEKTLQSLIPGDDADTEQDPEESVSDQRPKVGSAYTQMEDTDEAKLLMGCSVESEEKEKTLQSHIPGDDADTEKNPEESVSVQGVDRPKVGTTDTQMEDTNDAKLLVGCSVASEEKEKTLQSHIPGDDADTEQNPEESVSVQGVNRPKVGNANTQMEDTDEAKVLVGCSVESEEKEKTLQSHIPGDDADTEQNPEESVSNFDRPKDGTADTHMEDIDDAKLLVGCSVESEEKEKSLQSHMPSDDAVLHAPFENTKDSKGDDLHGESLVSCPTMEVMEQKGFESETHARTDSGGIDRGNEVSENMSDGVKMNISSVQVPDASHDLNVSQDQTDIPLVGGIDPEHVQENVDVPASPHGAAPNIVIFQSEGHLSPSILPDDVAGQLESMSNDEKTNISSEQVPDVSHDLKVSQDQTDIPPVGGIVPENLQEIVDVPASPHGVVPDVVVSQSEEIQSPSILPDDVPGQPDDGNCEKMDTMQNNTSIDIGITSGKTCQPSSSTQPEDENRNSLSHCEPSEVVEQRDSRDQVCIGSVESQVEISSAILENRSADIQPPQSILVDQKDIEESKEPGIESADVSLHQLADIQAEPSNLVDQMDIEESKEPGTESADVSLHQLADIQPGPSILVDQMDTEKSKEPGTESADVSLHQLADIQPGPSILVDQMDTEKSKEPGTESADVSLHQLADIQPGPSILVDQMDTEEFKNPDVSLHQLADIEPSLSISAVQKNIEDKDQSHVETAGSELVDVSAECSTEPQVQLPPSSEPVGDMHVHLGASKSEIVAEGTDFSSSLPKTEEENAKSQLADTEPSSSLTAVQKNIEDQVETAGCEFVVVSTGCSTEPQVQLPPSAEPVVAEGTEFPSSLLMTGVDNSSHLMTGVDNAKTHLADVVPSSSPTTMEKNIEAQDQDQVTTGGCGLVDVLTECSSEPQLQLPPSAEPVISEGTELATLPLTEEENADSQLANIEPSSSPSVVEKNIEAQDQDQVKTAGCELVSTGCSSEPQVHLPPSAEPDGDIHVHLKETEKSESMVVVGEGTAFPSSLPVTEEGNAESQLADTEPFTSPTVVEKNIKDQEQVETTGCGLVDDSTGCSSEPQVQLPPSAEPMEGTHMHLEETKKSETVVTEIQLADIDPSFSLIVVQTNIEDQDQIETGGCDLINVPSGCSTEPQIQLSSSAEPEEGMHIHLEAAMNSETVVTEGSELPSSLPMTEDENADGQLAEVEPSVSLTVEQTNIEEKDHIETAECELVDVSPGCSSQPEVKFPPSPDAVGGMDVHLETVVTEDTDSNSSLPKTEEKDAENPSDRLDGESDGTTVATVEGTCVESNSLVAEESNIEVPKDNEDV

SEQ ID NO: 14725 - protein, 713 aa, Zea mays
MDACSPRRSRSGTREQAVRNKDRSRSFQKARRKREKGARARSVQVVLVSAMDRVRGSAFLLGVLLAGSLFAFSVAKEETKKLGTVIGIDLGTTYSCVGVYKNGHVEIIANDQGNRITPSWVAFTDSERLIGEAAKNQAAVNPERTIFDVKRLIGRKFQDKEVQRDMKLVPYKIINKDGKPYIQVKIKDGENKVFSPEEISAMILGKMKDTAEAYLGKKINDAVVTVPAYFNDAQRQATKDAGVIAGLNVARIINEPTAAAIAYGLDKKGGEKNILVFDLGGGTFDVSILTIDNGVFEVLATNGDTHLGGEDFDQRIMEYFIKLIKKKYSKDISKDNRALGKLRREAERAKRALSNQHQVRVEIESLFDGTDFSEPLTRARFEELNNDLFRKTMGPAKKAMEDAGLEKSQIHEIVLVGGSTRIPKVQQLLKDYFNGKEPNKGVNHDEVVAFGAAVQGSILSGEGGDETKDILLLDVAPLTLGIETVGGVMTKLIPRNTVIPTKKSQVFTTYQDQQTTVSIQVFEGERSMTKDCRLLGKFDLNGIPSAPRGTPQIEVTFEVDANGILNVKAEDKGTGKSEKITITNEKGRLSQEEIDRMVREAEEFAEEDKKVKERIDARNQLETYVYNMKNTVGDKDKLADKLEAEEKEKVEEALKEALEWLDDNQSAEKEDYEEKLKEVEAVCNPIVSAVYQRSGGAPGGDADGGVDDDHDEL

SEQ ID NO: 14726 - protein, 444 aa, Pseudomonas syringae pv. syringae B728a
MLPPETQRLIEQHGIKYVLAQFVDIHGSAKTKSVPVTGLEMVAEDGAGFAGFAICGMGMEPHGPDFMARGDLSSLTPVPWQPGYGRVVCIGHVDGKPWPYDSRYVLQQQVERLSQRGWSLNTGLEPEFSLFKRDVTGSLQMVDASDNLDKPCYDYKGLSRSREFLERLTEALQPVGFDIYQIDHEDANGQFEINYTYSEAMESADRFTFFRMAAGEIANDMGMICSFMPKPDPKRAGNGMHFHLSIASASNKNLFHDASDPSGMGLSTLAYHFAAGLLAHGPALCAFAAPTVNSYKRLVVGNSLSGATWAPAFIAFGANNRSAMVRVPYGRLEFRLPDAGCNPYLVSAAIIAAGLDGIDRQLEIDHVCNENLYKLSLEEIAARGIKTLPQSLNEACDALQADPLFGEVLGSEIVDEFIRLKRMEWVEYSRHVSDWEVKRYIEFF

SEQ ID NO: 14727 - protein, 641 aa, Moritella sp. PE36
MGRIIGIDLGTTNSCVSILDGDTARIIENAEGDRTTPSIIAYSADGETLVGQPAKRQAVTNPENTLFAIKRMIGRRFEDEEIQRDIKIMPFKIVKADNGDAWVEVKGEKMAPPQISAEVLKKMKKTAEDYLGEAVTEAVITVPAYFNDSQRQATKDAGRIAGLDVKRIINEPTAAAFAYGVNTAKGDSIVAVYDLGGGTFDISIIEIDEVDGEKTFEVLATNGDTHLGGEDFDTRLINYLVAEFKKEQNFDLTNDPLAMQRLKEAAEKAKIELSTTQQTDVNLPYITADATGPKHLNIKVTRAKLESLVEDLVKATMEPLRIALQDSDLAVGDINDIILVGGQTRMPMVQAAVTEFFGKEARKDVNPDEAVAMGAAIQGAVLSGEKTDVLLLDVTPLSLGIETMGGVMTKLIEKNTTIPTKASQTFSTAEDNQSAVTVHAIQGERKRAADNNSLGQFNLEGIRPAQRGIPQIEVSFDIDADGILHVSATDKDTGKEQKITIQASSGLSEEEVDAMVRDAEANSAEDAKFEELVQARNQADAMVHGTRKQIEEAGEALPADEKEKIETAIVELEAAIKGDDKEAIEAKTQTLMEAAQKLMEIAQQQAQAQQAGPEAGEQPKEKDVTGDVVDAEFEEVKEDKK

SEQ ID NO: 14728 - protein, 197 aa, Vitis vinifera
MVDNPGASASTDDGSIKEQDRLLPIANVSRIMKQTLPTNAKISKEAKETMQECVSEFISFVTGEASEKCKKERRKTVNGDDICWALAALGFDDYAGPLKRYLQRYRELEGDRVFSEVNDKVRNAIFSMFDHVGDAIFQIDREWESEQIDQALVKNVIDLYMEMGMGSVEFYEKDFEQAMLEEATAFHSQKTSNWITS

SEQ ID NO: 14729 - protein, 1065 aa, Enterococcus faecalis V583
MKWSIPERIVEQGREYMQEGRVLSIVQNPEKRIWLSEVLGEELYLVELDGTAKEQDVCECQYWMEHGYCKHTVAVELALKQRGVSRIIQANQTVSFEKTNRSTAEMFTKGFAKLSKASAEVPLQPLRLEFHLDVIETNNYYPELSTIGLSLKIGLEGTKPKTYIVKNIGDFLQAYEKEMTFMVNKQHQFTLLHDSFSMEIQEILTELAAIYHTSQLLGANGIQVKGKIDKRYLLLPIDRSQSLVEKMNRTGQFILTNQTHKYRYLTFKETSLPLTFTVQKTEEQSFKLTIQNPITTFLAHYHWAIADQTVYLLTEEQEAIYTTLLQLMKRLEEPSIIYEKETVSDLFSEVLPLLEKIGRVSVEESVEELVVHHPLKAVFIFKKIKGRINARIDYHYGEVIFSTNPKYAQLPEVNQEIVRDKAKETAIKQQFQQFAYQQTTTGFEKVLPAGESLYYFFKAEVPAFRQLGEVRMGRKLRELYLDAQHHQPTIEVAEGDSWLDIRFDVTGIDETEIDAVLTSLLRNDAFYTLKSGEILAFDSEEFFHTSAILTKLRKNMHQEDNVIHVPKNQGLMIESLLEDNERAHFSDSFKKMVTDLTHPENFEAQVPKTLQATLRHYQETGYKWLKMLSHYQFGGILADEMGLGKTLQTITYLLSEKEEERLKGTALIVAPASLTYNWLAEVKRFAPTLNVQVVSGNRQERAALLQNSTEDILITSYASMRQDVQLYQEMRVGYLILDEAQMVKNSGTKTAQALKSLKVPQRFALSGTPIENNLDELWSIFQMILPGLFPGKKAFREIKPEEIAKMIQPFILRRDKKTVLADLPEKIENNMYSVLTEEQKTVYLAYLKQMQADVSQMDQATFKKNRMSILAGLTRLRQICCDPRLFIEDYTGGSGKVEQVKDFLVAAKENNRRVLLFSQFTSMLSILEKELNELGLETFYLRGSTKPQDRLTMANAFNEGEKDVFLISLKAGGTGLNLTGADTVILYDLWWNPAVEEQAAGRAHRMGQKKVVEVWRMIAEGTVEEKMNSLQQEKRELFQKVIQGNEEQLAKMTEEDIRTILSIGE

SEQ ID NO: 14730 - protein, 160 aa, Pseudomonas fluorescens Pf-5
MSAFHDLKLKALDGQELPLAPFKGHVVLVVNVASKCGLTPQYAALENLYQQYKAQGFSVLGLPCNQFAGQEPGTEQEIQEFCSLNYGVTFPLSSKLDVNGPERHQLYRLLAGEGAEFPGDITWNFEKFLLGKDGRVLARFSPRTAPDDPTVVQAIEKALS

SEQ ID NO: 14731 - protein, 151 aa, Lupinus luteus
LTESQAALVKSSWEEFNANIPKHTHRFFILVLEIAPAAKDLFSFLKGTSEVPQNNPELQAHAGKVFKLVYEAAIQLQVTGVVVTDATLKNLGSVHVSKGVADAHFPVVKEAILKTIKEVVGAKWSEELNSAWTIAYDELAIVIKKEMNDAA

SEQ ID NO: 14732 - protein, 485 aa, Bacteroides fragilis NCTC 9343
MKLKEILTSIQPVKITGNQDIEITGVDIDSRQVESGHLFMAMHGTQTDGHAYIPAAVEKGATAILCEELPAELAEGVTYIQVADSEDAVGKAATTFYGNPSSKLELVGVTGTNGKTTIATLLYNTFRYFGYKVGLISTVCNYIDDEAIPTEHTTPDPITLNRLLGRMADEGCKYVFMEVSSHSIAQKRISGLRFAGGIFTNLTRDHLDYHKTVENYLKAKKKFFDDMPKNSFSLTNLDDKNGLVMTQNTKSKVYTYSLRSLSDFKGRVLESHFEGMLLDFNNHELAVQFIGKFNASNLLAVFGAAVLLGKKEEDVLVALSTLHPVAGRFDAIRSPQGYTAIVDYAHTPDALVNVLNAIHGVLEGKGKVITVVGAGGNRDKGKRPIMAKEAARASDRVIITSDNPRFEEPQDIINDMLAGLDTEDKKKTLSIADRKEAIRTACMLAEKGDVILVAGKGHENYQDIKGVKHHFDDKEVLKEIFSLTV

SEQ ID NO: 14733 - protein, 416 aa, Arabidopsis thaliana
MEAKPLASSSSEPNMISPSSNIKPKLKDEDYMELVCENGQILAKIRRPKNNGSFQKQRRQSLLDLYETEYSEGFKKNIKILGDTQVVPVSQSKPQQDKETNEQMNNNKKKLKSSKIEFERNVSKSNKCVESSTLIDVSAKGPKNVEVTTAPPDEQSAAVGRSTELYFASSSKFSRGTSRDLSCCSLKRKYGDIEEEESTYLSNNSDDESDDAKTQVHARTRKPVTKRKRSTEVHKLYERKRRDEFNKKMRALQDLLPNCYKDDKASLLDEAIKYMRTLQLQVQMMSMGNGLIRPPTMLPMGHYSPMGLGMHMGAAATPTSIPQFLPMNVQATGFPGMNNAPPQMLSFLNHPSGLIPNTPIFSPLENCSQPFVVPSCVSQTQATSFTQFPKSASASNLEDAMQYRGSNGFSYYRSPN

SEQ ID NO: 14734 - protein, 236 aa, Pisum sativum
MASMAFSTTFFTPLRDFNQPRTNSTPSTSLPFTKSSIASSKSPFFQLGFSQQASSNFPIVPSKTRSFSVNAKAIKDKTIYDFTVKDIDKKDVSLSKFKGKVLLIVNVASRCGLTSSNYTELSHLYENFKNKGLEVLAFPCNQFGMQEPGSNEEIKQFACTKFKAEFPIFDKVDVNGPFTAPVYQFLKSSSGGFFGDIVKWNFEKFLVDKNGKVVERYPPTTSPFQIEKDIQKLLAA

SEQ ID NO: 14735 - protein, 349 aa, Solanum lycopersicum
MGSEALEFFSCANNNNNNNGFSYEPKKNIIMEETDNLSINIHDGSWFEEEIDVDLKWSFALNSVLHKGTSEYQDIALLDTKHFGKILVIDGKMQSAEVDEFIYHECLIHPALLCHPNPKNVFIMGGGEGSAAREALRHKSMEKVVMCDIDKEVVDFCKKHLTANHEAFLNKKLNLVINDAKAELEQRQEKFDIIVGDLADPVEGGPCYQLYTKSFYQNILKPKLNDTGIFVTQAGPAGVFTHKEVFSSIYNTTKQVFKYVLAYTAHVPSFADTWGWVMASDKPFCLDAGKLDKKIAERIEGELLYLNGASFFSSTILNKTVAKTLKNESHVYAEDDARFIHGHGLGFRN

SEQ ID NO: 14736 - protein, 415 aa, Robiginitalea biformata HTCC2501
MDIFLITTILVLVSALFGYVNTRFIRLPNTIGLTVITIVFTLAVFAISAVDSTLLDAERYILEHIDFKSLLLDTMLGFLLFAGALHTDLEKLRAQRWPVLAFATFGVLVSTFLVGGATYMLLPLLGLQVDFIYCLLFGSLISPTDPIAVLGILKKAGAPKKLEIKIVGESLFNDGVGVVIFLTIFGLASGSGEPFSLAHVAELFIHEVAGGLLLGLALGWVTYRMMRSIDDYSIEVIITLATVMTGIVLSQYLHVSGPLAMVAAGLMIGGPRTRSAAMSEITETYVDRFWELLDVLLNTILFVLVGMEILVLDLESPYVIAGVVMIPITLLCRHISLFLPVKIFEKRLDFVPHTHLMMTWGGLRGAISIALALGLTQDMHRDLFLVVTYIVVIFSIIVQGLSVETLVGRLRKGWN

SEQ ID NO: 14737 - protein, 360 aa, Arabidopsis thaliana
MASSMLSSATMVASPAQATMVAPFNGLKSSAAFPATRKANNDITSITSNGGRVNCMQVWPPIGKKKFETLSYLPDLTDSGGRVNCMQAMGEPNLNPAYTLDQAIANLQQTEDASARYYAAWWIGRFRAAQPETIAALLVALEDETDRSPDGGYPLRRNAAKALGKLGDRQVVPALIKALECEDYYVRESAAQALEGLGDARAMAPLMAKLTGGLAAAQLVEGKPHLAQPYEAIIEALGTLQAVESIGLIEPFLEHFSPKVQYAAARALFQLTGDNRYGDLLITALGGTDLQLRRSAMMDLGATGYLPGAQAIAKAFAENSLKLIALRDLWATHRQRQASSESKALSPASRQILELMDSLL

SEQ ID NO: 14738 - protein, 160 aa, Caulobacter crescentus CB15
MAMSIYDYSAKTLDGQDVSLADYRGQVLLIVNTASKCGFTPQYEGLEALYKAHKDRGFTVLAFPCNQFGAQEPGNAEEIANFCSLTYDVSFPVMSKIDVNGADAHPLYKFLKKEQKGVLGTEAIKWNFTKFLIGKDGQVVDRFAPTVKPEDLKVAVEALL

SEQ ID NO: 14739 - protein, 387 aa, Yersinia pseudotuberculosis IP 32953
MKALHFGAGNIGRGFIGKLLADAGAQLTFADVNQPLLDALNKRKSYQVNVVGEQARVEEVKNVSAVNSGSPEVVALIAEADIVTTAVGPQILARIAATVAQGLITRHQQGNTRPLNIIACENMVRGTSQLKQHVFAALSEDEQRWVEQHVGFVDSAVDRIVPPSEAGSTDILAVTVETFSEWIVDGTQFKGQPPEIVGMELTDNLMAFVERKLFTLNTGHAITAYLGQLAGHQTIRDAILDPAVRQTVKGAMEESGAVLIKRYAFDPQKHAAYINKILSRFENPYLHDDVERVGRQPLRKLSAGDRLIKPLLGTLEYQLPHDSLVTGIAAAMSYRSEQDPQAQELVTLLAQLGPKAALAQISDLPADSEVVEQAVSVYNAMQQKLAH

SEQ ID NO: 14740 - protein, 1142 aa, Oryza sativa Japonica Group
MDNPEAEPDDAVLFVGVSLVLGIASRHLLRGTRVPYTVALLVLGVALGSLEFGTKHGMGKLGAGIRIWANINPDLLLAVFLPALLFESSFSMEIHQIKKCMAQMVLLAGPGVLISTFFLGSALKLTFPYNWNWKTSLLLGGLLSATDPVAVVALLKELGASKKLSTIIEGESLMNDGTAIVVYQLFYRMVLGRTFDAGSIIKFLSEVSLGAVALGLAFGIASVLWLGFIFNDTIIEIALTLAVSYIAFFTAQDALEVSGVLTVMTLGMFYAAFAKTAFKGDSQQSLHHFWEMVAYIANTLIFILSGVVIADGVLENNVHFERHGASWGFLLLLYVFVQISRILVVVILYPLLRHFGYGLDLKEATILVWAGLRGAVALSLSLSVKRASDAVQTHLKPVDGTMFVFFTGGIVFLTLIFNGSTTQFLLHLLGMDRLAATKLRILNYTKYEMLNKALEAFGDLRDDEELGPPADWVTVKKYITCLNGLDDEPVHPHAVSDRNDRMHTMNLRDIRVRLLNGVQAAYWGMLEEGRITQTTANILMRSVDEAMDLVPTQELCDWKGLRSNVHFPNYYRFLQMSRLPRRLITYFTVERLESGCYICAAFLRAHRIARRQLHDFLGDSEVARIVIDESNAEGEEARKFLEDVRVTFPQVLRVLKTRQVTYSVLTHLSEYIQNLQKTGLLEEKEMAHLDDALQTDLKKFKRNPPLVKMPRVSDLLNTHPLVGALPAAMRDPLLSSTKETVKGHGTILYREGSRPTGIWLVSIGVVKWTSQRLSSRHSLDPILSHGSTLGLYEVLIGKPYICDMITDSVVHCFFIEAEKIEQLRQSDPSIEIFLWQESALVVARLLLPMMFEKMATHELRVLITERSTMNIYIKGEEIELEQNFIGILLEGFLKTKNQTLITPPGLLLPPNADLNLFGLESSAINRIDYCYTAPSYQVEARARILFVEIGRPEIEADLQRSASLISQTLELPRTQSKEHSETIQQLSGAQNGASLTEIRDHPASFSARALQLSMYGSMINDMKSGQGQGQRRQRHRHTKASSNKAHSSSYPRVPSSSSNTQRPLLSVQSEGANMTTARQAAAAGASLPPEPEEAGRRRRRQRKAIEEDEDNSSDESAGEEVIVRVDSPSMLTFRQPSSAADR

SEQ ID NO: 14741 - protein, 193 aa, Austrosteenisia blackii; identical to SEQ ID NO: 7879

SEQ ID NO: 14742 - protein, 163 aa, Glycine max
FSQMTRLMDTLEVYLRLHDFKYLRLDGSTKTEERGNLLRKFNAPDSPYFMFLLSTRAGGLGLNLQTADTVIIFDSDWNPQMDQQAEDRAHRIGQKKEVRVFVLVSVGSIEEVILERAKQKMGIDAKVIQAGLFNTTFTAQDRREMLEEIMRRGTSSLGTDVPS

SEQ ID NO: 14743 - protein, 210 aa, Trochodendron aralioides
MGRGKIEIKRIENVSNRQVTYSKRKNGIIKKAREIAVLCDAQVSLVIISSNGRMAEFCSPSTTLTKFLDRYHRSSATKLWDAKHEYLSKEVDRIKKENDNMQIELRHLKGEDIVSLKLEELISLEEALQNGVTNIRHKPMELWKTLKKKETMLEEENKHLSYMLHQQEMAMDGRLREMENGYAPKMRDYLPQMPFAFRLQPMQPNLQDKK

SEQ ID NO: 14744 - protein, 582 aa, Pseudomonas syringae pv. phaseolicola 1448A
MKQNATTYSQRLLRGQSPSYERLQARLAEDGSQIDAEPLALHCGWGRLLIGHTYPDPAALAQDLLNEKPGERDIALYVAAPQQVLAQSPQQLFLDPSDTLRLWFSDYRPAHRVFRGYRIRRAHNEADWQAINNLYLARGMLPIDPALLTPRHEGGPVYWVAEDEGSNTIIGSVMGLDHQKAFNDPEKGSSLWCLAVDPQCTRPGVGEVLVRHLIEHFMSRGLSYLDLSVLHDNDQAKALYAKLNFRNLPTFAIKRKNGINESLFLGPGPQADFNPYARIIVEEAHRRGIDVQVDDADAGLFTLSYGGRRIRCRESLSDLTSAVSMTLCQDKSLTHRALKATSLRLPAQQRAGSADDNLAFLEEHGQIVVKPLDGEQGQGVAVDLRTIEDVQSAIEQARQFDTRVILESFHEGLDLRIVVIGFQVVAAAIRRPAEVIGDGCHTIKQLIEAQSRRRAAATDGESRIPMDQETERTVREAGFEYADILPMDQRLAVRRAANLHTGGCLEDVTAILHPVLSDAAVRAARALDIPVVGLDLMVPAADQPEYVFIEANERVGLANHEPQPTAERFVDLLFPHSLPVHI

SEQ ID NO: 14745 - protein, 164 aa, Arabidopsis thaliana
MISAKCEKFHFPIKGNKSRELPPRGGGPPLRNRGNPPGRQEFRPGGEEERERERAYSLVPPPPPEQDKFSQTKKKKKTKAQRLRRKEILRFFSGVIMTTSKRLADRKIEKFDKNILKRGFVPETTTKKGKDYPVGPILLGFFVFVVIGSSLFQIIRTATSGGMA

SEQ ID NO: 14746 - protein, 286 aa, Pseudoalteromonas tunicata D2
MTNLDQTTWFTEVSDRDGSAFSLRINKKLEEKQSPFQKVEMYETTDFGNLMIIDGCTMVTTRENFFYHEMISHPALYSHTNPKNVVIIGGGDCGTLREVLKHPAVETVHQIDIDAVVTEMALKYFPELCESNNDPRATVMFDDGIKFMADAAPESIDIIIVDGTDPVGPGEGLFNHAFYTSCLKALRSGGILVQQSESPLMHMPLLVEMRDAMQDVGFADLQTLPFPQPIYPSGLWSVTLARKDENFAGFREHDANSANFDTEYYNTGIHLGALATPNFMKRAFNK

SEQ ID NO: 14747 - protein, 368 aa, Staphylococcus aureus subsp. aureus NCTC 8325
MKAVHFGAGNIGRGFIGYILADNNVKVTFADVNEEIINALAHDHQYDVILADESKTTTRVNNVDAINSMQPSEALKQAILEADIITTAVGVNILPIIAKSFAPFLKEKTNHVNIVACENAIMATDTLKKAVLDITGPLGNNIHFANSAVDRIVPLQKNENILDVMVEPFYEWVVEKDAWYGPELNHIKYVDDLTPYIERKLLTVNTGHAYLAYAGKFAGKATVLDAVEDSSIEAGLRRVLAETSQYITNEFDFTEAEQAGYVEKIIDRFNNSYLSDEVTRVGRGTLRKIGPKDRIIKPLTYLYNKDLERTGLLNTAALLLKYDDTADQETVEKNNYIKEHGLKAFLSEYAKVDDGLADEIIEAYNSLS

SEQ ID NO: 14748 - protein, 444 aa, Listeria innocua Clip11262
MAKYTKEDIFRFADEQNVKFIRLQFTDILGIIKNVEIPVSQLKKALDNKIMFDGSSIEGFVRIEESDMYLFPDLDTWVVFPWTAEKGKVARMICDIYNPDMTPFAGDPRANLKRVLKEMEELGFTEFNLGPEPEFFLFKLDENRRPTLELNDSGGYFDLAPTDLGENCRRDIVLELEEMGFEIEASHHEVAPGQHEIDFKYEDAITACDSIQTFKLVVKTIARKHGLHATFMPKPLFGVNGSGMHFNMSLFTEEGNAFFDKEGELELSKTAYHFLAGMLKHARGFTAVTNPTINSFKRLVPGYEAPCYIAWSGKNRSPLVRVPSSRGLSTRLELRSVDPSANPYLAMAVLLKAGLSGIKDELTPPAPVDRNIYGMNEEEREATGIYDLPESLGHALIELEKDDIIRDGLGEHIFEHFIEAKTIECDMFRTAVHPWEREQYLEIY

SEQ ID NO: 14749 - protein, 306 aa, Magnaporthe grisea 70-15; identical to SEQ ID NO: 384

SEQ ID NO: 14750 - protein, 521 aa, Arabidopsis thaliana; identical to SEQ ID NO: 11387

SEQ ID NO: 14751 - protein, 1300 aa, Arabidopsis thaliana
MAIVDDAEMRLTESEAVSSSDDRKIVADTPDFIDESSLVIRTTTGVRISALPAEQSLVDSDGSNSEVTLPAKDEVISDGFTCVNKEIVESDSFREQNLEIGEPDLDVENRKEAMIIDSIENSVVEIVSSASGDDCNVKVEVVEPELLVENLVVAKEEEEMIVDSIEDSVVEIVSTASGCDCNVKVEVVDPELCVDNLVVVKEEEMIADSIAESVVETVSRGLDYECVDVKVKEEPDLGTKLEEDSVFPNVLEKKDEVIKVLEDQPSEINKKLEQENDDLFSSGDSDGTSAKRRKMEMESYAPVGVESCILAPTPLRVVKPEKLDTPEVIDLESEKSYTHVKMEPVEEIKVEAVKMSSQVEDVKFSREQKSVYVKKEPVGARKVKVEDGDFPVEKDWYLVGRSLVTATSTSKGRKLEDNEIVNFTFSSVAKWKVPNIVRFSTKRCGEIGRLPMEWSNWAVSLLRSGKVKMLGRCVAAPPFLTMMQEIMLYVSFYIHSSIFTDVSKSTWRIGSSPNLESTLHPLLQLFKHLTIKPYQKLYGIRIMFHIHHLLVSHLYIFKQAEFTPEELNSRKRSLNLEDDYDERAALLAIAKRRKGCQQSLEQNKDEEEAPESYMNRVVGAADSYNLEEMEAPSTLTCNLRPYQKQALYWMSESEKGIDVEKAAETLHPCWEAYRICDERAPSIYLNIFSGEATIQFPTATQMARGGILADAMGLGKTVMTIALILARPGRGNPENEDVLVADVNADKRNRKEIHMALTTVKAKGGTLIICPMALLSQWKDELETHSKPDTVSVLVYYGGDRTHDAKAIASHDVVLTTYGVLTSAYKQDMANSIFHRIDWYRIVLDEAHTIKSWKTQAAKATFELSSHCRWCLTGTPLQNKLEDLYSLLCFLHVEPWCNWAWWSKLIQKPYENGDPRGLKLIKAILRPLMLRRTKETRDKEGSLILELPPTDVQVIECEQSEAERDFYTALFKRSKVQFDQFVAQGKVLHNYANILELLLRLRQCCNHPFLVMSRADSQQYADLDSLARRFLDNNPDSVSQNAPSRAYIEEVIQDLRDGNSKECPICLESADDPVLTPCAHRMCRECLLTSWRSPSCGLCPICRTILKRTELISCPTDSIFRVDVVKNWKESSKVSELLKCLEKIKKSGSGEKSIVFSQWTSFLDLLEIPLRRRGFEFLRFDGKLAQKGREKVLKEFNETKQKTILLMSLKAGGVGLNLTAASSVFLMDPWWNPAVEEQAIMRIHRIGQKRTVFVRRFIVKDTVEERMQQVQARKQRMIAGALTDEEVRSARLEELKMLFR

SEQ ID NO: 14752 - protein, 400 aa, Brasenia schreberi; identical to SEQ ID NO: 7898

SEQ ID NO: 14753 - protein, 952 aa, Physcomitrella patens subsp. patens
MVGGAGGGEGSVRERTKGSDVLIHRVVTDIPGGPKRSKLASDTSCYDTPSAPVNCAVNVSDVIVKDAQAALAILVNAPIGLIPEDRYPSPRVLKRSGDTLEDAVVLDDDDEEVQVTGFIPRPLFVEKQTFSDKENGKFIKEGTLDEEDIFGHQRMLKEVDIPAVNLKEVQTEGVSYMNINGDFLISSAKENLKKSTKKLKKGPKVIERLKGPKVVEGLKGPKVTEGLKGTEGEAKLPSCKGGKGGGGNETNMEEDTFKERVFISPKSKKSRAQVLAEAVESGPDYEVEHDSDSDNDRKATLGTEESSDDIWADIAVMKTQMRKDKDNVEEVRESCVHVYAIKSDVGRACTLCGLIKEDIKDMTFMWRRPCSVRKIRLRGARLDRWDGCAGEVLEEEKKLVGMAQLEVHPFLENSMHPHQLEGFKFLSRNLVEEDSGGCMLAFAPGTGKSFLTISFIQSFMIQVPNARPMIVAPKSMLRPWMQEFKKWEVEEMLVHNLYEADDQIEMLKRWQGTPSVLLVGYSQFVNPSSEVGRLLTEGPGLMVMDEGHLARTEDTKILKALSRVFTRRRVLLSGTPFNNNFEEFYTTLELVRPNFMMSANAQMCPTLNTFQLIVDNKIGPNHPVANGHLLKRPSNSGRKAFKDVIGENFESGKHGSIARALQQLRVLIKPFVAWHKGQILDSLPGITDLTVMLQLTAEQLELVEKNKKSEVRDSLQKRAAAIYVHPILEPVANGCKRTQKDPRLKGDVDVKAGVKLKWVLDLVQLCDAAKEKVLIFSEYLYSLALIENMTMQRMNWSRGSQILRLDGSLPPQEREMVQHKFNTDPEAKMLCASIKACGEGISLVGASRVVLLEVHWNPSVPRQAISRAFRIGQQRKVVVYRLIAADTYEATNMHAVATRKEWLSRLLFDPTIPCDDPNSILWDVTKDCSDLFLANLAGPLRENVSRIYQREF

SEQ ID NO: 14754 - protein, 546 aa, Rhodospirillum rubrum ATCC 11170
METITVVLFLLFCVVVSDLLARTLPIPVPRPLYQIALGGVIGLFADLRVVLEPDIFFLLFLPPLLFLDGWHIAREEVFKDRFVILELAFGLVFLTVLGAGLFIHWMIPAMPLAVAFALAAVVSPTDPIAVSAIAKHAPIPKRMMNILEGESLLNDASGLVCLRFAVAAALTGGFSLTDAALEFLWVALAGIAVGISLTWAVTRSKNMLARRIGESSATQTLISLLIPFGSYLVAEHLDCSGILAAVAAGVTMSIEESSGQAQAATRIRRNTVWDTIQFAANGVIFVILGEQLPAILESAAETVRVTGHHEPWWLGIYVVAICLGLAALRFLWVWASLQVSLLRTGQKRPPRHWRLITAMSLSGVRGAITLAGVLTLPLTMTDGTAFPARDLAIFLAMGVIIVTMVVATVFLPLLLNGLEMSQDSTADDQEAAARIAAAEVAIAEIERVQHSMAEGAKDADLFVTVGASLMDVYRERVRSRSQEGEAAVLVRRVDWIEREMRLAALRAERSEIFRRVRKYQLGSERARKLIRELDLLETRYSAEPKG

SEQ ID NO: 14755 - protein, 553 aa, Mycobacterium avium 104
MSSMGAQTALTLLLAAIAVIVLVDWISERTRLPSATLLVLVGIGQALLPGPTIGLEPDVVMTCILPPLLYHAALESSLVGIRRNLRTVVSLSVVLVLLTAASVGVAFSLLVGGATLAVGMVLGAAVAPTDPVAALAVARKEGLPLNIVTLIEGEGLLNDATALTTLAVAVTVARGAAFSAPSAIREFVLAAVGGLVVGQVFAYARRLLRRWRHDVLTANAISLATPFLTYLVAEKLSASGVLAVVVCGLIVGHDSPRVESGASRLQTRAVWRLVNFLLEGVVFLLIGHQVPVILDELGGYALSTILVAVGVTVAVVLLVRPLWLLLTQALPRSLHTRLGNVDDSATDDAEPRPERTRERLSGREIVVLSWAGTRGVVSLAAIFAVPVLTEGNAPFPDRDLLLFCTLVVVLVTLIGQGVTFGPLVRALGLRAKTTDELRLRNRARAAALRAALDRLDSLDPEDGADVDPRVIDVVRQQLSAQLERYEHRLTLLSDVDELPAAPAYEAAVGLRRVAIDAQRDELVRWRDAGMLPDQSLRAIERELDHEESMLPMG

SEQ ID NO: 14756 - protein, 116 aa, Schizosaccharomyces pombe; identical to SEQ ID NO: 390

SEQ ID NO: 14757 - protein, 1298 aa, Photobacterium profundum SS9
MTASFSRLTPKQCDILLTLAFSIDQNTHSSLLAEHENSGSKSMKAVDLTSRLAGLMRVGLIEQDDSQSYELTISGLAHLIGYQVDEEFDIGRAIMALNFETSPWVEVLLVCLDFRWLLHNGMSEEASEIMRQLMINPLVWPMIDRLSTSVAESLLPETWFGHILNSPYPKWIMPAIDQLDLWEDDLIALDWRADLHWLEEGDASHSGAYNDVYNSKGVLADTLTLDVVSQFPWVKNAVGLSASKSVVATKYGVGSLIEVAAVALFDLPLAKARTEQLYTGLMNNTEAEFAPSWCEYLTLLTSDVAELEAYFSDLTYWSNTLVNDDIAWGRIYLDVLMACRLIDSDPEVQDRFITALTNDAVISRILTAKMPHLLAQRAVAGLKHILLLPEVSSFRQAMPVWEQWLNGLTQLAELPQSNQQGSQRLVWQLTPRYTHISAKIQKLGKKGWSKGRQVQLDDLHYKYPELMTNEDHELVAVINGQLNRSWGSWRAEVELNVSLLKVLVKSDNIIDEAGNSLTLYAEKPLVVLSAAEDRLALSSFPSQTSTLLYPKAGDALAFLDLSDQVSTFLAAVKNYPASLPLTACEQVESTLAQFSQLDWYSDINQQGTVTLGEWNTQPQVWLDWHDGVLGVSIEHQPLDSEQSGVALSYPSGQGAQWVPQGVTSPIWYRRNLKQEQSASLTLLKAIGLKANVKRQWRLLGDHALNMIQMLPNIKDVPIHWRAKSQQLSVVGTQDFRLEVEQQQDWFALEGKVEVDKDLELNLRTLLSHNRAGFIRLENEGITVMLSKTLQQQLRVLESLLNDDHQVDQRMAYPLQQLIATFSHQGDDGWKALVEQWREKPVLAAEILAPLRDYQKESVNWAAHLAHHGFGACLADDMGLGKTLQALTLIRHFGAQGASLVVAPKSVLLNWQQEALRFAPELTIIDVESASDRTAAIEQADANSIVLLSYGLLSRLETTLHEKQWQCAILDEAQQIKNPNAKRSKIAFGLQAKCRFTLSGTPIENHLLELWSLFSFLNPGLLGSRQQFKKKYGNAANSEEDMLRLRTLVSPFIMRRLKQKVLTELPSKTEITHTIELSKTERTAYEAIRKESVAVAKSGKGMVEVLACLTRLRQVCCDSRLVFSEMDQPSSKLNEALQLVKEAREGQHRILVFSQFVTLLKMFADQLEGDGINYSYLDGKSSSRQRKQAIDAFTSGKKEVFLISLKAGGTGLNLTEADTVIHLDPWWNPAVEDQASDRAYRMGQTKPVTVYRLVATNTIEEKIVLLHQSKRDLADKVLSGQDGNQSLSPELLLTLMDEE

SEQ ID NO: 14758 - protein, 616 aa, Helicobacter pylori
MGKVIGIDLGTTNSAMAVYEGNEAKDLLRIKEGKNTTPSIVAFTDKGEILVGESAKRQAVTNPEKTIYSIKRIMGLMFNEDKAKEAEKRLPYKIVDRNGACAIEISGKIYTPQEISAKILMKLKEDAESYLGESVTEAVITVPAYFNDSQRQATKDAGTIAGLNVLRIINEPTSAALLYGLDKKESEKIMVYDLGGGTFDVTVLETGDNVVEVLATGGDAFLGGDDFDNRVIDFLASEFKSETGIEIKNDVMALQRLKEAAENAKKELSSAMETEINLPFITADATGPKHLVKKLTRAKFESLTEDLVEETISKIEGVIKDAGLTKNEISEVVMVGGSTRIPKVQERVKAFINKELNKSVNPDEVVAVGASIQGGVLKGDVKDVLLLDVTPLSLGIETLGGVMTKVIDRGTTIPAKKSSQVFSTAEDNQPAGVPYGFQGERELARDNKSLGKFDLQGIAPAPRGVPQIEVTFDIDANGILTVSAQDKNTGKSQEIKISGSSGLTIAKKMVKDAELHKEEDARKKEVIEARNHADSLAHQTQKSLDEHKTNLNENDANEIQNAINALKDCIKTITLLKRIEDKTKALKGSKIRRNGEKNNAEQPKKKDDDVIDAEVE

SEQ ID NO: 14759 - protein, 234 aa, Candida glabrata CBS 138
MVVMPGDELALDQGKPVVLGPGVYCDPQTQTVVPVNAGVPVVKESAKRQTVYVEYNSKRYIPSVGDLVIGVITSTFSDSYRVSLSSFSNSVSLSYMAFPNASKKNRPTLKVGDLVYARVSSAEKELEAEIECLDSTTGESAGFGLLEGGMVIDVTLAFARRLLFNDNFPLLLLLSKRTQFEVAIGVNGKVWIKCDEVKYTMACFRSIMKCQDQPVSQYKDIIKQEFDSLPKEED

SEQ ID NO: 14760 - protein, 513 aa, Kluyveromyces lactis NRRL Y-1140
MKRVTKRVQRTQSRTLFDLKFVRLKTSVATSTTSNEIIDLTQEDEYDGTDTDYVTADFTSCLEREASVDPETPVAGGSQDVKIEGKISQAQEVEVQVQVHGQAQPKSEPAVVDKTSRKKSMAWFKKLSFSDITVVVDSFNCDKEPNIDLYFLSHFHADHYGGLKKSWSHGTTIYTSVYTANLVKWKFKVNQCKLIGLSLNEWHSVSNEVRVILLDANHCPGSVIFLFHDLRRNSFVLHTGDFRANERIITEVNSLLQGNSLSLIYLDTTYLNPFFKFPALPKVCEVTADFASLLAENGLNTFLNRSDSQRSISQYLGLSQTKPILFVVLSYSIGKEHLAISIAKKLKTQLYVPHTKYQLVKQYISWFPEGLLTTDHKSSNVHLVAMHTDLDKYLSQLSNMFDSIVVFRPTGWTFSNQYDKSYTLWDEFERKNWVKDTLSGETPFAIDYFTKQKRSQGKIYHFNVPYSEHSSFKDLCLFSTKLKWDKIIPTVNLSQYREMARWFEIWKSYKGSQ

SEQ ID NO: 14761 - protein, 160 aa, Debaryomyces hansenii
MSFYDLSPLDTNDKPFPFEELKGKVVLVVNVASKCGFTPQYKELEELNKKYQDKGLQIIGFPCNQFGGQEPGSSEEIASFCSLNYGVSFPVLKKVDVNGDKTDPVYKYLKGEKSGLLGLNRIKWNFEKFLIDKNGKVIERYSSLTKPASLSSTIEELLKK

SEQ ID NO: 14762 - protein, 1053 aa, Arabidopsis thaliana
MAENTASHRRKPRSLNDRHYSILQDLSAPPRQPPSSSHGEDEETKKSMIKLAGRRRLCKALPKEDEADGYDDPDLVDFYSPVKGETSLDSAGIGNKFTSWDESKEANTELAGEPNFSIITDFCSPSPQLKQKEEMQGDGGRNEIMGILDDLTSKLGTMSIQKKKDSQSNDFDACGVKSQVDKFDFEDAKSSFSLLSDLSKSSPDVVTTYNAGVNSIKDKQGKSGFAIREEQTSKEFSREWEERISNVGKQNSYSGRHFDDNSEDNRQGYNLDRGKSQCKEVDQSMKTTRHIEVSEKIRTVGRSNAAKLRDLDEDDDDDDCLILSGKKAAEMKINKPARSYNAKRHGYDERSLEDEGSITLTGLNLSYTLPGKIATMLYPHQREGLNWLWSLHTQGKGGILGDDMGLGKTMQICSFLAGLFHSKLIKRALVVAPKTLLPHWMKELATVGLSQMTREYYGTSTKAREYDLHHILQGKGILLTTYDIVRNNTKALQGDDHYTDEDDEDGNKWDYMILDEGHLIKNPNTQRAKSLLEIPSSHRIIISGTPIQNNLKALSFNRFKQNYEHYILRGTDKNATDREQRIGSTVAKNLREHIQPFFLRRLKSEVFGDDGATSKLSKKDEIVVWLRLTACQRQLYEAFLNSEIVLSAFDGSPLAALTILKKICDHPLLLTKRAAEDVLEGMDSTLTQEEAGVAERLAMHIADNVDTDDFQTKNDSISCKLSFIMSLLDSLTSNGYSFLRIDGTTKAPDRLKTVEEFQEGHVAPIFLLTSQVGGLGLTLTKADRVIVVDPAWNPSTDNQSVDRAYRIGQTKDVIVYRLMTSATVEEKIYRKQVYKGGLFKTATEHKEQIRYFSQQDLRELFSLPKGGFDVSPTQQQLYEEHYNQIKLDEKLESHVKFLETLGIAGVSHHSLLFSKTAPIQAIQKDEEEQIRRETALLLGRASASISQDTVINGADYAFKPKDVNLDKRINISPVDDKELSESVIKARLNRLTMLLQNKGTVSRLPDGGAKIQKQIAELTRELKDMKAAERINMPQVIDLEEDISRKMQKGLNL

SEQ ID NO: 14763 - protein, 207 aa, Primula vulgaris
MGRGKIEIKRIENSNNRQVTYSKRRNGIIKKAKEISLLCDAQVSLVIFANSGKMHDYCSPKTPLINILDAYQKQSGNRLWDAKHENLSNEIERVKKENDNMQIELRHLKGEDVQSLHHKELMSIESALENGLACVRQREMEIYRMARENFADKERVLEDENRSLTYQMHHLVMDIEGGEMENGYNYQSQMPFSFRVQPIQPNLQERI

SEQ ID NO: 14764 - protein, 1308 aa, Vitis vinifera
MEPKPHPNNGFSFSNLFNLESLMNFQLPQQDDDFDYYGNSSQDESRGSQGGTMGDYHNGIMSERELSLVSKKRRSQNSEDEEEDGNYSTFISEERYRSMLGEHIQKYKRRFKDPSPSPAPARMGVSVPKSTLGSKTRKLGNEHRGGLHEVETPSEWLADVETRTMENMLKILTIYESSYLDIGEGIAYRIPPAYEKLAVTLNLPTFSDIRVEEYYLKSTLDLGSLAEMMTADKRFGPKSRAGMGEPQSQYESLQARLRALSSSNSVQKFSLKVSDIALNSSSIPEGAAGSIQRSILSEGGALQVYYVKVLEKGDTYEIIERSLPKKQKVKKDPSMIEKEEMERIGKVWVNIVRRDIPKHQRIFINFHRKQLIDAKRFSENCQREAIIVVKLKVSRSLKLMRGAAIRTRKLARDMLVFWKRVDKEMAELRKKEEREAAEALRREQELREVKRQQQRLNFLITQTELFSHFMQNKATSQPSEALPVDGEKPKDQELLVSSSDDVPGEEQDPEDDELKKEALKAAQDAVSKQKRLTSAFDNECLKLRQAAEPEVPSPDASVASSVQTPELFKGSLKEYQLKGLQWLVNCYEQGLNGILADEMGLGKTIQAMAFLAHLAEEKNIWGPFLVVAPASVLNNWADEISRFCPDLKTLPYWGGLQERMILRKNINPKRFHILITSYQLLVSDEKYFRRVKWQYMVLDEAQAIKSSNSIRWKTLLSFNCRNRLLLTGTPIQNNMAELWALLHFIMPTLFDSHEQFNEWFSKGIENHAEHGGTLNEHQLNRLHAILKPFMLRRVKKDVVSELTGKTEVTVHCKLSSRQQAFYQAIKNKISLAELFDGNRGHLNEKKILNLMNIVIQLRKVCNHPELFERNEGSTYLYFGEIPNSLLPPPFGELEDMHYAGAQNPITYKVPKLVHQEVMQSSGIISSTARRGVHRETFLKHFNIFSPNNSNGSAVKSGTFGFTHLMDLSPEEEEDFSNSHLDSGKLATGLGHAPFEALVVPHQDRLQANTRLVHATYTFIPRTRAPPINAHCSNRNFAYKLLEELHHPWLKRLFIGFARTSDYNGPKKPDVPHHLIQEIDSELPVSKPALQLTYKIFGSSPPMQSFDPAKLLTDSGKLQTLDILLKRLRAENHRVLLFAQMTKMLNILEDYMNYRKYRYLRLDGSSTIMDRRDMVRDFQLRSDIFVFLLSTRAGGLGINLTAADTVIFYESDWNPTLDLQAMDRAHRLGQTKDVTVYRLICKETVEEKILQRASQKSTVQQLVMTGGHVQGDLLAPEDVVSLLLDDAQLEQKLRDLPLQVRFKSVYLSF

SEQ ID NO: 14765 - protein, 195 aa, Poecilanthe falcata; identical to SEQ ID NO: 7914

SEQ ID NO: 14766 - protein, 184 aa, Yersinia pestis CO92
MSHPIYAISVQTIDHQLVKLAKYKGSVLLVVNVASQCGLTQQYEGLESLYKTYQKQGFEVLGFPSNEFAGQEPGSDEEIHAFCRGTFGVDFPMFSKIEVNGPHRHPLYQHLVTAKPVAVKPEGSEFYQRLASKGREPKQPGDILWNFEKFLISRDGTVLARFAPDMAPEAPILINAINQALASH

SEQ ID NO: 14767 - protein, 542 aa, Bacteroides fragilis NCTC 9343
MIMKRIIYLLIGLCSVLGLQAQNFGSPAMRKLQLAEFAISNLYVDTVNENKLVESAIIEMLAQLDPHSTYSDAEEVKKMNEPLQGNFEGIGVQFQMIEDTLLIVQPVSNGPSEKVGILAGDRIIAVNDTAIAGVKMGTEEIMGRLRGPKDSKVNLTIIRRGVKEPLLFNVKRDKIPILSLDAAYMIQPKIGYIRINRFGATTAEEFLKALKELQKKGMKDLILDLQGNGGGYLNAAIDLANEFLGQKELIVYTEGRSAQRSEFFAKGNGNFRNGRLVVLVDEYSASASEIVTGAIQDWDRGVVVGRRSFGKGLVQRPIDLPDGSMIRLTIARYYTPAGRCIQKPYDSSINEKPGKGKSSESSIEKYNQDLIDRYNHGEMVSADSIHFPDSLKCQTKKLGRTVYGGGGIMPDYFVPVDTTLYTDYHRNLVAKGVVIKTTMNFIEKNRKALLDKYKTFEKFNEKFEIDDQLLNYLREAADKEKIEFNEEQYNKALPLIKAQLKALIARDLWDMNEYFQVMNATNKSVERALEILNDKEYEKILK

SEQ ID NO: 14768 - protein, 453 aa, Candida albicans SC5314
MSTDSTDSPATNNIHDPTIFQINGLLKIKLSQFKYFTFTVIGIALLWPWNCFLSASAYYGERFVNSPSLVKVYSSTMMSVSTITSTAYNFYLSQRQTNVNYNFRVQVGFYITIFVFLFMAVSCVSDWIIDMNDSAFFTTLMFMVLLSAMATCLAQNGTMAIVNVLGGIYANAVMVGQAVAGVLPACALIISILLVGDKVSDQHHRVEKNYGVFVYYITASLVCIISLLLLYLVTYHKNEVGYQRLNQLVEEDDSGAVDEQEVVDPIHTQKKFVPFTVLWGKLNLIVMTIFFTFGITLIFPVFASVVESVHTDSQSRFLNKNIYIPFIYLVWNLGDLLGRVLCGYPRLNMLIKSPKTQLVYALSRLVFIPLFLTCNIHPGQSEPFIKSDLWYIGLQLLFGISNGQLCTSAFMIVGDYCDTDEEKEAAGGFTTVFLSTGLAVGSVLSYLLVLAVN

SEQ ID NO: 14769 - protein, 467 aa, Picea sitchensis
MDPDFGVERQAFEAVPDSKSLVSLHSSLSCSFNTMDTIFCDESRYSQKCTGEFGEIASQNAFGGAPESIISNAGGAFFADPSFAAKYLQKSSFSPVMAKETSNADGSGSIGGPNVPILANSVQFHTPSVKNSVNARRWRNLEASHLGSEVSKFGIGSVPSALVQFPSDPGFVEQAAKFSPFNNIDRNSSENVVCGASNLPPIVGGVQQGGGENMSVFSEPTKCVDDGNGKKRRAKSLTSAENSKEPEEAKAKRCRLGESSEIDDDDNNDETSDSNSKKGKEKNSNVSQKDDNYIHVRARRGQATDSHSLAERVRREKINQRMKFLQDLVPTCNKVTGKAVMLDEIINYVQSLQHQVEFLSMKLATVNPKLDFNIDNFFAKEMSGSFSSKGMSPTYFHLDQLKQASLQTVPSPGSDIPSTMSSVDSAEMFDGTNFQRQEGWDSELQNMYNMGLLQSRLQQHQHQQRPL

SEQ ID NO: 14770 - protein, 381 aa, Schisandra plena; identical to SEQ ID NO: 7921

SEQ ID NO: 14771 - protein, 380 aa, Trithuria submersa; identical to SEQ ID NO: 7925

SEQ ID NO: 14772 - protein, 469 aa, Streptomyces viridochromogenes
MFQNADEAKKLIADEDVKFIDVRFCDLPGVMQHFTIPASAFDPAEELAFDGSSIRGFQAIHESDMAVRADLSTARVDPFRRDKTVNINFFIHDPITGEQYSRDPRNVAKKAEAYLASTGIGDTGYFGPEAEFYVFDSVRLANSATESFYHIDSEAGAWNTGALENNRGYKVRYKGGYFPVPPVDHFADLRAQISLELDRAGLQVERHDHEVGTAGQAEINYKFNTLLAAADDLQLFKYIVKNVAWQNGKTATFMPKPIFGDNGSGMHVHQSLWTGGQALFYDEAGYAGLSDTARYYMGGILKHAPSLLAFTNPTVNSYHRLVPGFEAPVNLVYSQRNRSAAMRIPITGSNPKAKRVEFRAPDSSGNPYLAFSALLLAGLDGIKNKIEPAEPIDKDLYELAPEEHAGVPQVPTSLPAVLDRLEADHEFLLAGDVFTPDLIETWIDYKRTNEIAPLQLRPHPYEYEQYYDV

SEQ ID NO: 14773 - protein, 631 aa, Verrucomicrobium spinosum DSM 4136
MAVLEGGEAQVLENSEGARTTPSVVAFTKSGERVVGQAAKRQAVTNPRNTVFSVKRLMGRKFSELTAADKQVPYKIVAASNGDAHVEVEVGGEKKVYSPQEISAMILAKLKSDAEARLGETITEAVITVPAYFNDSQRNATKAAGEIAGLTVRRIINEPTAASLAYGLDKKKDEKIAVYDLGGGTFDISVLEIGDGVFEVLATDGDTHLGGDDWDNKLIQWIISDFKADSGIDLSGQPDALQRIKEEAEKAKIALSSSQSYDLNLPFITADATGPKHIMKSLSRAKMEQLTDDLFERTVKPVRECLNAAKLDASKIDELVLVGGMTRMPKVVETARKLAGKEPHKGVNPDEVVAVGAAIQGGVLQGSVKDVLLLDVAPLTLAIETEGGIATPMIPRNTTIPKRHTQTFSTASDNQPGVEVVVIQGERPMARDNKTLGTFKLDGIPPMPRGTPQIEVTFDIDANGILHVSAKEKTTGKESKISIAGSSGLSKDEIERAKQEAESHAEEDRLRKEGVETKNQAETMVYQVEKSLADLGDKVPATQKQPIVDKVDALKKAIADNDTSAMKSQTDELQKLFAEAYQHMAQAGGAPEGAAPGPEAAGAPEGAAEAPKDKGKVVDADFEVVDSDKKS

SEQ ID NO: 14774 - protein, 439 aa, Pyrococcus woesei
MNISVSMNKFDSKIKFVQLVFVDINGMPKGMEIPASRLEEAVTDGISFDGSSVPGFQGIEDSDLVFKADPDTYVEVPWDNVARVYGFIYKDNKPYGADPRGILKRALEELEKEGYKAYIGPEPEFYLFKKNGTWELEIPDVGGYFDILTLDKARDIRREIAEYMPSFGLIPEVLHHEVGKAQHEIDFRYDEALKTADNIVSFKYITKAVAEMHGLYATFMPKPLFGFPGNGMHLHISLSKDGENVFMGEEGLSEIALHFIGGILKHAKALIAVTNPTVNSYKRLVPGYEAPVYISWGYRNRSALIRVPAFWGKGARIEYRCPDPSANPYFAFAAVLKAGLDGIKHKIDPFAYVEENVYEMSEEKRKELGIETLPGSLGEALEELEKDKVVKEALGDAYKNFINYKWKEWESYLEYLEEKHMPKDTKKVTEWELERYFFL

SEQ ID NO: 14775 - protein, 236 aa, Arabidopsis thaliana
MVSMTTSSSSYGTFSTVFNSSRPNSSATFLVPSLKFSTGISNFANLSNGFSLKSPINPGFLFKSRPFTVQARAAAEKTVHDFTVKDIDGKDVALNKFKGKVMLIVNVASRCGLTSSNYSELSHLYEKYKTQGFEILAFPCNQFGFQEPGSNSEIKQFACTRFKAEFPIFDKVDVNGPSTAPIYEFLKSNAGGFLGGLIKWNFEKFLIDKKGKVVERYPPTTSPFQIEKDIQKLLAA

SEQ ID NO: 14776 - protein, 693 aa, Zea mays
MSSRSSLLPLPLLLLCAAAAAASSRNAELDALMELKAALDPAGRALASWARGGDPCGRGDYFEGVACDARGRVATISLQGKGLAGAVPPAVAMLPALTGLYLHYNALRGEIPRELAALPGLAELYLGVNNLSGPVPAELGRLGSLQVLQLGYNQLTGSIPTQLGQLNKLTVLALQSNQLSGAIPASLGDLPALARLDLSSNQLFGSIPSKLAEIPRLATLDLRNNTLSGSVPSGLKKLNEGFLYENNPELCGAQFDSLKACPNDGNDDGRTPRKPESTSVIKPQQIQKAADLNRNCGDDGGCLKPSTLPTGAVVAGTFVIVAGAAACGLSAFSWHRRQKQKIGSSSVEHLEGRPSLDRSKEAYERSAVSSLINVEYSSGGWDTSSEGSQSQHGVARLSSAAECGSPSVRFNLEEVECATQYFSDVNLLGKSSFAATYKGVMRDGTAVAVKSISKSSCKSEEADFLRGLRALTSLRHENLVGLRGFCRSRASGGCFLVYEFMANGSLSWYLDAKEGDAADAAAVLDWPTRVSIIKGVAKGIEYLHSSKPSLAHQSISADKVLLDHLYAPRLSGAGLHRLLADDVVFAALKDSAAMGYLAPEYATTGRSTDKQGDVYAFGVVVLQVLAGRRAVSPPHLQQDGGGRLDDLVDPRLRGRFSRAEAAKLAGVALLCTAEAPAQRPAMAAVLQQLGTSS

SEQ ID NO: 14777 - protein, 754 aa, Streptococcus thermophilus CNRZ1066
MTLNQLLQKLEATSPILQANFGIERESLRVDRQGQLVHTPHPSCLGARSFHPYIQTDFCEFQMELITPVAKSTTEARRFLGAITDVAGRSIATDEVLWPLSMPPRLKAEEIQVAQLENDFERHYRNYLAEKYGTKLQAISGIHYNMELGKDLVEALFQESDQTDMIAFKNALYLKLAQNYLRYRWVITYLFGASPIAEQGFFDQEVPEPMRSFRNSDHGYVNKEEIQVSFVSLEDYVSAIETYIEQGDLIAEKEFYSAVRFRGQKVNRSFLDKGITYLEFRNFDLNPFERIGISQTTMDTVHLLILAFLWLDSPENVDQALAQGHALNEKIALSHPLEPLPSEAKTQDIVTALDQLVQHFGLGDYHQDLVKQVKAAFADPNQTLSAQLLPYIKDKSLAEFALNKALAYHDYDWTAHYALKGYEEMELSTQMLLFDAIQKGIHFEILDEQDQFLKLWHQDHVEYVKNGNMTSKDNYVVPLAMANKTVTKKILADAGFPVPSGDEFTSLEEGLAYYPLIKDKQIVVKPKSTNFGLGISIFQEPASLDNYQKALEIAFAEDTSVLVEEFIPGTEYRFFILDGRCEAVLLRVAANVIGDGKHTIRELVAQKNANPLRGRDHRSPLEIIELGDIEQLMLAQQGYTPDDILPEGKKVNLRRNSNISTGGDSIDVTETMDSSYQELAAAMATSMGAWACGVDLIIPDETQIATKENPHCTCIELNFNPSMYMHTYCAEGPGQAITTKILDKLFPEIVAGQT

SEQ ID NO: 14778 - protein, 482 aa, Thermoanaerobacter tengcongensis
MRLVDLLKGVKHEIKGNPNVDISGVCYDSRKAKPKYLFIAIKGFKTDGLLYVEEAIKNGAVAVVTDRDISEYPGVTVVLVEDARAAMAKIASNFYNNPTSKLTLIGITGTNGKTSVTYMLKAILEQQNNKVGLVGTIQNMIGDRVIPTTHTTPESLDLQELFSLMVNEGVKYVVMEVSSHSLALHRVDSCDFDIAVFTNLSQDHLDFHESMEEYAKTKSKLFKMAKKASVINIDDKYSSMMIESSKGKVLTYGIKDFAYVMAKEIKNSLSGVKFKVQIQDKKEEISLKIPGLFSVYNALAAITVADFLGIPLRSVREALSHVTVKGRFEPVETGRDFYVFIDYAHTPDGIRNIMEALKEYEAGRKILVFGAGGDRDKSKRPLMGEVAGKYADFCILTSDNPRSENPKEIIAQIEEGIKKTNCPYVVIEDRREAIRYALSNAQKDDVIILAGKGHETYQIIGDKVIPFDEREIVKEILAESEK

SEQ ID NO: 14779 - protein, 207 aa, Primula vulgaris
MGRGKIEIKRIENSNNRQVTYSKRRNGIIKKAKEISVLCDAQVSLVIFANSGKMHEYCSPKTPLINILDAYQKQSGNRLWDAKHENLSNEIERVKKENDNMQIELRHLKGEDVQSLHHKELMSIESALENGLACVRQREMEIYRMARENFADKERVLEDENRSLTYQMHHLVMDIEGGELENGYNYQSQMPFSFRVQPIQPNLQERI

SEQ ID NO: 14780 - protein, 488 aa, Brucella melitensis
MKLKEIALFNELAPGEAGEVEITGITSDSRAVQRGFLFAALKGVKADGAVFAADAAKRGAVAIIAGKDTAIADAGVPVLHVDDPRHVLAIAAAQFYGKQPEVMVAVTGTSGKTSVASFTRQIWAYAGFPAANIGTTGVFSPTRSDYNSLTTPDPVELHRVLAELASEGVTHAAMEASSHGLDQRRLDGVRLAAGAFTNLGRDHMDYHATIDEYLGAKMRLFNALLPKGAPAIIFADDQFSAQAIEAATLAGCDVKTVGRKGNFIALKRVEHERFRQHVEVRIGEEIFEIELPLAGDFQVANALVAAGLAMVTGVPAAAAMRALALLKGAPGRLDLVGATEDGAPAYVDYAHKPEALENVLTSVRPFTTGRVIVVFGCGGDRDKGKRPIMGEIASRLADVVIVTDDNPRSEVPAQIRSEIMAAATGATEIGDRREAIFTAVSMMQPGDTLVVAGKGHEEGQIVGNITLPFSDHAEVAAALAARLEEHLK

SEQ ID NO: 14781 - protein, 1143 aa, Lotus japonicus; identical to SEQ ID NO: 7944

SEQ ID NO: 14782 - protein, 639 aa, Methanosarcina mazei Go1
MDGYNIFLALLAVYIIGLVTVGWYFNKKQKSITDFWLAGRKVGPGALGFSAAASWLTAGGILAVIGYFILQGMGSIWAFVAPNIVALLVIAVLVGKIKNLPAITQPELLEQRYGSSVRWPVALIITVVMILFAVADVTGLSLVLQVFYGLDPLYAAAIVAIAVSLYVTLGGLSAVVWTDVIQFSFLSLFTIAMAFAAVGTVADGGLNTPAISSSELFGSLPDVWWNPLSIGLPMVLIFCLAIIPGWITEQDPWQKVWAARDAKSARTGMIIGSLMITIVFSACAVIAIALSSIYPEIPQMGFPAGMAQAEPALLAFVSERFASAPLIVAISAIGLAAASMSCADTFATSGASCISRDIYQRYIKPDATMKEMLIVNRVSVLIIVLAATAGSFIIPNIIDAIHIATFIASASYFFPLMGGLYWKRATKEGAFAGMVIGFIVQVALVVLDLVKTPPLAPSYLETIHPVLMSHGVIVGMSLSAIAFFGVSLMTKPSSRVNLAPFFEEEAEELARYETGEINEADPSYSAFLKNVNEKVAGERTHLQLNLRTSGTLSWHELVEKLKSSSPAWVTPTGLDSVYRLTHGDMLACVAVTRGSGEQDIWLKAEPKIETVGRQRKELFTAYEELKKVLDQKGVKLDFY

SEQ ID NO: 14783 - protein, 472 aa, Neisseria gonorrhoeae
MSIKNVVKLIEESEARFVDLRFTDTKGKQHHFTVPARIVLEDPEEWFENGPAFDGSSIGGWKGIEASDMQLRPDPATAFVDPFYDDATVVLTCDVIDPADGQGYDRDPRSIARRAEAYLKSSGIGDTAYFGPEPEFFVFDGVEFETDMHKTRYEITSESGAWASGLHMDGQNTGHRPAVKGGYAPVAPIDCGQDLRSAMVNILEGLGIEVEVHHSEVGTGSQMEIGTRFATLVKRADQTQDMKYVIQNVAHNFGKTATFMPKPIMGDNGSGMHVHQSIWKDGQNLFAGDGYAGLSDTALYYIGGIIKHAKALNAITNPSTNSYKRLVPHFEAPTKLAYSAKNRSASIRIPSVNSSKARRIEARFPDPTANPYLAFAALLMAGLDGIQNKIHPGDPADKNLYDLPPEEDALVPTVCASLEEALAALKADHEFLRRGGVFSKDWIDSYIAFKEEDVRRIRMAPHPLEFEMYYRL

SEQ ID NO: 14784 - protein, 444 aa, Vibrio vulnificus YJ016
MSVYYTLCFLSAAAMLIAFVNSKIGKMQTTIAITAGSMVLSLLILIAGQNNWFHLTEIATQTMSSIDFEDFLLKGILGFLLFAGGLGIKLPNLKDQKWEITVLALGATLFSTFFIGFALYGICQLIGIQFDLIYCLLFGALISPTDPIAVLAIVKKLKAPRRISTQIEGESLFNDGFGLVIFVTLFTIAFGHETPTVGSVTMLFIQEAIGGILYGFALGLLFHYLICATDDHSMELLLTIGIPTAGYAFAEVLHVSGPLAMVVSGIMIGNWTRFIGFSKESEDHLDHFWELVDEFLNGVLFLLIGMSMLLFKFHQEDWILMAIAIPLVLIARYLSVFLSYIGFKRFRQYNPWSIKILTWGGLRGGLALAMALSIPSGIWVIPDKLIDVKEIILVMTYAVVVFSILVQGSTITPMIEKAKQSEAEFEAKQSSVTAPEGKTESISS

SEQ ID NO: 14785 - protein, 222 aa, Glycine max
  misc_feature (85)..(85): Xaa can be any naturally occurring amino acid
KNILFAILGSFYSPGTSVATSGVLLGLILLGRAAFVFPLSFISNLAKKSPNEKISFRQQVIIWWAGLMRGAVSIALAYNQFTMSXHTSLRSNAIMITSTITVVLFSTVVFGLLTKPLIKLLLPHTPHHKESSITIITDPSTPSPKSVTIPLLGSAQESEVDIDGHDIHRPSSIRALLTTPTHTVHRLWRKFDDAFMRPVFGGRGFVPVEPGSPTERNGHQWR

SEQ ID NO: 14786 - protein, 472 aa, Magnetospirillum magnetotacticum MS-1
MTMSDDVKKVLELIKENDVKYVDFRFTDPRGKWQHTAQHVSTVDADMLNEGIMFDGSSIAGWKSINESDMILKPDASSAVMDPFAAQSQLIINCDIVEPATGQLYDRDPRSIAKRAEAYVKSSGVGDATYFGPEAEFFVFDDVKYELGMNKGYYELRSEDGVEAQGRDFAEGNLGHRPGVKGGYFPVPPVDGHVDMRAEMLTVMGEMGLPIEKHHHEVASSQHELGIKFGSLVQAADWIQIYKYVVHNVAASYGKTATFMPKPIYGDNGSGMHVHQSIWKAGKPLFAGSGYADLSDTALYYIGGIIKHAKAINAFTNPLTNSYKRLIPGFEAPVLLAYSARNRSASCRIPYSASPKGKRVEVRFPDPGANPYLAFSAMLMAGLDGIANKIHPGDPMDKNLYDLPPEELKLVPTVCGSLREALESLRANSDFLCKGDVFSKEFIESYIDLKYEEVYRFEHTPHPVEFQMYYSV

SEQ ID NO: 14787 - protein, 434 aa, Psychrobacter arcticus 273-4
MLESADQTDDLIDSVADESVLNNESAVINTDIPAEVAQVSLNAISPETLKTFVTLIDLVRREYVDTVNDEELFNNAMSGMLTKLDSHAEFLDAEAYENLRAFTEGDVGDIGIKVEYQSALGYWVITEVLDDSPADKKGIAVGDYLHQVDEFKLGEDEESNDIEQLLTGIAGTQVDVVTSKAGRRKHITTLQRNSSHPQIIETRFVDGMAVVRLPAFQNNSREKLLQSLIDLNKPVTGILLDLRDNPGGVLASAVSVASLFMTDTDVVQIKSRQADSRTLSTKGAALFKSLPVVVLQNRYSASAAEVLTSSLQAQKRATILGEISYGKGSVQSVIPLNDAQAVKLTVANYMTALGKKIDGIGVEPDVALSGSESTWEEQALNLLRKKALTSGIQFVYRAALEDLSKKKSDPKNSVIKNNTVINNVIEKPTFKEKS

SEQ ID NO: 14788 - protein, 188 aa, Glycine max; identical to SEQ ID NO: 438

SEQ ID NO: 14789 - protein, 183 aa, Xanthomonas campestris pv. vesicatoria str. 85-10
MSQTLYDIPVTRIDGQPTTLADYRGKVLLVVNVASKCGLTPQYEGLEALYRDKRMQGLEVLGFPANDFNAQEPGSEAEIAQFCQLTYDVTFPMFAKIAVTGDQAHPLYRALTSTHPHTTGDGPMREKLAGYGIAPNPAPGVVWNFEKFLIGRDGKIVDRFAPDIPADDARLRAAVDAALATHA

SEQ ID NO: 14790 - protein, 757 aa, Haemophilus somnus 2336
MKIQHLIKQHQLGLLFQQGSFGLEKESQRVYQDGSVVTTEHPKCFGNRSYHPYIQTDFAESQLELITPPNKNLEDSLRWLSAIHEVVLRSLPEDEFIFPLSMPAGLPSDELIKVAQLDNPEDVAYREHLVQSYGKNKQMVSGIHYNFQLAPELIQTLFDLQQEQKSAVDFQNNLYLKMAKNFLRYQWVLLYLLSATPTVESNYFKGSSPLGKGEYVRSLRSSKYGYVNDPEVIVSFDSLEQYAESLEHWVKSGKLIAEKEFYSNVRLRGAKKARDLIQNGIKYLEFRLFDLNPFEQYGMSLADARFIHHFVLLMIWLDEMPDQQGVELGRSRLAEVALENPLAQTAYREEGEWLLNQLISMLQSIGADQSAVSFVREKLAQFADPGLTLCGRLVQEIEQKGGYQKLGAELAKQYKENAFERFYALTAFDNMELSTQALMFDLIQQGISFEILDERDQFLRLQFGEHVEYVKNGNMTSKDSYISPLIMENKVVTKKVLEKAGFNVPQSQEFTSVKQAIVGYSLFEKRAVVIKPKSTNYGLGITIFQQGVNNREDFAKAVEIAFREDKEIMVEDYLVGTEYRFFVLGEETLAVLLRVPANVVGDGIHTVAELVAQKNAHSLRGDGSRTPLKKIALGDIEQLQLKEQGLTVESIPAKDQIVQLRANSNISTGGDSIDITDEMHLSYKQLAVGIAKAMGAAVCGVDLIISDLKEPAQPDLSSWGVIEANFNPMMMMHIFPYAGQSRRLTRNVINMLFPEVK

SEQ ID NO: 14791 - protein, 638 aa, Thiomicrospira crunogena XCL-2
MGKIIGIDLGTTNSCVAVMEGKETKVIPNAEGARTTPSIVAYADDGEVLVGDSAKRQAVTNPENTLFAIKRLIGRRADDAVVEKDKDMVSYKIIAADNGDAWVQVGDKKLSPQEVSARTLMKMKKTAEDYLGHEVTEAVITVPAYFNDSQRQATKDAGKIAGLEVKRIINEPTAAALAYGMDKVKADSKIAVYDLGGGTFDISIIEVADLDGEKQVEVLSTNGDTFLGGEDFDNVIVDYIATEFKKDQNVDLKLDKLALQRVREAAEKAKIELSSREQTDINLPYVTADATGPKHLNMKITRAKFESLIEGLVQRSIDPCKTALKDAGLSASEIDDVILVGGSTRVPMVQAAVKEFFGKEPRKDVNPDEAVAMGAAIQGGVLSGDVNDVLLLDVTPLSLGIETMGGVMTKLIEKNTTIPTRKSQTFSTAEDNQSAVTIHVLQGEREVSSGNKSLGQFNLDEIPPAPRGTPQIEVTFDIDANGILNVSAKDKATNKEQHITIQASSGLSEDEIEAMVKDAEAHAAEDAKLKELVEARNQADAMVHGTKKLLDEQGEGVEAAEKEAIEKAIADLEEAIKGDDKAVIDEKTQALATASQKLAEKAYAQPGAEAGAEQQGSANNADDDIVDAEFEEVNDDKK

SEQ ID NO: 14792 - protein, 940 aa, Francisella tularensis subsp. holarctica
MKILSTNVYVGPNIYANFPVIRHEIDLGVLENWPSAKIGDKFIDQLVESLPGLQEHGCSYREKGGFIRRLREDEGTWMGHIWEHVILELQSMAGSDVTFGRTRSTGEVGHYNMVYEYKQKDVGLRAMELARDLLISILPENLKKQVEFANEYFDFEYEKVKFIKFAQSKEFGPSTASLVEAAKKRDIPYIRLNDQSLVQFGYGKYQQRIRATITGKTTSIAVDLSCDKEQTNTILSSLGLPVPKQRMVTTEEGAVRSAKILGFPLVVKPLDGNHGRGISINLKTIEEIKEAFVEANKVSRYVLLEQYVIGFDHRMLVVDGKLIAVAKRVPGHVVGDGKHTIAELVEIVNQDPRRGIGHEKVLTKLELDYQARTLLRAAGYDENTILKDGEVFYLRSTANLSTGGTAIDVTDIVHPDNRDMAERAIKAIGLDVGGVDFLIDDISQSYHDIGGAICECNAAPGFRMHVAPSEGKPRDVAGAVIDMLIPREYGNARIPIAAITGTNGKTTTSRMVAHMWKNAGKVVGLTTTDGVYINGKLTVAGDTTGPASAQMVLKDPSVEMAILETARGGLLRSGLGYDYCNVGACLNISADHLGLKGINTLEDLAKVKSIVVEAAKDVAVLNADDPNVLKMSAKVTAKHIFYVTMNPEHALVKQHIRAGGKACIIEKGVNGDMITIFDNHIHIPVLWTHLIPATMEGKAIHNVQNSMFAIAICYSMGMSLDDMRDGLRTFVTSFYQAPGRMNWFEEHPFKVLMDYGHNPAAIKLVSQMIMNMEFAGKKICVLASPGDRRDEDIAELAKTATPYYDYFICKRDDDTRGRAPDEVPRILKEALIEAGISADNIEIIESEKEAVDAALNMAEEGDLVVIFADKLKRTWKQIIYFNKDQEFDGKDKKLEKQEMFSASVIAQTPSLSEEISQVIKAGIISDDSGVRVVYHEEDND

SEQ ID NO: 14793 - protein, 561 aa, Francisella tularensis subsp. holarctica
MIPEGYSRRLVGPNLFFKETGTVLDVPLVDNRDELTKLFYQEANRILLALDWQDIKITHKFFNNGVRFAMTAPVDITMPACDVIDFIWLSTREGFETGVFKTIEEAKRKLIPLIDEDKNLKYRKLYELAKSKGFNAFRDKNKAFIGSGRGCYEFDLDNDSIDDIPWQDIYDIPAVIVTGTNGKTTTVRLTDYICRVAGKLTGYTSTDWVKVNDQLIDEGDYSGPTGHQFVLTNKKVEVALLESARGGLLKRGLIETYVNAAAVTNVSADHLGEDGIETVAELAEAKSIVFRALGQGSHGIINLDNSYMKERFDKLSCAKIVVTQNPQQHDMKYYLSKADYACIVEDGNFVWVEANSKKVILPVIEAPLTVRSFAKHNIENAMIAIALSFKLGISFDVIEKALRSYSNDPKVNRGRANVFEWDNKVAILDYAHNEAGMEALLNMVKAYDKGGKKYLMIGTTGDRKYLISGINDIILKHNLDFIVIKETEKYLRGAKPLELPLLIRKDLADKGYDISNTYISHGEIDGVKFLVEKLESNDMAIFCCQAELEEVANYLEECAKK

SEQ ID NO: 14794 - protein, 167 aa, Streptococcus pyogenes MGAS8232
MPNLYDFTVKAQNGNDLSLAAYKEKVVLIVNTATKCGLTPQYQALQALYDTYHDKGFEVLDFPCNQFLNQAPGDAEEINHFCSLTYHTTFPRFAKIKVNGKDADPLFTWLKEEKSGPLGKRIEWNFTKFLIDQNGQVIKRYSSKTDPKLIEEDLKALLDKIQCYHHL

SEQ ID NO: 14795 - protein, 613 aa, Listeria monocytogenes
MSKIIGIDLGTTNSAVAVLEGGEAKIIPNPEGARTTPSVVGFKNGERQVGEVAKRAAITNPNTISSIKRHMGTNYKETIEGKDYSPQEISAIILQYLKSYAEDYLGETVDKAVITVPAYFNDAQRQATKDAGKIAGLEVERIINEPTAAALAYGMDKTETDQTILVFDLGGGTFDVSILELGDGVFEVHSTAGDNELGGDDFDKKIIDYLVAEFKKDNGIDLSQDKMALQRLKDAAEKAKKDLFGVTSTQISLPFITAGEAGPLHLEVTLTRAKFDELTHDLVERTIAPTRQALKDANLSASDIDQVILVGGSTRIPAVQETIKKELGKEPHKGVNPDEVVAMGAAIQGGVITGDVKDVVLLDVTPLSLGIETMGGVMTTLIERNTTIPTSKSQTFSTAADNQPAVDIHVLQGERPMAKDNKTLGRFQLADIPPAPRGIPQIEVSFDIDKNGIVTVRAKDLGTGKEQNIVIKSSSGLTDEEIEKMVQDAEANAEEDKKNKENAELRNNADQLVFTVDKTLKELEGKVEEEEVKKAEAARDELQEALKGEDFDAIKEKTESLNEIVQNLSVKLYEQAAAEQQAAGGAEGQEAPQNDDVVDAEFEEVNDDDKENK

SEQ ID NO: 14796 - protein, 279 aa, Arabidopsis thaliana
MEHQGWSFEENYSLSTNRRSIRPQDELVELLWRDGQVVLQSQTHREQTQTQKQDHHEEALRSSTFLEDQETVSWIQYPPDEDPFEPDDFSSHFFSTMDPLQRPTSETVKPKSSPEPPQVMVKPKACPDPPPQVMPPPKFRLTNSSSGIRETEMEQYSVTTVGPSHCGSNPSQNDLDVSMSHDRSKNIEEKLNPNASSSSGGSSGCSFGKDIKEMASGRCITTDRKRKRINHTDESVSLSDAIGNKSNQRSGSNRRSRAAEVHNLSERVLHRFVYIIYNI

SEQ ID NO: 14797 - protein, 578 aa, Alternaria alternata
MVFAAPCWVPPLPSDLPDSTTLEEFIFCQVKDSQTRSELDRSILICGTQGKEYTVQESMERTGRLAQGLSAWLDWPQKPSEEDWKVAAIFNINCVEFFSISHAIHRLGGTVSAINASSTADELEAQLRLSNAQAIFTCNTLLKIAMKASQKVGIPLANIFLTDAPGSYRPDDVYPFQEIDNIVRTARSSLPLLQLGRGQGSSTPAYICFSSGTSGAQKPVLLSHQGIIANIVQINTFEKFRQKGPNVSLCILPLAHSYGLVCVAYNALYRGDRLAVLPSSDVEDLLSIVEKLRINTLYLVPTLLSRILSGGKAGGHDLSCVKEVYTGGAPLHPMLGEHILRHHPTWKTKQCYGATEAGTAVSVTSDCDLWPGSVGCLLPGVQAKIIRSDGSETTKHDESGELWVSSPSLAIGYLSNPLATEATFTVDNTGRTWLRTGDEAKICLSPNGNEHLFIVDRIKDIIKVKGFQVAPVELEQLLLSNDFVEEVAITSRQDKRGEERPQAFVVRTHEGLKEPQDAVSESLQALVKARKARYKWLHPHVIFVDSLPKTTSGKIMRRALRNMCPANSEVNGRLSSKI

SEQ ID NO: 14798 - protein, 441 aa, Rickettsia prowazekii str. Madrid E
MLLRFIIALFLSINCAIEGKETENKISNQEAYKQFQDVFERIEKDYVQVPDRQKMIDEAINGMLNSLDPHSNYYTDEDLEDIFTFTKGEFGGIGVEIMYDSGAIKIISSIDDLPAFKAGLKGGDYIVGVNDELVSTLGPNKAIKEMRGTPGTKVRLLIIKEEEAKPQELELTREIVKIKPIKAHLEKNNIAYIRITTFNESTISELKAAVKKLKTESKDNLKGIILDLRNNAGGILDQAIAVSDYFIDSGVIVTTKGRTTSSNSETKANEFSLKAPKVPMIVLINGNSASASEIVAGALQDHKRAIILGTKSFGKGSVQALTQINSRAAVKLTISKYYTPSGRSIQAEGIEPDILIEPAKVEYPEVKKIDKRFSESSLKNYLKNDNAKNKDSNKETKTKNNKQEESELSELYKKDYQFARAYDVITGLIINTNLETQGKAK

SEQ ID NO: 14799 - protein, 661 aa, Zea mays
  misc_feature (220)..(220): Xaa can be any naturally occurring amino acid
  misc_feature (243)..(243): Xaa can be any naturally occurring amino acid
MASARLVALAAFLLLLLFALGPGEARAADDGEVRALLALGAALDPTGRLLPSWAPGRDPCAPAPSGGFEGVACDARGAVANVSLQGKGLAGTLPPAVAGLRSLTGLYLHYNALRGGIPRELAALAALTDLYLDVNNFSGPIPSEIGAMASLQVVQLCYNQLTGSIPTQLGNLTRLTVLALQSNRFNGAIPASLGDLPLLARLDLSFNRLFGSIPVRLAQXALPSLVVLDVRNNSLTGSVPAGXGFQYGNNSDLCGAGLPALRPCTPADLIDPDRPQPFSAGIAPQVTPSDGRGNGRVPSTRALAAVVVVAVALLLTTGVGLFALSWRRWHRQKVAGASPSTISGGRCSTEVVPSAAKASSARKSASSALASLEYSNAWDPLADARGGLGFVSQDVQLAQSLRISTEEVESATRYFSELNLLGRHGKKAGGLAATYRGTLRDGTSVAVKRLGKTCCRQEEADFLSGLRLLAELRHDNVVALRGFCCSRARGECFLVYDFVPNGSLSQFLDADTTAGGSGRVLQWSTRISIIRGIAKGIEYLHSTRTNKPALVHQNISADKVLLDYAYRPLVSGCGLHKLLVDDLVFSTLKASAAMGYLAPEYTTVGRLSEKSDVYAFGVIVLQGSYSAAEAAMLAKIGSACTSEDPDQRPTMAELLQELDTI

SEQ ID NO: 14800 - protein, 617 aa, Zea mays
DGRVTAVSLQGRGLSGTLPPAVAGLRRLQGLYLHYNGIKGPIPREIGKLSELTDLYLDVNHLTGPVPVEIAAIANLQVLQLGYNQLTGSIPPQLGNLNKLTVLAMQSNQLAGAIPATLGELTQLRRLDLSFNSLFGSIPSKIAEVPLLEVFDVRNNTLSGSVPVGLRRLNGGFQYMNNKGLCGAGFSLLELCLSSEDGLKPSKPEPFGPDGTVKTRQVPQSANPDGCSGASCSKSANASQGVLIVAVVAAVIGAAFCGLFAFSWYRRQKQKIGSSLEVSDSRLSTDHFQQKEACRRSASPLISVEYSNSWDPLSAGGAGVGSPGQVVGDSFRFNLEEVECATQYFSDVNLLGKSGFAAATYKGILRDGSVVAVKSLSKTSCKQEESDFLRGLKMLTLLQHDNLVSLRGFCCSRGRGECFLVYDFMVNGCLSRYLDVKDGSSGATVLDWPTRVSIIRGIAKGIEYLHSKKGSKPPVVHQNISADKILLDHHLAPRLSVPGLHKLLADDVVFSALKASAAMGYLAPEYAATGRFTDKSDVFAFGVVVLQVLTGRRDVSQLKVGAAAVSDLGGLVDANLDGAFSRTEAARLAAVAAYCTSETPGQRPTMEAVVQQLSSTQ

SEQ ID NO: 14801 - protein, 275 aa, Geobacillus kaustophilus HTA426
MELWFTEKQTEHFGITARIIRTLHTEQTPFQKLDMVETAEFGNMLILDGMVMTTQKDEFVYHEMVAHVPLFTHPNPENVLVVGGGDGGVIREVLKHPSVKKATLVEIDGKVIECSKTYLPEIAGKLDDPRVEVKVDDGFMHIAKSENEYDVIMVDSTEPVGPAVNLFTKGFYAGIANALKEDGIFVAQTDNPWFKADLIRNVYRDVKEIFPITRLYTANIPTYPSGLWTFTLGSKKYDPLAVSDDRFHDIETKYYTKELHKACFVLPKFVADLVK

SEQ ID NO: 14802 - protein, 550 aa, Chlamydomonas reinhardtii
MEDAAPYWRRVGTPSCSSDLRLLSSISLTASTVPQSNAASVATTTFGGCLGPFDDSADVDGDTPGPDDGRSSAGTDADGGGRAGAAGHVCGASLDVNVGADDDDDGIDLDDEERDTFGSSSNCPSAAAEGAMRRTANLDRYSSGRTQSTSVSGYSKLLSSRVSSAGLSLGHTHSVATSAGGVSLAATSGSVMTLDSGLRRHGLSDWLARFRDGEVDEGLGLGIDCPATRAAILAALPDFDAAAPAAGAAAAGLAVGGLDSPGPLLVDYFSPASRAIPAALAPYRILTHFHADHYKGLTKSFSGGVVLASPVTARLVAERLRLPAARLRTLPMDTPVTVDGVTLTLVDANHCPGAAMFIAEVLPPPPPTQQMQQQQQAGAAGHVKQHPALQALVGRRCTLVLDTTYADPAYVFPPQQDVLDAVLTAVRAEAFNKRVGDRAGVGAEARDAGCRLCAVYCSKEKAATLSACGLAPRYSSLITTNHLEANIHAVPLFKVTLDGLAAILSQYRGRYSAVIGFSVPYSEHSSFSELRSFVRWLQPGRIIPSVNADG

SEQ ID NO: 14803 - protein, 679 aa, Aspergillus nidulans FGSC A4
MSSTVAPVLPQGAGYGVVVGIGLFFALLMACVSYLQNRYTQYSTKTSEEFNTASRSVKPGLIANGVVSAWTWAATLLQSSTVAYEYGISGPFWYAAGSTVQIFMFSVLACKVKQNAPYCHTFLEIVYHRYGQATHLVFVFFALMTNTLVASQLLLGGSAVVTALTGMNVYAAVFLIPLGVCIYVVLGGLRATFLCDYTHTVIVMVIILYFMFDVYTRNELIGSPSQMYDLLKTAAVERPVEGNIEGSYVTLKSNSGLVFGVIELCTGLSTVFLDQGYWQRAIASRPTTAVRAYIMGGLSWFAIPFGFATTLGLAAVALTNNPRFPTYPNNMTSSQISAGLAAPFGATALAGKGGATALLLTLFMAVTSSASSQLIAVSSILTFDIYKTYLKPKATPQQLIFVSHIMICIFGVVMACVACLWNGIGIDLGWLFLVMGLLIGGAVFPAAFTILWKGQTRLGAVCGAIGGLAAGLIAWLVEAKVYYGELTVATTGANYPTLAGNMASVLTGLILTVGISLLKPDDFNWEKTRAINAPATYNPEPVIESKPPMAIKTTRVDQSEKTADSAVIEDPKALQKTFVMAVVVSAVLSLIMDIIIPIPMFLSHYIFSKGFFTAWVVISFLWVFAAFFLCGILPVVETRRFWGMLFKRMFGKKVVLDAQVQQGQSSEDDAQRASKDSIA

SEQ ID NO: 14804 - protein, 480 aa, Bacillus subtilis subsp. subtilis str. 168
MNQKIMAVIAAGSMLFGGAGVYAGINLLEMDKPQTAAVPATAQADSERDKAMDKIEKAYELISNEYVEKVDREKLLEGAIQGMLSTLNDPYSVYMDKQTAKQFSDSLDSSFEGIGAEVGMEDGKIIIVSPFKKSPAEKAGLKPNDEIISINGESMAGKDLNHAVLKIRGKKGSSVSMKIQRPGTKKQLSFRIKRAEIPLETVFASEKKVQGHSVGYIAISTFSEHTAEDFAKALRELEKKEIEGLVIDVRGNPGGYLQSVEEILKHFVTKDQPYIQIAERNGDKKRYFSTLTHKKAYPVNVITDKGSASASEILAGALKEAGHYDVVGDTSFGKGTVQQAVPMGDGSNIKLTLYKWLTPNGNWIHKKGIEPTIAIKQPDYFSAGPLQLKEPLKVDMNNEDVKHAQVLLKGLSFDPGREDGYFSKDMKKAVMAFQDQNKLNKTGVIDTRTAETLNQQIEKKKSDEKNDLQLQTALKSLFVN

SEQ ID NO: 14805 - protein, 1250 aa, Glycine max
MEASVLLGNSYGVVARVAVAGLRGGVMGSAISPFEAYLSRSWRAVELIKFESGTTTLYFVDNHHMTIKKGSFSDVRVRSRKATLSDCSFLRTGIDICVLSASQGNDNSDESSANHVWLDAKINSIQRKPHNPECSCQYYVNFYVNQGSLGTELRTLRKEVKVVGINEIAILQKLERNTCQHKYYRWESSEDCSKVPHTKLLGKFISDLSWLVVASAIRKVSFCARSVENNIVYQILGSDATTSSLYMDSEISVVNFKVNEDGMQMPVIHLVDLFETDTNTSGDKHDSHYDEVPSSYGFEGLRRSKRRNIQPERYSDCGNVSEIKVGNVRTWPYKLNKRKDDDGGGEESLPLAQENSDNSQKVNELSSCREIIVYHGRNETLELKSGEANQTQLASVPLLQEGDSLALEHHHLNDNVTRRSDAYYSTPKLKRKRLVDLEADVDFDPGREGINSNKGVSEKRHGSSWYSRSRSHAAEHSYKDRSLNATAYKEMIDSYLKDVNRTPTTEEPPVMDQRKEIGNFGQKKEAEIPEREDEEQISEIDMLWREMEMALASSYLEETEGSNSANFAKTTEESNRTCPHDYRLSEEIGIYCYKCGFVKTEIKYITPPFIEMQRSVRHQEEKQCNGKDTKEKASKDDDFHLLSTHAPTDEHNSMEHDNVWKLIPQFREKLHDHQKKAFEFLWQNIGGSMEPKLMDAESKRRGGCVISHAPGAGKTFLIIAFLVSYLKLFPGKKPLILAPKGTLYTWCKEFNKWEISMPVYLIHGRGGTQKDTEQNSIVLPGFPNPNKDVKHVLDCLQKIKLWQEKPSVLVMSYTAFLALMREGSEFSHRKYMAKALREGPGILILDEGHNPRSTKSRLRKGLMKLKTDLRILLSGTLFQNNFCEYFNTLCLARPKFISEVLDTLDPITRRKSKTVEKAGHLLESRARKLFLDKIAKKIDSGIGNERMQGLNMLRETTNGFVDVYESENFDSAPGLQIYTLLMNTTDKQREILPKLHTRVDECNGYPLELELLVTLGSIHPWLVKTTSCANKFFTADQLKQLDKYKYDMKAGSKVKFVLSLVFRVMQREKVLIFCHNLAPVKLLIELFEMFFKWKKDREILLLSGELDLFERGKVIDKFEEHGGASKVLLASITACAEGISLTAASRVIFLDSEWNPSKTKQAIARAFRPGQEKMVYVYQLLVTGTLEEDKYKRTTWKEWVSSMIFSEAFEENLSHSRAVNIEDDILREMVEEDKSKTIHMILKNEKASTN

SEQ ID NO: 14806 - protein, 1373 aa, Schizosaccharomyces pombe
MEPEHSNYDLKNHPTSVQESTLNGSAVTDPQFGNTTNSLPSMNGLLNHENSFASQQSLSSSAFDDSEIVTSTANSTVVSSALSTPKIDDAQNSDDVRVDGTRRSSRAKRPVYRDFSYTEIDEHEIPIPKKRKSKPAPKQKKSVASDDEDAYDKRHRFSINSASGTEIRTSLRSSKGKSVNYNEQEFYDDFEDEEEEVEEQVEEEYEPIIDFVLNHRKRADAQDDDPKSSYQYLIKWQEVSHLHNTWEDYSTLSSVRGYKKVDNYIKQNIIYDREIREDPTTTFEDIEALDIERERKNMLFEEYKIVERIVASETNEEGKTEYFVKWRQLPYDNCTWEDADVIYSMAPNEVYQFLQRENSPYLPYKGVFYNTRPPYRKLEKQPSYIKGGEIRDFQLTGINWMAYLWHRNENGILADEMGLGKTVQTVCFLSYLVHSLKQHGPFLIVVPLSTVPAWQETLANWTPDLNSICYTGNTESRANIREYEFYLSTNSRKLKFNILLTTYEYILKDKQELNNIRWQYLAIDEAHRLKNSESSLYETLSQFRTANRLLITGTPLQNNLKELASLVNFLMPGKFYIRDELNFDQPNAEQERDIRDLQERLQPFILRRLKKDVEKSLPSKSERILRVELSDMQTEWYKNILTKNYRALTGHTDGRGQLSLLNIVVELKKVSNHPYLFPGAAEKWMMGRKMTREDTLRGIIMNSGKMVLLDKLLQRLKHDGHRVLIFSQMVRMLNILGEYMSLRGYNYQRLDGTIPASVRRVSIDHFNAPDSPDFVFLLSTRAGGLGINLNTADTVIIFDSDWNPQADLQAMARAHRIGQKNHVNVYRFLSKDTVEEDILERARRKMILEYAIISLGVTEKSKNSKNDKYDAQELSAILKFGASNMFKATENQKKLENMNLDDILSHAEDRDSSNDVGGASMGGEEFLKQFEVTDYKAEDLNWDDIIPEEEMERIEEEERMLAAQRAKEEERERREEEERENDEDHPSRTYKRTTKSITKRQQRREEMVREKEIRLLYRAMIKFGLVDERFDTIVKEAELQATDPKRIYSLSADMVKACDEAVERLGADDTKNKQPRKAILIEFKGVKNINAETVTLRVKDLTHLHRAYKGLDPLKQIIGYPIRSVHSWNCSWGIKEDSMLLAGINKHGFGCWQAIKNDPDLGLHDKIFLDEAKNDKESRYVPSAVHLVRRGEYLLSVVREHPDLFVVKTDQPTKRKYNRKAPTKSSTRQTTLDGSISNTKKSSRTKKKKEEETNRGDETSPEGTVGEDEVEEEPRQAEPPKRALRSNSGKAASNKRTTRNSMKTHSAMDTLTAVAALDAELDNMSNEKAKEEVDHVKSENGESVNEPNTEDLSLETEENTTVSDISPLVKNEA

SEQ ID NO: 14807 - protein, 614 aa, Rhodococcus sp. RHA1
MARAVGIDLGTTNSVVSVLEGGEPVVVANAEGSRTTPSIVAFAKNGEVLVGQPAKNQAVTNVDRTIRSVKRHIGTDWNVEIDGKKYTPQEISARTLMKLKRDAEAYLGEDITDAVITVPAYFEDAQRQATKEAGQIAGLNVLRIVNEPTAAALAYGLDKGDKEQTILVFDLGGGTFDVSLLEIGDGVVEVRATSGDNHLGGDDWDERIVTWLVDKFKAQNGIDLTKDKMALQRLREAAEKAKIELSSSQSTSINLPYITVDADKNPLFLDEQLSRSEFQKITSDLLDRTRAPFQAVIKDSGIAVKDIDHVVLVGGSTRMPAVSDLVRELTGGREPNKGVNPDEVVAVGAALQAGVLKGEVKDVLLLDVTPLSLGIETKGGVMTKLIERNTTIPTKRSETFTTADDNQPSVQIQVFQGEREIASHNKLLGSFELADLPPAPRGVPQIEVTFDIDANGIVHVTAKDKGTGKENTIKIQDGSGLSKEEIERMVKDAEAHAEEDKARREEAEVRNQAESLVHQTEKFIKDNEDKVPADVKEKVEAAIKEANDALAGTDIAAVKTAVEKLATESQALGQAIYEASAAEEAANTDGSGANGADDVVDAEVVDEPSDSEKK

SEQ ID NO: 14808 - protein, 158 aa, Prochlorococcus marinus str. NATL1A
MSVNISKVEVFSFKNQKITFDHYKGNVLLIVNVASKCGFTKQYKALQYLQDKYESKGFKVLGFPCNDFGNQEPGQLEEIKEFCSTTYGVTFQLFQKVHAKGKTTEPFTTLNQLSPSGDVEWNFEKFLINTEGDAVLRFKSSIEPDSPEITQAIEKLLD

SEQ ID NO: 14809 - protein, 552 aa, Oryza sativa; identical to SEQ ID NO: 14582

SEQ ID NO: 14810 - protein, 470 aa, Haemophilus influenzae 86-028NP
MSNAIASVFKLIEENDIRFVLLRFTDIKGKEHGVSIPVSLVDEDMFEDGKMFDGSSVEGWKTINKADMLLMPIAETAVVDPFAQIPTLSIRCSVYEPTTMQSYDRDPRSIAIRAENYMRSTGIADQAFFGPEPEFFLFDDVRFNVSMNKASFSIDDIEAAWNTNKKYEEGNNAYRPLKKGGYCAVAPIDSAHDIRSEMCLILEEMGLVIEAHHHEVATAGQNEIATKFNTLTLKADETQIYKYVVQNVALEHGKTACFMPKPITGDNGSGMHCNMSLSKDGKNIFQGDKYAGLSETALYYIGGIIKHAKALNAFTNPSTNSYKRLVPGYEAPVLLAYSASNRSASIRIPAVTNPKAIRVEARFPDPLANPYLAFAALLMAGLDGVVNKIHPGDAMDKNLYDLPPEELKDIPAVASSLEEALNSLEKDYEFLTQGGVFAKDFIDAFISIKRKEVERLNMAPHPVEFEMYYA

SEQ ID NO: 14811 - protein, 226 aa, Glycine max; identical to SEQ ID NO: 13092

SEQ ID NO: 14812 - protein, 285 aa, Xanthomonas axonopodis pv. citri str. 306
MSANDNWYIEHFQPTGSAIGFRISGKLDEVQSPFQKIEIYQTTDWGKLMLIDGAVMLTSRDNFFYHEMISHPALFTHPAPKRVVIIGGGDCGTLREVLKHPGVESATQCDIDEQVTRMSEKYFPELCDSNHDARAELLFDDGVAYMANCQAGSVDIVIVDSTDPVGPAEGLFNKAFYESCFKALKDDGILVQQSESPLALLDLINEMRTEMGKAGFQSFKTLPFPQPCYPTGWWSVTMASKQAKADFAFRQDAAQAKGFDTLYYTAHLHTGVLVAPPFVAKALGE

SEQ ID NO: 14813 - protein, 423 aa, Zea mays
MDGNARSAATNQKKPVVADDDLVELLWHNGSVVAQPQAHQRPAPTYDPDRPGTSGLTGEETAAWFPDTLDDALEKDLYTQLWYSTIADAAPQHEGTLPGPTSQPSPSPPVGSSGVESSWAGDICSTFCGSNQVLRTPARIRGKDAALQSELPSNTGAHDGTSSSGGSGSNYGGSGLPSDSVHVQKRKGRCRDDSDSPSEDAECEEASEETKPSRRYGTKRRTRAAEVHNLSERRRRDRINEKMRALQELIPHCNKTDKASILDETIEYLKSLQMQVQIMWMTSGMAPMMFPGVHQFIPQMALGMNPGCIPAAQGLSQMPRLPYMNHTLPNHIPLNSSPAMNLMNPLNAANQVQIGHLRDAGSHVLHLDGGRAAVVPQVPGPGPHVVHGHQIAQAEEHNKILEVAASTVIPTSKAGQPPTFHGV

SEQ ID NO: 14814 - protein, 473 aa, Synechococcus sp.
MTQTATDVLRLIQEENIQIIDLKFVDLPGIWQHCSFYQDQLDEASFVDGVPFDGSSIRGWKAINESDMAMVPDPTTAWIDPFCKEKTLSLICSIKEPRTGEWYSRDPRSIAQKAVDYLAPSGIGDTAYFGPEAEFFVFDDVRFDQTENKGFYYVDSVEGRWNSGRKEPGGNLAHKPGYKQGYFPVPPTDTLQDMRTEMLLTMAKCGVPIEKHHHEVATGGQNELGFRFATLLKAADYLMTYKYVIKNVARKYGRTVTFMPKPLFNDNGSGMHTHQSLWKEGQPLFWGDRYANLSQLALHYIGGILKHAPALLAFSNPSTNSYKRLVPGFEAPVNLAYSQGNRSASVRIPLSGPNPKAKRLEFRCPDATANPYLAFAAMLCAGIDGIKNAIDPGDPLDVDIYDLTPEELSKIPSTPASLEAALEALQQDHDFLTAGGVFTTDFIENWIEYKLDAEVNPLRLRPHPYEFALYYDC

SEQ ID NO: 14815 - protein, 1328 aa, Coprinopsis cinerea okayama7#130
MYALVNLHPSCYSPSVRIATGKVDSNLSEGTNFHIGGKDIELDRAITQGEYFSGACFGRGTSAFTAQQTVPAVPVRKQAKFIPPQRAANISSSSTDALTTGNKSNIPPNSEKEVVPSKCHWAVNWRKQQTRKHKTWDGDGFVSLMGDQLRMVTEDGKLMGTTKWKGGELYSGLRVFINNKEVELDRDVPSSQVPKAKGQPLSQEEDLITEPSPPPTIAKPSTGIAASSFYGAPKAKQPKGPLHDPNAPGAVVFKAPNKAHMQRYNKYDLPVVPVVLDPILARRMRPHQIEGTVICNGCILADEMGLGKTLQTIALVWTLLKQNPYSGAGPIAKKALIVCPVSLITNWKAEFHKWLGRDRVGITVVDKEKVNIDAFFYNKTQHVLIIGYERLRTVINKVSTSVPPIDLIICDEGHRLKSANNKTTAMFKALRTRRRIILSGTPIQNDLSEFHAMTEFCNPGLLDEYPVFKRVYETPILKSRAPEATAKEIEVGEARTESLLQVANSFVLRRDATLLKKHLPPKRRCIAYIRMDQYLIPFPDEYVVFVTPTRLQISMFSAILRPERIDDLASGSTAESLALINILTKISNSPILLKATADSYKARTGDKESSCLERAGVKEALRLMPEGAQVSDMTLSGKLIVLAKMLKDIRNNTEEKCVVVSHFTSTLNILEAFCQQAGYSFYRLDGQTPQQKRQEYVNAFNKSSQRGGFVFLLSSKAGGVGINLIGGSRLFLIDSDWNPSHDLQAMARCHRDGQKRPVFIYRLVTAGTIDEKIFQRQITKLGLSASLIGSADGSASKSDSFSKKDLRDIFRIDPNTSCNTHDLLECPCDGSVIPVPGSSSTDDNGERVARLKRGFQSASSVTMAEVDEEFLDKKKAGLASLSEWKHINCLKPSADRPALDEVIQAVLPECDSGFKSYDSITGSSRAERLLKAVDLDNIQAMEKTFNVADFPGALAAPAFQPQPTWGGLDFYRAHAPSNYNDPSLFNHAWDRVRQFDAATAGGLGVGIHEAKHWHRRAYGGMPELAHLGPAEVGHAAAYEAYRNWVRNQSMYDTLGPDIERQREGLIGLAVAEAGRLLSFAGRSMDHYARSAASDAAAHTASYIFYQRRRDDEYYHHRGRSRSRGRYDPEWDELDEPYRYEDDHETLDPYHRGRSRSRHRSRSRPRSYSAHAHMPYEGTPYPGTPGGFPPLGGAPSYAGSHGGGPLPPLGVPYASSGGGIPPPPPLTSGGYSSGYSTSGYYPPPNSGYGPQGGYGSYGGAYPAPGMPMAVPLGHAASNSSGYSYGSQPYSTTGSVVGAPTAGVPPQTIVIHKSRRHKHRHRSRSRAGSE

SEQ ID NO: 14816 - protein, 561 aa, Physcomitrella patens subsp. patens
MATNDVVSVSHSMLLKATDLKDDRIDVISICLFVFLLCACIVLGHLLEENRWMNESITALLLGLFTGSIVLISSKGQGSHILEFDEELFFIYLLPPIIFNAGFQVKKKEFFRNFITIMFFGVIGVFISFGIISTGSWYFFSKFGLKNLPIRDILAIGVIFSATDSVCTLQVLNQDETPLLYSLVFGEGVVNDATSVVLFRAVQTYNFDNFTSLEGLQIGGSFLYLFFSSCILGIASGLISAYIIKTMYFGRHSTDREIAIMTLMAYLSYVFAELFYLSGILSVFFCGIVMSHYTWHNVTENSRITSKHSFATMSFIAETFIFLYVGMDALDFEKWKMMQSSFTESAGLFGSLLFLVLLGRAAFVFPLSALSNYSTKSPDAKINLRQMVIIWWAGLMRGAVSIALAFNQFTQGGDAKDSNQATLMVITIIIVLFSTIVFGTATKPLISWLLPPHFRSNYSDSASLSPKASLDADFHIPLLMDTEREELEANDRSTINQILNGLPRPQSIGMLLTAPRSTIHHVWRKFDDSYMRPTFGGRGYVRLVSRRDMDIQEDEILEDHS

SEQ ID NO: 14817 - protein, 470 aa, Geobacter metallireducens GS-15
MTPQEVVSFAKENGALMVDFKFMDFVGTWQHISVPITEFSEDTFEEGQGFDGSSIRGWQPIHASDMILLPDPDTAKMDPFVAVPTLSLICNVFDPITKEDYTRDPRNIARKAEAYLKSTGIGEIAFFGPEAEFFIFDEVRYDSSSNQSFYMVDSVEGAWNSGREEFPNLGYKPRHKEGYFPLSPTDSQNDLRNEMVMELQKVGIRVECQHHEVATGGQAEIDMRFSSLVDMADQLQWFKYVIKNVAYRNSKTVTFMPKPLYGDNGSGMHCHQSIWKNGQNLFAGDKYGGLSQMALWYIGGIIKHAKALCAITNPTTNSYKRLVPGFEAPVNMAYSSRNRSASIRIPMLSTNPKAKRIEYRTPDPSCNGYLAFAAMLMAGLDGIENKIDPGQPLDKDIYGLSPEELKDIPSAPGTLEDALNALRDDHEFLLKGDVFTPDVIEKWIEYKMEAEVNPVRMRPVPLEFALYYDI

SEQ ID NO: 14818 - protein, 464 aa, Scenedesmus obliquus
MHSRTNCLQTSVRAPQPHFRPFTAVKTCRQRCSTTAAAAKRDQAQEQQPWIQVGLGLAAAATAVAVGLGAAALPAQAVTSEQLLFLEAWRAVDRAYVDKSFNGQSWFKLRETYLKKEPMDRRAQTYDAIRKLLAVLDDPFTRFLEPSRLAALRRGTAGSVTGVGLEITYDGGSGKDVVVLTPAPGGPAEKAGARAGDVIVTVDGTAVKGLSLYDVSDLLQGEADSQVEVVLHAPGAPSNTRTLQLTRQKVTINPVTFTTCSNVAAAALPPGAAKQQLGYVRLATFNSNTTAAAQQAFTELSKQGVAGLVLDIRNNGGGLFPAGVNVARMLVDRGDLVLIADSQGIRDIYSADGNSIDSATPLVVLVNRGTASASEVLAGALKDSKRGLIAGERTFGKGLIQTVVDLSDGSGVAVTVARYQTPAGVDINKIGVSPDVQLDPEVLPTDLEGVCRVLGSDAAPRLFG

SEQ ID NO: 14819 - protein, 160 aa, Bacillus subtilis subsp. subtilis str. 168
MSIYHMKVRTITGKDMTLQPFAGKVLMIVNTASKCGFTSQLKQLQELYDTYQQEGLEILGFPCNQFMNQEPGEEADIQEFCETNYGVTFPMFSKVDVNGKNAHPLFVYLTEHAKGMLGTKAIKWNFTKFIVDRNGEIVGRYSPNTNPKELEDDIVKLLEQ

SEQ ID NO: 14820 - protein, 453 aa, Saccharomyces cerevisiae
MAKRRQKKRTHAQITPEQERDIPKSMVIRVGQTSLANHSLNQLVKDFRQIMQPHTAVKLKERKSNKLKDFVVMCGPLGVTHLFMFTQSEKTGNVSLKIARTPQGPTVTFQVLDYSLGRDIKKFLKRPKSLNNDDVLNPPLLVLNGFSTSKRSDEDDQDVNVEKVIVSMFQNIFPPLNPARTSLNSIKRIFMINKDRETGEISMRHYFIDIREVEISRNLKRLYKAKNNLSKTVPNLHRKEDISSLILDHDLGAYTSESEIEDDAIVRVVDNQDVKAKHSQTSLSQKTPVKMTDNEEREKGIEEEDVEMEEPKPSENSQPTPRKKAIKLTELGPRLTLKLVKIEDGICSGKVLHHEFVQKSSEEIKALEKRHAAKMRLKEQRRKEQEENIAKKKAVKDAKKQRKLERRKARAEEQGEGQGKDGAMSDDGSSSSEDEHYSDVPEDLDSDLFSEVE

SEQ ID NO: 14821 - protein, 161 aa, Picea sitchensis
MAEASSPGSQESPRSGEQSPQSSVREQDRFLPIANISRIMKKALPANGKIAKDAKETVQECVSEFISFITSEASDKCQREKRKTINGDDLLWAMSTLGFEDYIEPLKVYLLMYREAEGDNKGSSKSGVDQYGKKESNVHQGIPNMQSQMQHHMVTMQGNDL

SEQ ID NO: 14822 - protein, 163 aa, Arabidopsis thaliana; identical to SEQ ID NO: 13879

SEQ ID NO: 14823 - protein, 277 aa, Carboxydothermus hydrogenoformans Z-2901
MELWFTEKQTPNVGITCKITRTLHTETTPFQELAVIETLQFGRMLVLDGMVQTTVVDEFVYHEMIAHVALNTHPNPEKVMVIGGGDGGTIREIVKHPKVKKAVLVEIDERVIEVSKQYLPEIAVALMGNPKVEVRVEDGIKHVKEHKGEYDVIIIDSTEPVGPAVELFSEDFYKNVYESLKDDGIMVAQTESPFFNRDIIKNSFTRIGKNFPITRLYFATVPTYPSGVWTFTLGSKKYDPLAVKKEDIFVDPSNKYYNAEVHFGAFMLPNFIAEIIK

SEQ ID NO: 14824 - protein, 275 aa, Picrophilus torridus DSM 9790
MRLIENWFSERYSDNLQLSFRVQDQLLSVKTDYQRIDLFNTYDFGKLLSIDGTVQLTEKDEYIYHEMITMVPYYCTAKSDSALIIGGGDGGAAKRLIDLGIKRIVNVEIDQNVVEISRKYFPELADSFNNKNVELIIGDGIKYVKDTDESFDLIIIDSTDPVGPAEGLFNKSFYENARARLSDDGIIVTQSGSPYYQPEALKMATKGMLDVFSNVRTYIAFIPTYPSGLWSFTMASKSEIMQRKDNIIPGRYFNEDVLKGSFYLPEFVKNIIKSI

SEQ ID NO: 14825 - protein, 673 aa, Schizosaccharomyces pombe
MEPILNQGYGYGFALGLGAAFALLMAIITKVLTACMGQTQNSERFSTASRSVKSGLISSSTVSAWTWPATLLSSGAWSYTYGIMGGFMYGVGGTIQITLFLFLAIQIKKKAPAAHTVSECFFIRFGKLGHCVYLFYCISTNVLVSSLLLLGGSQGFSSTTGMNTVAACFLLPLGVMVYTTLGGLKATFISDWIHTVMIYIILIVTCYTVYCSSSLIGSPAKMYDMLKEVQEVYPATGGQSYLSFKNSEMMYLTWSVMIGGLSSVFGDPGYSQRAIASDAKSVFQGYLMGGLCWWIIPMALGSSAGLACRALLLNPASVTYPNVLSSVEISSGLPVIYGMASIFGKSGAAAGLVMLFMSITSATSAELIAFSSVTTYDIFRAYINPAANGKQLVRTAHLSVIGFSLFIGALSVGFNYAGVTAGWLLTFLGIILTPEVSAVTLCLFWNKMTRFSLVVGAPFGTITGVVCWLASTYSFCDGIVNKDTVMTSKACFVGNIVSMASSPLYIVLLSYIWPDKETFDLNQFRNITVGDDIDTTELNAIVSQLKDERILKLQTYWSIGINLFILIGCYVIIPTALLGSNHDLSKSSFSGLIIVCLIWILVAAIYIILFPLWQGRKSLANVISHIIRLKAPENILLDGLTPKQSSEDVGDATSFHMDKLDKEKEKSSELKTA

SEQ ID NO: 14826 - protein, 449 aa, Bacillus clausii KSM-K16
MPKFTKEDIVRQAQDNNVRFIRLQFTDLLGTIKNVEIPVDQLSKALDNKMMFDGSSIEGFVRIEESDMYLYPDLDTWVVFPWTPEKGKVARLICDIYQPGKPGEEPKPFEGDPRGILKRVLKEAQELGFTDFNIGPEPEFFLFKNDEKGEPTLELNDRGGYFDLAPTDLGENCRRDIVLELEDMGFEIEASHHEVAPGQHEIDFKYADAVSTCDNIQTFKLVVKTIARKHGLHATFMPKPLFGVNGSGMHLNMSLFTQEGNAFYDKNTESQLSKTAMQFLGGILKHAEGFTAITNPIVNSYKRLVPGYEAPVYIAWSMRNRSPLVRIPSSRGVSTRIEVRSPDPSANPYLAMAVMLASGLDGIKKKINPPEATDRNIYIMSKEERLDEGIKDLPSTLKEAIDSLLKDEVLVKALGEHALEHFVEAKEIEWDMFRTQVHPWEREQFMQNY

SEQ ID NO: 14827 - protein, 1155 aa, Oryza sativa Japonica Group; identical to SEQ ID NO: 8005

SEQ ID NO: 14828 - protein, 162 aa, Oryza sativa Indica Group
MALVEGNNGVSGGAVSFSEEQEALVLKSWAIMKKDSANIGLRFFLKIFEVAPSASQMFSFLRNSDVPLEKNPKLKTHAMSVFVMLRKAGKVTVRDTTLKRLGATHFKYGVGDAHFEVTRFALLETIKEAVPVDMWSPAMKSAWSEAYNQLVAAIKQEMKPAE

SEQ ID NO: 14829 - protein, 381 aa, Exiguobacterium sibiricum 255-15
MKAVHFGAGNIGRGFIGLQLVKSGYDVCFIDVNAEVVEALKTRGAYTVGYAAEEAAVEEVSRVTALNSQTEAERVVEAIATADVVTTAVGPTLLARIAPLLAEGLKQRTTTQNVFVIACENMIEGSSHLQQEVMHYLESTPGNVFFPNAAVDRIVPLQHHEDPLYVEVEPFFEWVIETKALPDDYPVFEGVTYVADITPFIERKLFTVNTGHAIASYLGALFGKETIAESLQDVRVRRGVQSALYETGWLLLEKYGFDPKDHSAYIQKNIKRFENPRIHDEIVRVARSPIRKLGPRDRLVKPARELMDRGIEANGLALGIAAALTYSDPNYSEYSELNTFIEQNGIQETVATYLGLEADERLSQLIVSQYEQMHPMSDSIA

SEQ ID NO: 14830 - protein, 971 aa, Oryza sativa Japonica Group
MSGSGNSLDTVALIVGGGSDSSGIVGRKRRRCDLIRERWCCLCPVWCKEAQEVVVPGRGRNGARQRDGGGCALGTTEVLGRICNSSVEKAEERETVIPAISNTEKMGEKQQKSIPRDRKRKGELDPAADYVKDLWDAFYVTAESTHLDTSEVNNKKQLDNCNHDIHVYEDLGHVCHECGLVVRKADSLFHYQWKKASRKRTNVNEVCLKKVGSDAISLSEDFIFSDIAIHPRHAKNIRPHQLEGFKFLVNNLVTDEPGGCILVHAPGSGEIFMLISFIQGFMARHFTARPLVVLPEGILGTWKREFQQWQVEDIPLYDFDSIKADNRVEQLEVLKSWSSKRSILFVGSKHFTQIVCDDRDENAVAECRDTLLMVPSLLILDEGHTPSIDETDMLQSARKVQTPCKVVMSGTLFHNHVKEVFNTLDLVRPGFLKTETFWPIVTRMMGQLEISSARSITEISESMEDTLLNDDNFTRKVNVIRSLGELTKDVLHYCKGEDLNEFPVLLDFSVFLELSPKQKDILCKLEEDHGMLKTSAVGAALYVHPCLSEISEANDVDRDDRVDSLVNSINLGDGVKARFFLNILALANSAGEKLVAFSQYTLPMKFLERLLVKEMGWHVGKEIFVINGDTSMEDGQLAMDQFNGSADAKVLFGSIKAFGEGISLVGASRIVILDVHLNPSVTRQAIGSTFRPGQKKKVFVYRLVAADSPEEKAHETAFNKEVIPKLWFQWSGRCTTEDFKLNQVCIDGSRDELLETDVIRQDIKALYQSIDMGLVSEATVCFNNVSSSGLSVHDTGVSVENKICGWGYNTTEVLGRICNCSVEKAEERETIILASGNMEKMEEKHQKSDQDFHFSDSTMAIPRERKQKGEVDPAADCLKDRWGAFYVAVESTQLDTSEVNNKKQLNNYNHDIHVYEDLGRVCHECGSGEIFMLISFIQGFMTRHSTARPLGTWKREFQQWQVEHCSGFIYL

SEQ ID NO: 14831 - protein, 526 aa, Populus tomentosa
MQISPAGGGDSQSHPGKEQQAAGVGILLQIMMLVLSFVLGHVLRRHRFYYLPEASASLLIGLIVGALTNISNTETSIRAWFNFHEEFFFLFLLPPIIFQSGFSLSPKPFFSNFGAIVTFSILGTFIASVVTGVLVYLGGLIYLTYRLPFVECLMFGALISATDPVTVLSIFQELGIDTNLYALVFGESVLNDAMAISLYRTMSSLKSHAPGQNFFMVIFRFLETFVGSLSAGVGVGFISALLFKYAGLDIDNLQDLECCLFVLFPYFSYMLAEGLGLTGIVSILFTGIVMKHYTYSNLSENSQRFVSAFFHLISSLAETFVFIYMGFDIAMEQHSWSHVGFIFFSIIFIGVARAANVFSCAYLVNLVRPVPRQIPVKHQKALWYSGLRGAMAFALALQSVHDLPEGHGQTIFTATTAIVVLTVLLIGGSTGTVLETLQVVGDDHDGPLSESLDGNNGYVAPSYNEDATSGNRLKMKLKEFHKSTASFTALDRNYLTPFFTSQSGDDEEEHDDPMPSSRGRGFLGHN

SEQ ID NO: 14832 - protein, 442 aa, Oryza sativa
MDSVVRTHIGHMLKMIHFCSMFLITFSDYKIQAILSSQQKRKAPEESDVAESSDCMITSPGFAVSPMLTPVSGKAVKTSKSKTKNNKAGPQTPTSNVGSPLNPPTPVGTCRYDSSLGLLTKKFINLLKQAPDGILDLNNAAETLEVQKRRIYDITNVLEGIGLIEKTLKNRIRWKGLDDSGVELDNGLSALQAEVENLSLKEQALDERISDMREKLRGLTEDENNQRWLYVTEDDIKGLPCFQNETLIAIKAPHGTTLEVPDPDEAGDYLQRRYRIVLRSTMGPIDVYLVSQFDEKFEDLGGGATPSGHANVPKHQPTEVFNTTNAGVGQCSNSVAVDNNIQHSQTIPQDPSASHDFGGMTRIIPSDIDTDADYWLISEGDVSITDMWKTALLNMETADVQWDESLDTDVFLSEDVRTPSSHNQQPSAVGGPQMQVSDMHKP

SEQ ID NO: 14833 - protein, 575 aa, Bacteroides fragilis NCTC 9343
MSTKNSSRFTPVIIAISVVIGILIGTFYAKHFAGNRLGIINGSSNKLNALLRIVDDQYVDTVNMADLVEKAMPQILAELDPHSTYIPAQNLEEVTSELEGSFSGIGIQFTIQDDTIHVNSVIQGGPSEKVGLMAGDRIVMVDDSLFVGKKVTNERAMRTLKGPKGTQVKLGVKRATEKDLLNFTITRGDIPQNTIDAAYMLTDDFGYIQVSKFGRTTHVELLNAIALLNHKNCKGLIIDLRGNTGGYMEAAVRMVNEFLPEGKLIVYTEGRKYPRADEFANGTGSCQKMPVIVLIDEGSASASEIFTGAIQDNDRGMVVGRRSFGKGLVQQPIDFSDGSAIRLTIARYYTPSGRCIQRPYQNGKDRNYEMDWLTRYEHGEYFSKDSIKLDENLRYSTALGRPVYGGGGIMPDVFVPQDTTGVTSYLTEVLSKGLTIQFTFHYTDNNRDKLKKYEDEESLLNYLRRQGLVEQFIRYADSKGVKRRNILIQKSYKLLEKSIYGNIIYNMLGKEAYIQYLNQSDQTVKKAVELLESGEAFPKAPISVEPQKEEKKDGKKKTTAQVDSTGEEEILRLYA

SEQ ID NO: 14834 - protein, 155 aa, Arabidopsis thaliana
  misc_feature (77)..(77): Xaa can be any naturally occurring amino acid
MESEGKIVFTEEQEALVVKSWSVMKKNSAELGLKLFIKIFEIAPTTKKMFSFLRDSPIPAEQNPKLKPHAMSVFVMXQLRKTGKVTVRETTLKRLGASHSKYGVVDEHFEVAKYALLETIKEAVPEMWSPEMKVAWGQAYDHLVAAIKAEMNLSN

SEQ ID NO: 14835 - protein, 610 aa, Lactobacillus acidophilus
MSKIIGIDLGTTNSAVAVLEGKEPNIITNPEGNRTTPSVVAFKDGEIQVGEVAKRQAITNPNTIVSIKRHMGEADYKVKVGDKYYTPQEISAFILQYIKKFSEELLGEEVKDAVITVPAYFNDAQRQATKDAGKIAGLNVQRIINEPTASALAYGLDKDDDDQKVLVYDLGGGTFDVSVLQLGDGVFQVLSTNGDTHLGGDDFDEPHMDWLIKNFKDENGVDLSKDKMAMQRLKDASEKAKKDLSGVSSTHISLPFISAGESGPNFTLKLISTRAKFDELTNDLVEKTKIPFDNALKDAGLTVNDIDKVILNGGSTRIPAVQKAVKEWAGKEPDHSINPDEAVALGAAIQGGVISGDVKDIVLLDVTPLSLGIETMGGVFTKLIDRNTTIPTSKSQIFSTAADNQPAVDVHVLQGERPMAADDKTLGRFELTDIPPAPRGVPQIQVTFDIDKNGIVNVSAKDMGTGKEQKITIKSSSGLSDEEIKRMQKDAEEHAEEDKKRKDEANLRNEVDQLIFTTEKTLKETKGKVSDEDTKKVQEALDDLKKAQKDNNLDEMKEKKDALSKAAQDLAVKLYQQNGGAQGALGHARPQGGNPNDGNNGGAQDGNSIR

SEQ ID NO: 14836 - protein, 286 aa, Synechococcus elongatus PCC 6301
MSADAPVWIDEVFEDRVRYGLRGQILWEETSPFQKITIVDTEHYGRGLLLDDCWMTAERCEVCYHEYLVHPPLTTAASIARVLVIGGGDGGTVREVLRYAEVEQVDLVEIDGRVVELSQEYLGAIGTAWADPRLNVKIGDGIAFVQTAPDASYDVILVDGSDPAGPAAGLFNREFYENCRRVLKPGGVFASQAESPDSFLAVHLEMIETLSAVFAEAKPYYGWVPMYPSGWWSWLYASDTPGQFQKPQSDRLAAIEPQVEIYNRDIHQAAFAQPNFVRRGLSARQG

SEQ ID NO: 14837 - protein, 1034 aa, Zea mays
MAGIYYSRQRKPERNGSVFTPIAAMYSSGHALPVANRSHGLVFGSLSKDWDDIRQRKDQLVNFLASLERASGDSAAAGKIEDSKLASPVEPTEQKEKAAIIVLDSDDEDGNGSGNSKLASETNKELGTSGLINNIAERMTFNGSQAFGTVHTYGDKNTQIVPYGQCSALVNQFPLQTSWQPSIQFERVVLQKRPEEQRMQDLVAASIAEKRAETQVFLSLPTEKKRRRSDPSLHASDDTATVPKQRKSKGATVVAAANLSLVSQQTATSPEPDMVIEEEEKHKNESDGLDDYWKDFALAVESTKGGESYMLAGGGLCPVEVQWLICTTVVVGIGVHVVEYDIVGKQCTLAACGALDLVGTGHALLGLGAGMSRAHCGFSSADRISEVVLLISGLDEVDEAAIEKEDNGKMEDIDCNHDIRIHEDLGHVCRVCGMIVRRADSIIDYQWKKASRRRTNGYGGHSKDADEIDCGTVKLSEDFIVADIAIHPRHARIMKPHQLEGFNFLVKNLIGDKPGGCILAHAPGTGKTFMLISFIQSFMARYPSARPLVVLPKGILGIWKTEIKRWQVQDIPVYDFYSVKAEKRVEQLQILKSWEDKMSILFLGYKQFSTIVTDDGGSNVTAACRDRLLKVPNLLILDEGHTPRNRETNVLESLNRVETPRKVVLSGTLFQNHVEEVFNILNLVRPKFLRMESSRPTARRIMSQVEIVGRSSKGLADGAFTKAVEETLLNDENFKRKAHVIRGLRELTKDVLHYYKGDILDELPGLVDFSVFLKLTPKQKDIIYKLEAHDRFKRNAVGSALYIHPCLSELSEVNAEHRANTFRDDLVDSLVDSITVRDGVKANFFMNILSLANSAGEKVLAFSQYISPMIFFERLLVKKKGWHVGKEIFMISGDTSQEDRELATDHFNNSADAKVMFGSIKACGEGISLVGASRVVILDVHLNPSVTRQAIGRAFRPGQQKKVFVYRLVAADSDEVKVHETAFKKEVIPKLWFEWSEHCTTEDFKLGQIDIDDSGDELLDTKAIRKDIKALYRR

SEQ ID NO: 14838 - protein, 1384 aa, Chlamydomonas reinhardtii
MQRRGSGSRGAGGTAAAGSGGAGPGGGGTAAAVTVPAHKVIPGTGGAVTVDAFRYAHPGVKAYFLTHAHSDHYTGLSEAWCAGPVYCSELTARLVAHLTGVSTAWLRPLPLGRPVVVEGLVEVTLVDANHCPGAVQLLFRVLPRGGGGGAAGGGAGGVGGVDATDAAKSAGGSTRGADAGCSSGAGAVRYLHCGDMRYSPAMQSWPQLGAWRGCEGVFLDTTYCQPKHTFPTQDEAVDYVASQIHERTGLRIHVSSTKLDVLRLLLPPEPNPDPDAGVAAAAHVFTDDPAASPVHVVGWGTLGETWPYFRPNFVNMQRAAEIMGARCVVGFVPTGWTYEMKRSVFSVHSKGALSVHLVPYSEHSSYPELLEYVKWLRPRQVIPTVGVKEGDREGERARAAMLARFRSLARPAQQRGQGKAEPFPEEAGVGAGTGAAAGVDAGTAALTGGTSVRAASGGGASEAAAAAPAVKVEPGAQPSASPTVQAAPAYGTTTFGDGETASAAAHSTPGKMARTGNDVVELPDTPGPRPPATAPAAPASTSAAAATAADAATAAAALAMSWEACREALLLPLERYDPVRHACWGPAHCGDGGAAAANSTSSAAASAAGAASGRGPTPYLHVALCLSALSSTTKRLAISDALTNMFRSVLAAADDPGRDLVAALYLVTGRIAPEYDKTELNVGGATVSGALQAATGASAARLKQLYREHGDLGDVAAACRRTQSTLRNPAPLLCGRLLAALRDVAADKGQGVAARRQAVVLGLLRACRDVEVRFLVRTLISNLRVGANWRSVLAPLGRAVLLHQRATAAVAAAADGSATTAAVQSPAPAELEAAGAAVLEAYHTCPNFEILVPVLLRHGIEGLRTRCGLTLGVPLKPMLANACAGPAAEPGEAAGPEEPAAAEGAAAARVPAQPPGPTPEAGMGTHVTVQVCVFVFDLLEWNGTSLLHRPLRERRSLLPAALPGMSPGRVMLATAVELQPLQPLQPSAVDREDGEEGPAAEVPVRMWPAPGEPAAPAVVELLSSDEDGPGSEGPYGRPHADDTGAPPAPEHSKAAAVGGHDPAAAAAQQPPCQPGPPSMGASRAVMDMLLQSFNTGAEGLMLKRLDGASAYEPSRRSEAWIKASSECVCVKRDYCEGLRDSVDVVPIGAWYGQGRKVKWFSPFLLAVWDPVREEFQSLCRCMSGFSDQFYAAAKERLGATIIPGPKPYYNTGERCSVWFEPTEVWELRGADLTLSPVHRAASGRLHTERGVGMRFPRFIRVRDDKRPEDATTPDDIVHLYNKQTRKVVVGERGGGDVGRAAGAARPATGCGGAAAVQAQGAQGAGASKRSGRGRDNQTHGGNAATAREPLIPPAGRLDSVTVSAGVCGLYHNGSNSRWHESLLK

SEQ ID NO: 14839 - protein, 1142 aa, Oryza sativa Japonica Group
MDNPEAEPDDAVLFVGVSLVLGIASRHLLRGTRVPYTVALLVLGVALGSLEFGTKHGMGKLGAGIRIWANINPDLLLAVFLPALLFESSFSMEIHQIKKCMAQMVLLAGPGVLISTFFLGSALKLTFPYNWNWKTSLLLGGLLSATDPVAVVALLKELGASKKLSTIIEGESLMNDGTAIVVYQLFYRMVLGRTFDAGSIIKFLSEVSLGAVALGLAFGIASVLWLGFIFNDTIIEIALTLAVSYIAFFTAQDALEVSGVLTVMTLGMFYAAFAKTAFKGDSQQSLHHFWEMVAYIANTLIFILSGVVIADGVLENNVHFERHGASWGFLLLLYVFVQISRILVVVILYPLLRHFGYGLDLKEATILVWAGLRGAVALSLSLSVKRASDAVQTHLKPVDGTMFVFFTGGIVFLTLIFNGSTTQFLLHLLGMDRLAATKLRILNYTKYEMLNKALEAFGDLRDDEELGPPADWVTVKKYITCLNDLDDEPVHPHAVSDRNDRMHTMNLRDIRVRLLNGVQAAYWGMLEEGRITQTTANILMRSVDEAMDLVPTQELCDWKGLRSNVHFPNYYRFLQMSRLPRRLITYFTVERLESGCYICAAFLRAHRIARRQLHDFLGDSEVARIVIDESNAEGEEARKFLEDVRVTFPQVLRVLKTRQVTYSVLTHLSEYIQNLQKTGLLEEKEMAHLDDALQTDLKKFKRNPPLVKMPRVSDLLNTHPLVGALPAAMRDPLLSSTKETVKGHGTILYREGSRPTGIWLVSIGVVKWTSQRLSSRHSLDPILSHGSTLGLYEVLIGKPYICDMITDSVVHCFFIEAEKIEQLRQSDPSIEIFLWQESALVVARLLLPMMFEKMATHELRVLITERSTMNIYIKGEEIELEQNFIGILLEGFLKTKNQTLITPPGLLLPPNADLNLFGLESSAINRIDYCYTAPSYQVEARARILFVEIGRPEIEADLQRSASLISQTLELPRTQSKEHSESFRKSRGAQNGASLTEIRDHPASFSARALQLSMYGSMINDMKSGQGQGQRRQRHRHTKASSNKAHSSSYPRVPSRSSNTQRPLLSVQSEGANMTTARQAAAAGASLPPEPEEAGRRRRRQRKAIEEDEDNSSDESAGEEVIVRVDSPSMLTFRQPSSAADR

SEQ ID NO: 14840 - protein, 443 aa, Thlaspi caerulescens
MSESQQDSEQYPPSKRQYHPSVSSMKPPLVAPGEYHRFDAAETRGGGASDQLKRKTDMVNQIEEPNELNTGVLQTPVSGKGGKPKKSSRSVKSNKTGTQASGSNAGSPGNNFAQATCRYDSSLGLLTKKFINLIKQAEDGILDLNKAADTLEGTKETDIRYTNVLEGIGLIEKTLKNRIQWKDLDVSKPGETVESIANLQDEIQNLTAEEVKLDDQIRESQERLTSLSEDENNKRFLFVTEDDIKNLPCFQNKTLIAVKAPHGTTLEVPDPDEAGGYPQRRYRIILRSTMGPIDVYLVSQFEEKFEEIPNADEPSNLPSTSGLPENQDVAMPMEEDSSDKNMETQEVDDTQRVYSEIESHDFVDGIMKIVPPDLDMDVDYWLRSEVGEVSITDLWPNESGADWNQIVTFDQDHAGPSNTTLEQPRTPLSPAPENSTATKSTGS

SEQ ID NO: 14841 - protein, 721 aa, Aphanothece halophytica
MGKVIGIDLGTTNSCFAVLEGGKPLVIENVEGGRTTPSIVAFTKEKERLVGQLAKRQAVTNAENTIYSIKRFIGRRWEDTEQERNRVSYHCVPGRDKTVDVKCWGKQYTPQELSAMILQTLKAGAEAYLNETVTEAVITVPAYFTDAQRQATKDAGTIAGLNVMRIINEPTAAALAFGLDKQEQREQVLVYDLGGGTLDVSILQLGDGVFEVKATAGNNHLGGDDFDNVIVEWMLSEFQAQEGINLNEDKMAMQRLREAAERAKIELSTRPTTSINLPFITAFSKGGGEVGPKHLKLNLSRAKFNELSRPLVEKTIDPLKQAIEDSGLSVDQIDRILLVGGSTRIPEVQEALKKFFNGKEPDRSINPDEAVALGAAIQGGVLGQEQEVEDLLLLVVIPLSLGIETLGEVFTKVIERNTTIPTSKSQVFSTASDGQTSVEIHVLQGERAMANDNKTLGKFLLTGIPAAPRGVPQIEVSFDIDVNGILKVSAEDKGTGREQGIVIKETGGLSQQEIERMQQEAEQYADEDRKRMQRIELSNQADSLFYSHEATLKDNQGLIPQKVKATANKKKEELMAILEDPNVELGVIQTRLEDYRQAVLSMGSEVYSQGSSKSSARDYETVGEEEMTRETGNSQESNAAFSTQPEGTVNNDNLELEAVFSTYNDHTQGSDVATSSHDEIDLGDASDNSQTNFDLDDEDFNPFEDFDEEEEASTDDYEAVE

SEQ ID NO: 14842 - protein, 214 aa, Triticum aestivum
  misc_feature (16)..(16): Xaa can be any naturally occurring amino acid
  misc_feature (30)..(30): Xaa can be any naturally occurring amino acid
  misc_feature (81)..(81): Xaa can be any naturally occurring amino acid
  misc_feature (89)..(89): Xaa can be any naturally occurring amino acid
MPDSDNDSGGPSNAGXSPSPREQDRFLPIXANVSRYHEERRCPANAKILERTRQGDGARSACPEFISFINRRGLPTKCQRXKRKTINGXDLLWAMTTLRFEDYMEPFKLYLHKFRHLEGNGRASAPGGFWRVTLPPGGSGSQQRGVDPKGTLAEAVKAGRVTGGFSGGPRARGKAGGGHFFIEYGASQFRVPPGVGGTKISDFSPHIYHGRGKG

SEQ ID NO: 14843 - protein, 136 aa, Brassica napus
  misc_feature (19)..(19): Xaa can be any naturally occurring amino acid
AQPIVLVMGYTSFLTLMRXEDSKFAHRKYMAKVLRESPGLLVLDEGHNPRSTKSRLRKALMKVDTDLRVLLSGTLFQNNFCEYFNTLCLARPKFIHEVLMELDEKFNTNQTVQKAPHLIENRARKFFLDIIAKKID

SEQ ID NO: 14844 - protein, 518 aa, delta proteobacterium MLMS-1
YICVIENEGQYIYFLDGIATILTPIPDIPFVEEFVNVPLLTHRQPEKILILSGGAGGIINEALKHPSLAAVEYAEQDPLLFELLRKFPTELTESELDDPRVKIHHTDGRLLLQTTPRQYDLIFIGILEPSSLQTNRYFTREFFTLARERLNPGGILVFGLPGSMTYLNDELKNLNSSVFHTVKSVFPHVRVIPGDGHNLFLSSDAPDVAAVDAHQIMARLTEREIRAEAMLPWHIEKKLHPGWQEWFYEFIEESSRQLNRDFTPLGVFYSISHWNALYSPEFGRFFNKLERADLKGAALVPLLLLAAYLLLRAGVKRAVRPGIPLAIATTGFAGMISSLVLIFTFQAFYGYLFSWIGLLVAAFMAGAAAGAQLVTSALGRIQDHRQLFKRIELAIVVFSLLLPLGLLAANTWVASVAAFDLLRVLFLVVSLVAGFLLGAQFPLANKLYLGDNAHLSRTAALLYTADLLGGWLGGIVGAVVLLPVLGLVGTCLVMGLLKAVSFVIISFEFSDQQQEVAT

SEQ ID NO: 14845 - protein, 714 aa, Ustilago maydis 521
MLQVVRSLLYRLLDLLYAFVEHLPFSSSAIPSTRQESSSTFTAQPLLLYAAILVVSLFVLNVFRAALTDYHRKFYLEPSTMIIKSPHVFTAPTNYTLPEFLFKPIDIAACKERANDPLLYPAEPEVTGRPDAKPLSLVDVREYATNLASALISGSTESGRKYGKGDVVGINAANTHDYLACALGIMMTGASVALFNPSYKPIELAHQIRMVKATAVITTAASYKSTQEAAQQAAVKGEDSLEHLATPPEILVFEESHDVSISKILKVGKDELPETRTLLDNVKLDPKTTTAVFCFSSGTTGGPKAVMLSHYAIVANIIQASFAMLDRVNDPLIDEDNWYAGGRELLLGYFTTRVSETWNTAADAVNTVTEKLGGVQLAPRLSRGEFHLGLLPLFHCYGLLMGFMNLHTATPTIVLPRFALDVFLATVQRHRITFCFVVPPILLALAKHPSVANYDLRSLTKVSSGAASLPHELRLAVKKRLGIDSTDGYGMSEMSPLVCSQNTKDIEHYPGTVGQLVPGTEAKVIGPDGKEVGFDEEGELCLRGPQMMQGYLNNDEANVKTFIPSIDDPGRFLRTGDIVKVNKDGFVTITDRLKDVIKYNGFQVPPSELEAIMFKEDRVGDCAVLGVPDQEGTELPWAFVVLSPKTKEEIGDDEDKKNQLEKELLDFVNQRVNANYKKLRGLTWLDALPKSASGKILKKDIRAMVEQHKLSARK

SEQ ID NO: 14846 - protein, 85 aa, Hyacinthus orientalis
SLYFSCSRLVSASFEDQRRHQGALLTRKIAKFQKNITKRGSVPETTVKKGNDYPVGPILLGFFIFVVIGSSLFQIIRTATSGGMA

SEQ ID NO: 14847 - protein, 181 aa, Zea mays
MASSMLSSAAVVTSPAQATMVAPFTGLKSSAAFPVTRKANNDITSIASNGGRVSCMKVWPPVGKKKFETLSYLPDLTEVELGKEVDYLLRNKWIPCVEFELEHGFVYREHGSTPGYYDGRYWTMWKLPLFGCTDSAQVLKEVQECKTEYPNAFIRIIGFDNNRQVQCISFIAYKPPSFTGA

SEQ ID NO: 14848 - protein, 1211 aa, Oryza sativa Japonica Group
MLCLTLSLSLSLSISFSFLELELCIDGHLAPLNCFPLTPSPLTVLALAFGSKGTLFLKGEGQAQEAAGSPQGVVLEEEIKVKEEFNNHKDYDYLFRFHFEVHTIDVSLLCMWLIIAKCLESIPFSYDHSFLDEAAMEGHVIVPLEKLSLELNNGGIMLNHDKDISALQEEISALRSRQRHLDHRRQEALDKLIDLKGSIRVFCRVRPSISANNFMTKSPVTVENEKIVVRAVGIKKEFSVDRVFDQESTQEDVFQEVKPILRSALDGHNVCILAYGQTGTGKTYTMEGNNGKLGIVPRAIQELFSHASQDSSSTYSFSISMLEVYMGTVRDLLTPRQPLFRSTECNTSSIISILATKSGAVEVEGLTDVAIQDLKKANQCLTRITIKRSSGGTTEECSKLWLVDLGGSERLLKTGASGLTMDEGKAINLSLSALGDVIAALRRKRSHVPYRNSKLTQILSDSLGDGSKVLMVVHISPSDDDIGETVCSLSFAKRARSIESSKELSEDIKKLKQKRIAELDKEICDAEQELKDLNEQIKRAETSLEERKKLSSSACQALSDEKGSPRSTLVVVGHIDSAESPQATEKTKSRASHGSVPHFMSPTVCSRQRHSSASHSATKTRLTKSVNRYPAAELSGSHSFSYSSCKNAAKARSRRRPAIFPVVFIPSWPRVMTVALTASCKILTEALNIDRVIVQQLQNSENSQFLYLPLHQCTGIWQEEAKNMLHVEWQLAREISRTSNAESNADIWTHVDREQHGHVAHRFQVKKKQFFRNFMTITLFGAIGTLISFSVISLGSLGLISRLNIGSLDLGDYLALGAIFSATDSVCTLQVLNQDETPFLYSLVFGEGVVNDATSVVLFNAMQNFDLANFSSVKFLQFIGNFLYLFATSTFLGVAAGLLSAYIIKKLYFGRHSTDREVSIMMLMAYLSYMLAELLDLSGILTVFFCGIVMSHYTWHNVTESSRVTTKHAFATLSFIAETFLFLYVGMDALDMEKWKIVGETFSPMKSIALSSTILFLVLVARAAFVFPLSFLANLTKKTEEGKISIKQQVIIWWAGLMRGAVSIALAYNKFTRSGHTQLPSNAIMITSTITVVLFSTMVFGLLTKPLIRLLIPARHLNRESSALSDPPSPKSFLDPLILNGSDVDPEIGVGIRRPTSLRLLLASPTQSVHHYWRKFDNAFMRPVFGGRGFVPFVPGSPTERSVPLLQGNEN

SEQ ID NO: 14849 - protein, 1271 aa, Coccidioides immitis RS
MEFSLDGAVGQNLADEPHGAEFSELQFAIAESPKNEKPDDPSDDSSPPVHLASAFSSAPKSAISTPSSKSSCPPPPSRPPTKKELLLNNLDNFIPVGILKVFDPSSVTRSKDTDFLLAEVNKLLQAGWVRTSIYEDENYPGWKAIRIYVLPEDVGRSIIQRSSAAFRRSLRVVMSRLDTSPEAWTGNFDPLAEHSVNSKTEDESLFYIFNTLESPNPNVDSVPDFWARLAMASALKGNSDSDAGKNVGIRGLKTPLYPYQRRSVAFMIQKESEPGEYPDPRLQAFKGPTGRTYYYDREEGAITRDQRLYSGPCGGVLAETMGYGKTLICLAVILATKGYFPRIPSTHLQELHPVRAKTGSLFEMTASAVGRFSVPWKSYFEHLNDLGMHYVNCTRACEHSQGSYTVIQAPKSSNRMGIKSSYLRLASGTLVIVPPNLVDHWLHEIEKHTEGLKVLVLRDVSDRLPPADELLQYDIVLFARSRFEKEKAGFEHHWAIYDSPLKELHWLRIIVDEGHNFASSGGKSNAIHFLEMLHVERRWVVSGTPSDGMYGVEVSLASQETLPEMAMKDDERAAGILKSRKDASGIIDEELKNLDRLKRIVIDFLRLKPWANSRAQDRANWSKYMTPKGVDGKRTMATSLRSTLQSIVVRHRTEDINKDLVLPNLSNKVVYLEPTLHDKLSLNMFIFHLVVNAITSERTDRDYMFHPRNRKHLATLINNLRYAGFWWTGFDKKDVEVTLDVARKYLAANVDRMTRSDLDLLCEGIHIAEKTISCPSWNAFSQFDELGVFIRNFPEYARPMWSLDDSEEHQEPLLLGISQARDAQRFITARLCAEDPAEGIAGAGIKTKREMRRRLDNPTDLKSQRGSPTKPQAESAASNAKTNDYLIHRPRPEKLPKAQKFSRFKTLPAESPLAKAQVVATTSAKLSYLLDRVFELQKEEKIIIFYENNNNAFWVAEGLEMLGVEFRIYASTLKPKLKAEYLALFNNSECVRVLLMDVRQASHGLHLASASRIFIINPIWDPNIESQAIKRAHRISQMKPVYVETLVLKGTLEDKMLRRRKQMTNIEMLHAEKDLLDDRTMSSIIKEEGFIPVSEDEKDSESAYMKNKPGFFDRHKMPIPDNFNDKKPPRPLIQPSPRRRTPAKGKNKVSEPMPFLDSDVTPGSGRGNKRQITTTEEVVTDDGIVMMAPRTPGPRKRRATSHLTYSNAGNNENAVSSNGESSSPVLDISDIPGVFSTVHATSGPNNSLEDPFLAPDQPIVSASFFLSAPAN

SEQ ID NO: 14850 - protein, 181 aa, Brassica napus; identical to SEQ ID NO: 14847

SEQ ID NO: 14851 - protein, 384 aa, Zea mays
MMFGALVSATDPVTVLSIFQELGTDTNLYALVFGESVLNDAVAISLYRSMASMRTHHSGKNFFLVILRFLENFVGSMSSGIGVGLISALLFKYAALGVENLHNLESCLFVLFPYFSYMLAEGIGLSGIISILFTGIVMKRYTFSNLSDDSQRFTARFFHLLSSLAEAFVFIYMGFDIAIERQSWSHIGFIFFSIIFILVARAANVFSCAYILNLARPPHCQIPRQYQQALWYSGLRGAMAFALALQSVHDLPDGHGETIFTATTSIVVLTVLLIGGSTGTMLEALQVVGDSNRYCQLYELQESSNGNDTGYTGQNYDEGASTSSKFRSKLRDLRRSTSSFALLDRNYLTPIFTSQNGDCNDNTTESPNEELTIFRGPGDLEVHD

SEQ ID NO: 14852 - protein, 102 aa, Triticum monococcum subsp. aegilopoides
SNYTELSQLYPKYKDQGFEILAFPCNQFGGQEPGTNDEIVQFACTRFKAEYPIFDKVDVNGNNVSPLYKFLKSSKGGLFGDSIKWNFSKFLVDKEGHVVDRY

SEQ ID NO: 14853 - protein, 233 aa, Ralstonia solanacearum GMI1000
MSSPSLAAPALARARDRLARRRTAGVLSRHHLLIIAIAIVIAIIALLLPRTCHAAAGAQAAPAPQPAAAGPCPTALDFRVRRLQDDAPQNLCQYAGRVVLVVNTASYCGYTYQYEGLEALYARFRDKGLTVLGFPSNDFEQEPGTGKQIADFCYNTYGVKFPMFSKTSVVGPAASPLYHWLAQQTGQPPKWNFHKYLLDRSGRVVAVYPSKVEPGDPALIKRIDALLAEPAPR

SEQ ID NO: 14854 - protein, 363 aa, Candida albicans SC5314; identical to SEQ ID NO: 528

SEQ ID NO: 14855 - protein, 559 aa, Prunus dulcis; identical to SEQ ID NO: 1792
  misc_feature (46)..(46): Xaa can be any naturally occurring amino acid

SEQ ID NO: 14856 - protein, 1910 aa, Ustilago maydis 521
MSGEDRGAPYRYAGERPPAYPADGYASYQRGLKSSIPSRSYDTAYPEQGYDRHLRERVHPAYTTGPSYGVPPPPPTDYRRPPPQAAYRYEEDYHHRRAPAQPHLEYAPEHRRQPVHSDAYREADDRRSFEQARSDPYASPSRHAYQDSYRSELPHERRHAPAAYERISVRDDARSAPENRHIDEPAVYRRDEYDAHSREIQPSYRRGAHRSPRLSPQPVVSAHERSSEYATRDYSASAARYAEPVHQPESPPRPSMSIFNMLNDRSANGAVESVHSSPTKSSIAAEHESYPTTAQEPSHASRAAFDPAREQSYSTARDSQAYSRGSEARAGAARVNYTVHPEDEAAISQRRNSSAHQQSSIKSVRHPANAVDEPLIRVKHEEATSASLDAQMSAEPPVSHTLNNGERLSAQDAKVATEDSSLAANGNGKVDSAGGTARPAPAKTQLKLRNNPLPASKSNSSFVAPPPPAKKNRDPDGWESDLSNEENQPFWQTELDDYIFDVRERQRLIEDAFVASMREKHVEVERRLARAYEGRYFAVIRQIRLREQQEASQRDMERRQDHVRQQRDHEIDLELLGTLSDGQQNMGTRKKKGGRGTDDDGLLQADDDDDDDSDDVALADLAARNGSKSNIIKLKRSKGKPAAADPRNKKRRLENGAALSPAPGSEVDSTLADFGGNFDGDDSAFASHQASPTPDDVSFALDVDASGKVPIDARRAQQLEDAHRRIWTTIAKRDVPKVYRTVLQSASSKTMYWRRISSVVQREAKRGAARNNKTVKDVQLRARKVMREVLVFWKRNEKEERELRKKAEREALEKAKKEEEMREAKRQARKLNFLISQTELYSHFVGSKLKTAEAEESEETAGSSKIIDPNAQPSDATVLPINPHSELADAEARLAELDDIDFDDEDESNLRAHAARNAQEAVRLAKEKAQAFDVAAAEERRRNEAAAREREGLDAGPVKQIEEKDLGKAFDSDDMNFLNPTSMGQTEIKQPKMLTCQLKEYQLKGLNWLANLYEQGINGILADEMGLGKTVQSISLMAYLAEVHDIWGPFLVIAPASTLHNWQQEISKFVPTLKALPYWGNVKDRAVLRKFWNRKQISYNRDAPFHVLVTSYQLVVSDEKYFQRVKWQYMILDEAQAIKSSSSIRWKTLLGFNCRNRLLLTGTPVQNSMQELWALLHFIMPSLFDSHDEFSEWFSKDIESHAEQKGTLNEHQLRRLHMILKPFMLRRIKKNVQNELGDKIEIDVFCDLSARQKMLYRGLRANISVAELMDRATSNDEAGLKSLMNLVMQFRKVCNHPELFERADVRAPFALADFARSGSLAREGDLLNLPDSTTSLIELQVPKLLVREGGIFDIPGHNSRKGFDTGYLQNLFNIWRAPHIHESLQEERSTFASLPLIGVSPSEAQKTFHSTGIKRILAAAAEERHWRSLEAFASDDTFAAASVRPLAKMLRPMPTTSGRSPSVLMPLEEVAADYRRHSYLAKDSARAVVAPAVAPPIKLYSNDGPFMQAQERFSRDAQVSVTLFGLSPEGRESVKRVEELQSELPEVPPQGVMRDSSIDQLPYNGMQVPQMNKLIVDSSKLAKLDVLLRELKANGHRVLIYFQMTRMIDLMEEYLIYRQYKYLRLDGASKISDRRDMVTDWQTKPELFIFLLSTRAGGLGINLTAADTVIFYDHDWNPSNDSQAMDRAHRLGQTKQVTVYRLITKGTIDERIVRLARNKKEVQDIVVGTKAYSETGMAKPQEIVSLLLDDDELAESMLRKKQAEEAQTAQEKADLARASHAKRRLNKDRAAAAVESPAPVGSTWSLEDDEDDFFGARPPSKADTDTAETTPQLQSKKRSVGGGGGGSGGAKRGRISEVASPRMTPLSLDDGALMASGEQLASPSKGAAAKRKSKSHRKKTVDELAGVDLD

SEQ ID NO: 14857 - protein, 162 aa, Zea mays
IVCWGGLMRGAVSIALAYNKFTRSGHTQQPSNAIMITSTISVVLFSTIVFGLLTKPLIRLLIPSRHLSREPSALSEPSSPKSFFEQLAANSPGHPDLENGISLRRPASLRFLLVSPARSVHHYWRKFDDSFMRPVFGGRGFVPFVPGSPTESSLPLLPGNEN

SEQ ID NO: 14858 - protein, 216 aa, Shigella boydii
NIGRGFIGKLLADAGIQLTFADVNQVVLDALNARHSYQVHVVGETEQVDTVSGVNAVSSIGDDVVDLIAQVDLVTTAVGPVVLERIAPAIAKGLVKRKEQGNESPLNIIACENMVRGTTQLKGHVMNALPEDAKAWVETHVGFVDSAVDRIVPPSASATNDPLEVTVETFSEWIVDKTQFKGALPNIPGMELTDNLMAFVERKLFTLNTGHAITAY

SEQ ID NO: 14859 - protein, 480 aa, Bifidobacterium longum DJO10A
MSVEEIAKAVDGRLIGDAGSESRATNTVSDSRQAGPGSVFVAIRGERVDGHDFVAKTAGQGATVAIVDHEVKSDGLPQIVVKDTVDALGELARYNIVRRRELDGDFDIIGLTGSVGKTTTKDLLSSLLATVGPTVAPVGSFNNEIGLPLTALRVDEHTRFFVAEMGASHIGEIARLTRIAPPNTAIVLKVGVAHLGEFGSRERIAQAKSEIVQGLLPGGTAVLNADDEHVVPMAGLANGDVLWFGLGSSQEPEVRAIDVTADRSDHAEFTLVDADGNHTPVHLGIPGRHNVMNALAAATVAMRYGMAPETVARILASQHTISPHRMALSTVNREGTSFTLIDDSFNANPDSMKAGLNGLKAWNSNDGKEPFRVALLGAMLELGADETALHTSIGTYADELGIDAIIAVGSAQDQHLDALAQALADGARQSQSASVDCVHDIDAAEQLVIDLARNHPDAVVLLKGSHASGLSALAERWAKN

SEQ ID NO: 14860 - protein, 239 aa, Pyrus x bretschneideri
MGRGRVELKRIENKINRQVTFAKRRNGLLKKAYELSVLCDAEVALIIFSNRGKLYEFCSSSSMLKTLERYQKCNYGAPETNVSTREALELSSQQEYLKLKARFEALQRNQRNLLGEDLGPLSSKDLESLERQLDMSLKQIRSTRTQCMLDQLTDLQRKEHMLNEANKTLKERLFEGYHALQLNANADEYGRQQAQAAQGDVFFHPLDCEPTLQIGYQNDPISVVTAGPSLSNYMGGWLP

SEQ ID NO: 14861 - protein, 101 aa, Glycine max
MPPPCIRNPFLKCLSEKEIDPFESQRSKFAGIVRCLTLLDCLSRYRNDFHEIEQIGIGHFSNVFKVIKRIDGCLYAVKHSTREVVQGNRREKALMGGQALA

SEQ ID NO: 14862 - protein, 183 aa, Brassica napus
  misc_feature (95)..(95): Xaa can be any naturally occurring amino acid
  misc_feature (153)..(153): Xaa can be any naturally occurring amino acid
  misc_feature (162)..(162): Xaa can be any naturally occurring amino acid
MASSMLSSAAVVTSPAQATMVAPFTGLKSSAAFPVTRKANNDITSIASNGGRVSCMKVWPPVGKKKFETLSYLPDLTDVELAKEVDYLLRNKWIXPCVEFELEHGFVVPVSTGSTPGILMMDVYWTMWKASPWFGCTDSAQVLKEVKNAKRSXPNAFIRIIXIDTRQSVHQFIAYKPPSFTGA

SEQ ID NO: 14863 - protein, 146 aa, Triticum aestivum
MASSMLSSAAVATSPAQATMVAPFTGLKSSAAFPVTRKSNTDITSIASNGGRVSCMKVWPPVGKKKFETLSYLPDLTDVELAKEVDYLLRNKWIPCVEFELEHGFVYREHGSTPGYYDGRYWTMWKLPLFGCTDSAQVLKEVQECK

SEQ ID NO: 14864 - protein, 445 aa, Pseudomonas syringae pv. syringae B728a
MLHLSRLTSLALAIAIVIGAPLAQAAEKTAPATPAAVSPAKTNATAKPPLPLDELRTFAEVMDRVKAAYVEPVDDKTLLENAIKGMLSNLDPHSAYLGPEDFQELQESTSGEFGGLGIEVGVEDGFVKVVSPIDDTPASKAGIEAGDLIVKINGTPTQGQNMQEAVDKMRGKIGEKITLTLVRDGGTPFDVTLARATIQVKSVKAQMLENGYGYIRITQFQVKTGDEVGKALAKFRKDNGKKMSGLILDLRNNPGGVLQSAVQVADHFLTKGLIVYTKGRIANSELRFSADPADASEGVPLVVLINGGSASASEIVAGALQDQKRGILMGTDTFGKGSVQTVLPLNNDRALKITTALYYTPNGRSIQAQGINPDIVVRRAKVTNEADGENYKEADLLGHLGNGNGGADKPTVKSGAAAKARPQDDDFQLSQALSLLKGLSITRGN

SEQ ID NO: 14865 - protein, 386 aa, Thlaspi caerulescens
MAATSNSGEDPVLYNHRSPFRFELLQSLPPTDPRYSSQTPSSTNRPFSVSEPLPNAQSPQIPPHWDESYSQITQKVQKSRKNHRIQLGSISNMPGETIDIAKVIVKQESPQDTKRGIKSKVAKQLKAGKRMANTEAHNGGPNGTNNCRYDSSLGLLTKKFVNLIREAEDGSLDLNYCADVLEVQKRRIYDITNVLEGIGLIEKTTKNHIRWKGADNLGQNGLGDQISRLKLEVESMQSEESRLDELIRERQEALRSLEEDEYCKRYMFMTEEDITSIPRFQNQTLLAIKAPTASYIEVSDPDKVMSFPQRQYRMVIRSRMGPIDVYLLSKYKRDSGETSESDQNTQSGVDTPSLKIVTSDTDLKTDYWFESDAEVSLTDLWNNNFS

SEQ ID NO: 14866 - protein, 626 aa, Bifidobacterium breve
MARVVGIDLGTTNSCIATLEGGEPTVIVNAEGMRTTPSVVAFSKSGEILVGEVAKRQAVTNVDRTISSVKRHMGTDWTVDIDGKKWTPQEISAQILMKLKRDAEAYLGEPVTDAVITCPAYFNDAQRQATKDAGKIAGLNVLRIINEPTAAALAYGLEKGKEDERILVFDLGGGTFDVSLLEIGKDDDGFSTIQVQATNGDNHLGGDDWDQKVIDWLVGEVKNKYGVDLSKDKIALQRLKEAAEQAKKELSSSTSTSISMQYLAMTPDGTPVHLDETLTRAHFEEMTSDLLGRCRTPFNNVLHDAGISVSDIDHVVLVGGSTRMPAVKDLVKELTGGKEANQSVNPDEVVAVGAAVQSGVIKGDRKDVLLIDVTPLSLGIETKGGIMTKLIDRNTAIPTKRSEVFSTAEDNQPSVLIQVYQGEREFARDNKPLGTFELTGIAPAPRGVPQIEVTFDIDANGIVHVSAKDKGTGKEQSMTITGGSGLPKDEIDRMVKEAEAHEAEDKQRKEDAETRNQAEAFAYSTEKLVNDNKDKLSDDIVKEVTDKVNALKEALKGDDTDKVKTAQGELMTSAQKIGQVLYAQQGAEGAAAGAGAAGASAGSASGSDDDTVEAEVVDDDDDKDNK

SEQ ID NO: 14867 - protein, 386 aa, Arabidopsis thaliana; identical to SEQ ID NO: 12776

SEQ ID NO: 14868 - protein, 436 aa, Mycobacterium sp. MCS
MSTDLAALAEKTGTKFILALFVDLRGKPCAKLVPVEAVEQLATEGVGFAGYAVGAMGQEPKDPDLMAIPDAASFTPIPFVKDGLAIVHCDPHVEGKPWPYAPRIILRSLIQQAADAGFEPWVGAEVEYFLLTRNADGSLATADAADTAAQPCYDARGVTRMYDHLTTISSAMNQLGWANYANDHEDGNGQFEQNFQFADALTTADRVITLRYLLSMIAAERGMVATFMPKPFGDRTGSGLHLHLSLTSGGTPVFPCESDERGLGLSDTAYSFIGGILDHACALQSVIAPTVNSYKRTGAVSTASGASWAPRSATFGGNDRTHYIRVPDAQRIELRGGDGSANPYLAVAAALGAGLDGIKRSADPGAVGAVAETRSTLPPTLLHAVEELEADPVVSGVLDAAGDGVARYFAGLKRHEFFDYHGTVSPWEVEQYLTAF

SEQ ID NO: 14869 - protein, 1132 aa, Nicotiana tabacum; identical to SEQ ID NO: 8064

SEQ ID NO: 14870 - protein, 158 aa, Streptococcus pneumoniae R6
MTSLYDFSVLNQNNQATPLDSYRGKVLLIVNTATGCGLTPQYQGLQELYERYQDQGFEILDFPCNQFMGQAPGSAEEINTFCSLHFQTTFPRFAKIKVNGKEADPLYVWLKDHKSGPLGKRIEWNFAKFLIGRDGQVFERFSSKTDPKQIEEAIQTLL

SEQ ID NO: 14871 - protein, 265 aa, Oryza sativa
  misc_feature (121)..(121): Xaa can be any naturally occurring amino acid
MESRPGGTNLVEPRGQGALPSGIPIQQPWWTTSAGVGAVSPAVVAPGSGAGISLSGRDGGGDDAAEESSDDSRRSGETKDGSTGQEKHHATSQMTALASDYLTPFSQLELNQPIASAAYQXYPDSYYMGMVGPYGPQAMSAQTHFQLPGLTHSRMPLPLEISEEPVYVNAKQYHGILRRRQSRAKAELEKKVVKSRKPYLHESRHQHAMRRARGTGGRFPDPRKMGIVPFPFWSGCRCSARFYLCNSCLVWEQIVLELKKETNSD

SEQ ID NO: 14872 - protein, 287 aa, Synechococcus sp. CC9311
MTTAPETSGNWIDEHHNGVRYGLEGRVLVEETSPFQRITVIDSQRYGKGLLLDGCWMTAEHQERHYHEALVHPALCSAKAIERVLVIGGGDGGTARECLRYPGVKHLDMVEIDGRVVDLSQEHLPSIGGGCWHDPRFHLTIGDGIAWAAEAENAFYDVVLVDGSDPTGPAEGLFNRAFFSNCCRILKPGGVFATQSESPEAFRQVHIDMVKLIRELFGHADPLYGWVPMYPSGWWSWTFAAKDAPRYLTVQSERAAAVAEGSAIWSPRWQQGAFNTIPAFIERELNQ

SEQ ID NO: 14873 - protein, 649 aa, Medicago sativa
MAGKGEGPAIGIDLGTTYSCVGVWQHDRVEIIANDQGNRTTPSYVAFTDSERLIGDAAKNQVAMNPTNTVFDAKRLIGRRISDASVQSDMKLWPFKVTAGPGEKPMIGVNYKGEEKLFASEEISSMVLIKMREIAEAYLGVTIKNAVVTVPAYFNDSQRQATKDAGVIAGLNVLRIINEPTAAAIAYGLDKKATSVGEKNVLIFDLGGGTFDVSLLTIEEGIFEVKATAGDTHLGGEDFDNRMVNHFVQEFKRKNKKDISGNPRALRRLRTACERAKRTLSSTAQTTIEIDSLFEGVDFYTTITRARFEELNMDLFRKCMEPVEKCLRDAKMDKSTVHDVVLVGGSTRIPKVQQLLQDFFNGKELCKSINPDEAVAYGAAVQAAILSGEGNEKVQDLLLLDVTPLSQGLETAGGVMTVLIPRNTTIPTKKEQVFSTYSDNQPGVLIQVYEGERTRTKDNNLLGKFELSGIPPAPRGVPQITVCFDIDANGILNVSAEDKTTGQKNKITITNDKGRLSKEEIEKMVQEAEKYKSEDEEHKKKVEAKNSLENYAYNMRNTIKDEKISSKLSGGDKKQIEDAIEGAIQWLDANQLAEADEFEDKMKELETICNPIIAKMYQGGAGEGPEVDDDAAPPPSGSGGAGPKIEEVD

SEQ ID NO: 14874 - protein, 682 aa, Listeria monocytogenes str. 4b F2365
MEIFLYVLALLVAIFISNLLNRFVPFVSVPLIQIGLGVLIAIMPITFDLQLNPELFLVMFIAPLLFNDGRQTDKAALWGMRMPILVLALGLVFATVVVIGYFVHWMIPTIPLAAAFALAAALAPTDAVAVSSLSGRINLPKRIMNLLEGEALINDASGLVAFQFAIAAMVTGVFSFMDASISFFVIAIGGILVGLILSWLKFRLLKWVRGLGMEDVTFHMLIQILTPFIIYLAAEEIHVSGILAVVAAGIMHSMEQKKMDPQSVKLNVVSQSTWSVIIFVLNGLVFLLLGTQLPAITEVVWNDSGSSNLQVMAYILSITAALILLRFLWVYISWSIGAKQRQKQNKKTQLPKFRPVVLTSLSGVRGAVTLASALAIPFFLDDGSLFPQRSLIIFIASGVILCTLVIATFILPLLAKSEEVTTEDERAETATRIRILRNVIRELKEQTLPETKAATDEVIEDYRRRIYDLQQNNSSNRGMDERERAKRLEIIQWERENTQKMTDEGRIVATDSYRYQHYLNMMEQAIKQRFRTKIKTAWMFLYRLIMLVIHPKKWGRITHKVKKGISKDSERFQAIRQLREENEVLIISKLKEQLTKENVDIIGPLITEHTIFLERVRKEHSPRGKRAKFEQKKREVQVLAFQLERDIIQNMFEKGGISRDLARDLRQNLNMIETYLYDDFLE

SEQ ID NO: 14875 - protein, 694 aa, Arabidopsis thaliana
MATCPPFDFSTKYYDGDGGCQRQSSFFGGTTVLDQGVGYAVILGFGAFFAVFTSFLVWLEKRYVGARHTSEWFNTAGRNVKTGLIASVIVSQWTWAATILQSSNVAWQYGVSGPFWYASGATIQVLLFGVMAIEIKRKAPNAHTVCEIVKARWGTATHIVFLVFCLATNVVVTAMLLLGGSAVVNALTGVNLYAASFLIPLGVVVYTLAGGLKATFLASYVHSVIVHVALVVFVFLVYTSSKELGSPSVVYDRLKDMVAKSRSCTEPLSHHGQACGPVDGNFRGSYLTMLSSGGAVFGLINIVGNFGTVFVDNGYWVSAIAARPSSTHKGYLLGGLVWFAVPFSLATSLGLGALALDLPISKDEADRGLVPPATAIALMGKSGSLLLLTMLFMAVTSAGSSELIAVSSLFTYDIYRTYINPRATGRQILKISRCAVLGFGCFMGILAVVLNKAGVSLGWMYLAMGVLIGSAVIPIAFMLLWSKANAFGAILGATSGCVFGIITWLTTAKTQYGRVDLDSTGKNGPMLAGNLVAILTVRPQNYDWSTTREIKVVEAYASGDEDVDVPAEELREEKLRRAKAWIVKWGLVFTILIVVIWPVLSLPARVFSRGYFWFWAIVAIAWGTIGSIVIIGLPLVESWDTIKSVCMGMFTNDRVMKKLDDLNHRLRALTMAVPEAEKIYLLELEKTKKNDEEG

SEQ ID NO: 14876 - protein, 543 aa, Gemmata obscuriglobus UQM 2246
MPTARAAALVLLFTALTSNLGAAPVPSEAGVPPPAPLDPRGLPGPLLIVGGGKLPADARRAFVDVAGKDRAKIVVIPTASADADDPKKADSFLKLWEQLKPASVVALHTRDAQKANDPAFVKPLAEATAVWFSGGDQSKLTAAYRGTLVEKELHRLHARGGIIGGTSAGAAVMTDLMIAGGTDTAKLGDGFGFLPGFVVDQHFVARKREKRLEGVIASHPTRVGLGLDEGTAVLVRGRVARVIGDSTVTVCIAKGAGRAAASDEYKAGSLLDLVQLQRAALNRAAKEPFPPAKPPTPDVKTGALVIVGGGGAGANIWKKFIDLAGGPDSTLVVVTTAMEDPLAPESVEEGALKRNGAKHVVALHTRDRKEADDPKFSDVLTKAKGVWFSGGRQWRFVDAYEGTLTEKRFREVLARGGVIGGSSAGASIQSEFMPRGHPLGNTVMAAEGYERGFGFLPGCAVDQHFFARKRTADMTGLMKRYPQYLGIGIDEGTALVVRGSVAEVIGRTKVAFYDTKKATDGDKDYEEVTVGEKYDLKERKKIK

SEQ ID NO: 14877 - protein, 635 aa, Haemophilus influenzae R2866
MGKIIGIDLGTTNSCVAVMDGDKARVIENAEGARTTPSIIAYTDNETLVGQPAKRQAITNPKNTLFAIKRLIGRRFESEEVQRDIKIMPFEITRADNGDAWVNVKGDKLAPPQISAEVLKKMKKTAEDFLGEAVTEAVITVPAYFNDAQRQATIDAGKIAGLDVKRIINEPTAAALAFGLGSSKENQVIAVYDLGGGTFDISIIEIDNFDGEQTFEVLATGGNTHLGGEDFDNRVIDYIIDEFKKEQNIDLRNDAMALQRVKEAAEKAKIELSSAQSTEVNLPYITADATGPKHLALNITRAKLEALVEDLVASSIESLKAVLKDADKGVSEIHDIILVGGQTRMPLVQQKVAEFFGKEARKDVNPDEAVAIGAAVQGGVLKGDVKDVLLLDVTPLSLGIETMGGVMTTLIEKNTTIPTKKSQVFSTAEDNQSAVTIHVLQGERKRAADNKSLGQFNLEGINPAPRGMPQIEVTFDIDANGVINVSAKDKNTGKEQQIRIQASSGLSDEEIQQMVRDAEANADADRKFEEVVQARNQADGIAHATRKQIAEAGDALNVADKEKIEAVVAELETAAKGEDKAEIEAKIEAVIKASEPLMQAVQAKAQQAGGEQPQQSSAKDDGVVDAEFEEVKDNK

SEQ ID NO: 14878 - protein, 232 aa, Bacillus cereus G9241
MLILDGMVMTTEKDEFVYHEMVAHVPLFTHPNPENVLVVGGGDGGVIREVLKHPSVKKATLVEIDGKVIEYSKQYLPSIAGALDNERVEVKVGDGFLHIAESENEYDVIMVDSTEPVGPAVNLFTKGFYAGISKALKEDGIFVAQTDNPWFTPELITTVFKDVKEIFPITRLYTANIPTYPSGLWTFTIGSKKHDPLEVSEERFHEIETKYYTKELHNAAFALPKFVGDLIK

SEQ ID NO: 14879 - protein, 478 aa, Mycobacterium tuberculosis H37Rv
MTEKTPDDVFKLAKDEKVEYVDVRFCDLPGIMQHFTIPASAFDKSVFDDGLAFDGSSIRGFQSIHESDMLLLPDPETARIDPFRAAKTLNINFFVHDPFTLEPYSRDPRNIARKAENYLISTGIADTAYFGAEAEFYIFDSVSFDSRANGSFYEVDAISGWWNTGAATEADGSPNRGYKVRHKGGYFPVAPNDQYVDLRDKMLTNLINSGFILEKGHHEVGSGGQAEINYQFNSLLHAADDMQLYKYIIKNTAWQNGKTVTFMPKPLFGDNGSGMHCHQSLWKDGAPLMYDETGYAGLSDTARHYIGGLLHHAPSLLAFTNPTVNSYKRLVPGYEAPINLVYSQRNRSACVRIPITGSNPKAKRLEFRSPDSSGNPYLAFSAMLMAGLDGIKNKIEPQAPVDKDLYELPPEEAASIPQTPTQLSDVIDRLEADHEYLTEGGVFTNDLIETWISFKRENEIEPVNIRPHPYEFALYYDV

SEQ ID NO: 14880 - protein, 527 aa, Burkholderia sp. 383
MSPVSAFKLVLLSFLAIVALECIAKRLRLPPAAALLIGGIGIAFIPGLPPINLDPELVLLVFLPPLLMDGAYFSVWEEFKRNVGGILLLAIGAVVFTTFAVGFAVHWVAPSLPWAACFALGAIVSPPDAVAAKAVLERVALPRRLMVLLEGESLLNDAAGLVLFRFAVVAALSGTFSLGHAVVGFAELGLGGVVVGIVVGKLVVWFLKLLDDDYLVITVAVIAGWIAYIAGEMVEVSGVIATVTAGMIVGWHQHEVFSAAVRTRGTAFWQVIVFLLEAMVFVLIGLSLRGAIHRLGGFEQVLATMVSPMFAVLAAVIVSRFVWIYAVEALKWPVRGIARRGEAPDWKAATIMSWAGMRGVVTLAIALSLPEAMPGRDVILVASFAVILVTVLLQGTTIGPLIRLLRLPQREERAAHHLTEPQTWAYIEAAQLAAIQPLVRDENGVVIHPRLLEQYTYRAELTERAKNEPTYPAEVRAAHYDVVLAAIKAGRTELLRLHRSGHIHDEMLHALERDLDLQEVSAQHARG

SEQ ID NO: 14881 - protein, 446 aa, Mycobacterium tuberculosis H37Rv
MDRQKEFVLRTLEERDIRFVRLWFTDVLGFLKSVAIAPAELEGAFEEGIGFDGSSIEGFARVSESDTVAHPDPSTFQVLPWATSSGHHHSARMFCDITMPDGSPSWADPRHVLRRQLTKAGELGFSCYVHPEIEFFLLKPGPEDGSVPVPVDNAGYFDQAVHDSALNFRRHAIDALEFMGISVEFSHHEGAPGQQEIDLRFADALSMADNVMTFRYVIKEVALEEGARASFMPKPFGQHPGSAMHTHMSLFEGDVNAFHSADDPLQLSEVGKSFIAGILEHACEISAVTNQWVNSYKRLVQGGEAPTAASWGAANRSALVRVPMYTPHKTSSRRVEVRSPDSACNPYLTFAVLLAAGLRGVEKGYVLGPQAEDNVWDLTPEERRAMGYRELPSSLDSALRAMEASELVAEALGEHVFDFFLRNKRTEWANYRSHVTPYELRTYLSL

SEQ ID NO: 14882 - protein, 191 aa, Zea mays
MGFSEAQEELVLRSWKAMKSDSESTALKFFLRIFEIAPGAKQMFSFLRDAGDAPLEKHPKLKAHAVTVFVMACESATQLRSTGDVKVREATLKRLGATHARAGVADAHFEVVKTALLDTIRDAVPDMWTPEMKAAWEEAYDQLAAVIKEEMKNAAAAEEQTKNAATAEEEIKNAAAAEEETTNAAAAVDGS

SEQ ID NO: 14883 - protein, 382 aa, Gluconobacter oxydans 621H
MLISLIVMILNPLFPGYDLQQVPQSLLGTINLPRTLLDGALSFLLFAGAMQVDLGLLLSRGKSVAALAILGTSLAVGLLAAPAWLIFPVFGLAVPFSWCVLLGAMLAPTDPVSVVGMLRRLGLPPALQATFAGESLFNDGVGVVIFGTMIGLATGETSSVSIGDFVLRFLVEAVGGGLLGAFTGWLTLLLLRGVEDTQIDLLGSLALATGTYSLANGLHMSGPIAVVVAGMSLAGKAGHRAITQKSREEMVVFWNLIDEILNALLFLLIGFELLEIRLHMAPLLTMLVVIPLSVLVRGASVFLSTMPVHLQPGERGRALGVLTWGGLRGGISVALALGLPAGELRETLLPVCYGVVVVTIIVQGLTMGRVVRWLYPETAPPS

SEQ ID NO: 14884 - protein, 494 aa, Staphylococcus epidermidis ATCC 12228
MNASALFKKIRVKNVIGTLDIQVDDITTDSRTAKEGSLFVASKGYTVDSHKFCQNVVDQGCGIVVVNRELELKGNVTQVVVPDTLRVASLLAHELYEFPSHQLTTYGVTGTNGKTSIATMIHLIYRKLNKNSAYLGTNGFQVNETKTKGANTTPETVALTKKIKEAVDANAEAMTMEVSSHGLALGRLRGVEFDVAIFSNLTQDHLDFHGTMEAYGHAKSLLFSQLGEDLSKEKYVVLNNDDDFSDYLASVTPYEVFTYGITHEAQFMAKNIKESLQGVEFEFCTPFGSFPVKSPYVGRFNISNIMAAMIAVWSKGTNLNEIINAVTELEPVEGRLEVLDPSLPIDLIIDYAHTADGMNKLIDAVQPFVKQKLIFLVGMAGERDLTKTPEMGRVACRADYVIFTPDNPANDDPKMLTAELAKGATHNNYIEFDDRAEGIRHAIDIAEPGDTVVLASKGREPYQIMPGHVKVPHRDDLIGLKAAYQKFGGGPLED

SEQ ID NO: 14885 - protein, 638 aa, Colwellia psychrerythraea 34H
MGKIIGIDLGTTNSCVAVLDGDSVRVIENAEGDRTTPSIIGYTAEGETLVGQPAKRQSVTNPENTLYAIKRLIGRRFEDKETQRDIDIMPFGIVKADNGDAWVQVKGEKIAPPQVSAEVLKKMKKTAEDFLGETVTEAVITVPAYFNDSQRQATKDAGRIAGLEVKRIINEPTAAALAYGMDKQEGDKVVAVYDLGGGTFDISIIEIDEMDGEHTFEVLATNGDTHLGGEDFDNRLINYLVAEFKKDQGMDLTSDPLAMQRLKEAAEKAKCELSSAQQTDVNLPYITADGSGPKHMNIKVTRAKLESLVEDMVKATLEPLKQALKDADLSVSKIDDVILVGGQSRMPLVQKTVTDFFGKEPRKDVNPDEAVASGAAIQAGVLSGDVTDVLLLDVTPLSLGIETMGGVMTKVIDKNTTIPTKQSQTFSTADDNQAAVTVHVCQGERKQASANKSLGQFNLEGIEPAQRGTPQIEVTFDIDADGILHVTAKDKNTGKEQKITIKASSGLSDEEVEQMVRDAEANADADAKFEELVTARNQADGMIHATRKQVEEAGEELPSEDKEKIEAALTELEEAVKGDDKEVIEAKTQALMEASAKLMEIAQAKEQAQSAPEGAQEADAAPADDVVDAEFEEVKDDK

SEQ ID NO: 14886 - protein, 377 aa, Solanum tuberosum
MPMDTEIKQSGDLIFRSKLPDIYIPKHLPLHSYCFENLSEFNSRPCLIDGANDRIYTYAEVELTSRKVAVGLNKLGIQQKDTIMILLPNCPEFVFAFIGASYLGAISTMANPLFTPAEVVKQAKASSAKIVITQACFAGKVKDYAIENDLKVICVDSAPEGCVHFSELIQSDEHEIPDVKIQPDDVVALPYSSGTTGLPKGVMLTHKGLVTSVAQQVDGENANLYMHSDDVLMCVLPLFHIYSLNSVLLCALRVGAAILIMQKFDIAQFLELIPKHKVTIGPFVPPIVLAIAKSPLVHNYDLSSVRTVMSGAAPLGKELEDAVRAKFPNAKLGQGYGMTEAGPVLAMCLAFAKEPFDIKSGACGTVVRNAEMKIVDP

SEQ ID NO: 14887 - protein, 655 aa, Chlamydia muridarum
MSEKRKSNKIIGIDLGTTNSCVSVMEGGQPKVIASSEGTRTTPSIVAFKGSETLVGIPAKRQAVTNPEKTLASTKRFIGRKFSEVESEIKTVPYKVAPNSKGDAVFEVENKLYTPEEIGAQILMKMKETAEAYLGETVTEAVITVPAYFNDSQRASTKDAGRIAGLDVKRIIPEPTAAALAYGIDKEGDKKIAVFDLGGGTFDISILEIGDGVFEVLSTNGDTHLGGDDFDEVIINWMLGEFKKQEGIDLSKDNMALQRLKDAAEKAKIELSGVSSTEINQPFITIDANGPKHLALTLTRAQFEHLASSLIERTKQPCAQALKDAKLSASDIDDVLLVGGMSRMPAVQAVVKEIFGKEPNKGVNPDEVVAIGAAIQGGVLGGEVKDVLLLDVIPLSLGIETLGGVMTPLVERNTTIPTQKKQIFSTAADNQPAVTIVVLQGERPMAKDNKEIGRFDLTDIPPAPRGHPQIEVTFDIDANGILHVSAKDAASGREQKIRIEASSGLKEEEIQQMIRDAELNKEEDKKRREASDIKNEADGMIFRAEKAIKDYQDKIPADLVKEIEEQIEKVRQAVKEDASTTAIKAASDELSARMQKIGEAMQAQSASAANAQGGPNINSEDLKKHSFSTRPPAGDNSSSTDNIEDADVEIVDKPE

SEQ ID NO: 14888 - protein, 468 aa, Alcanivorax sp. DG881
MSVKTLKLIKENDVKWVDLRFTDSSGKEQHVTLPVGEIDEDFFQDGKMFDGSSIAGWKGINESDMVMMPDDESAVMDPFTDVATLNLRCDILEPTTMQGYERDPRSVARRAEEYLKSTGIADTALFGPEPEFFVFDSVQWKSDMQGSMYNIHSEEAAWVSHEDFEGGNIGHRPGVKGGYFPVPPVDSLHDLRGAMCSAMESMGLKIEVHHHEVGTAGQCEIGVGANTLTAKADEVQILKYCVHNVAHAYGKTATFMPKPLIGDNGSGMHVHVSLGKDGKNLFAGDGYAGLSDEALYFIGGIIKHARALNAFTNASTNAYKRLVPGFEAPVMLAYSARNRSASIRIPFVNSAKARRVEARFPDPSANPYLCFASLLMAGLDGIKNKMHPGDAMDKDLYDLPAEEAKDIPTVAHTLTMALDCLEEDMDFLTEGDVFTKDMLDGYIALKRAEVERLNMTPHPVEFDMYYSC

SEQ ID NO: 14889 - protein, 162 aa, Parasponia andersonii
MSSSEVNKVFTEEQEALVVKAWAVMKKNSAELGLQFFLKIFEIAPSAKNLFSYLKDSPVPLEQNPKLKPHATTVFVMTCESAVQLRKAGKVTVKESDLKRIGAIHFKTGVVNEHFEVTRFALLETIKEAVPEMWSPEMKNAWGVAYDQLVAAIKFEMKPSST

SEQ ID NO: 14890 - protein, 116 aa, Silene diclinis
SVAKALRPGGVVCTQAESIWLHMHIIEDIVSNCREIFKGSVNYAWTTVPTYPSGVIGFMVCSTDGPAVDFKNPVNPIDKTEDEKRPLKFYNAEIHSAAFCLPSFAKRIIEAKANLT

SEQ ID NO: 14891 - protein, 538 aa, Triticum aestivum; identical to SEQ ID NO: 11127

SEQ ID NO: 14892 - protein, 160 aa, Debaryomyces hansenii CBS767
MSFYDLSPLDTNDKPFPFEELKGKVVLVVNVASKCGFTPQYKELEELNKKYQDKGLQIIGFPCNQFGGQEPGSSEEIASFCSLNYGVSFPVLKKVDVNGDKTDPVYKYLKGEKLGLLGLNRIKWNFEKFLIDKNGKVIERYSSLTKPASLLSTIEELLKK

SEQ ID NO: 14893 - protein, 116 aa, Silene diclinis
SVAKALRPGGVVCTQAESIWLHMHIIENIVSSCREIFKGSVNYAWTTVPTYPSGVIGFMVCSTKGQAVDFKNPVNPIDKTEDEKRPLKFYNAESGFLFAIIRKEGYCLIEAKANST

SEQ ID NO: 14894 - protein, 623 aa, Bifidobacterium bifidum
MARAVGIDLGTTNSCIATLEGGEPTVIVNAEGARTTPSVVAFSKSGEILVGEVAKRQAVTNVDRTISSVKRHMGTDWTVEIDGKKWTPQEISAQILMKLKRDAEAYLGEPVTDAVITCPAYFNDAQRQATKDAGKIAGLNVLRIINEPTAAALAYGLEKGKEDERILVFDLGGGTFDVSLLEIGKDDDGFSTIQVKATNGDNHLGGDDWDQKVIDWLVGEVKNKYGVDLSKDKIALQRLKEAAEQAKKELSSSTSTSINMQYLAMTPDGTPVHLDETLTRAHFEEMTSDLLGRCRTPFNNVLRDANISVSDIDHVVLVGGSTRMPAVKELVKELTGGKEANQSVNPDEVVAVGAAVQSGVIKGDRKDVLLIDVTPLSLGIETKGGIMTKLIDRNTAIPTKRSEVFSTAEDNQPSVLIQVYQGEREFARDNKPLGTFELTGIAPAPRGIPQIEVTFDIDANGIVHVSAKDKGTGKEQSMTITGGSGLPKDEIDRMVKEAEAHEAEDKKRKEDAETRNQAEAFAYQTEKLVNDNKDKISDEIAKEVTDKVNALKEALKGEDIEKIKSAQSELMTSAQKIGEALYAQQGAAGAADAAGAAAGASGAASNGGDDDVGAELLAHDDKK

SEQ ID NO: 14895 - protein, 538 aa, Chlorobium tepidum TLS
MSRIFTVIIMLLIGGFGYFIGWRMNSGTGGKMVDTYNLIRSYYVDPVNADSLQSAGVRGMLQSLDPHSIYLEPEKAAITQSNFNGNFEGIGVEFDVVRDTLLVVTPLAGGPSESAGIMPGDRIIGIDSKNVIGIKPSAVLGKLRGERGTRVRLRIYRPLTRRTIDFLVTRGKISTSSIDAAFLDDARTGYIRISQFVETTGSEFHNAVQKLRDKGMRKLIIDVRGNPGGYLDQAVAVADELLPAGKLIVYTKSRHGGDDQMKYLSTSGGIFEKGEVCLLVDRGSASAAEILAGALQDNRRALLIGELTFGKGLVQRQFKLPDDSVVRLTVSRYFTPSGRQIQREYDDGLQGRERYYKEMFTRNLPGGFIKKYGDLMYREGQNISVYSTGSLLKNTAADSLRAVLAKAGGIMPDYWVFGKPYSNLYQELYAKGVIEDIALKLIDDPSDPVQKYRSSATSYLDGYHVPVNLEALVRKECAEAKVQFNQAEFDRDRADIALALKARVARHLFGTEEQIRVLVSEGDPVMKVARHFIEKSAS

SEQ ID NO: 14896 - protein, 1132 aa, Arabidopsis thaliana
MVAQQLQERCGGTSQEDPVETTKSLICALNYISRDLPLPPHLFTAVSSIYHGASSSSLSDSDVSPPLPTSPPANKAPYGADLMGEFEDALLKQRPDCESGSRLIQLLDNRNKSHIQRRLSELEGGCFVLTLCVFESELPSTRGEDLQAKCLLELYGLKLRELQGKVRTAVSSEFWLRLNCADVSSQVFDWGMMRLPRPFYGVGDPFAMEADDQFRKKRDAELSIFVIGIADVLKVFVQRLSRLEEEEKNLIETAKRKFFAEVLNAVREFQLQIQATQKRRRQRNDGVQAWHGRQRQRATRAEKLRLMALKSDDQEAYMKLVKESKNERLTTLLEETNKLLANLGAAVQRQKDAKLPEGIDLLKDSESDLSELDAPRSEPLQDLLPDQDIDITESDNNDDSNDLLEGQRQYNSAIHSIQEKVTEQPSLLEGGELRSYQLEGLQWMVSLFNNNLNGILADEMGLGKTIQTISLIAYLLENKGVPGPYLIVAPKAVLPNWVNEFATWVPSIAAFLYDGRLEERKAIREKIAGEGKFNVLITHYDLIMRDKAFLKKIEWYYMIVDEGHRLKNHESALAKTLLTGYRIKRRLLLTGTPIQNSLQELWSLLNFLLPHIFNSVQNFEEWFNAPFADRGNVSLTDEEELLIIHRLHHVIRPFILRRKKDEVEKFLPGKTQVILKCDMSAWQKVYYKQVTDMGRVGLQTGSGKSKSLQNLTMQLRKCCNHPYLFVGGDYNMWKKPEIVRASGKFELLDRLLPKLRKAGHRILLFSQMTRLIDVLEIYLTLNDYKYLRLDGTTKTDQRGLLLKQFNEPDSPYFMFLLSTRAGGLGLNLQTADTVIIFDSDWNPQMDQQAEDRAHRIGQKKEVRVFVLVSVGSVEEVILERAKQKMGIDAKVIQAGLFNTTSTAQDRREMLEEIMRKGTSSLGTDVPSEREINRLAARSEDEFWMFERMDEERRRKENYRARLMQEQEVPEWAYTTQTQEEKLNNGKFHFGSVTGKRKRKEIVYSDTLSELQWLKAVESGEDLSKLSMRYNRREENASNTKTSTSKKVIESIQTVSDGTSEEDEEEQEEERAKEMSGKQRVDKSEEEEEEGEEENDGKAIFKWNTHKKKRSRYSFTCSSSDSRAQSSNGSRRK

SEQ ID NO: 14897 - protein, 167 aa, Triticum aestivum
YATAATDKSIYDYTVKDIDGKDVPLKKFKNKVLLIVNVASQCGLTTANYTELSHIYEKYKTQGFEILAFPCNQFGAQEPGSNTQIKQFACTRFKAEFPIFDKVDVNGPNTAPIYKFLKSSAGGFLGDLVKWNFEKFLVDKNGKVIERYPPTTSPFQIEKDIQKLLAA

SEQ ID NO: 14898 - protein, 156 aa, Glycine max; identical to SEQ ID NO: 13405

SEQ ID NO: 14899 - protein, 617 aa, Actinomadura spadix
MARAVGIDLGTTNSVVAILEGGEPTVIANAEGSRTTPSVVAFAKNGEVLVGEVAKRQAVTNVDRTIRSVKREMGTDWKQKIDDKDFTPQQISAFVLQKLKRDAEAYLGEKITDAVITVPAYFSDHQRQATKEAGQIAGLNVLRIINEPTAAALAYHLEKEGEATILVFDLGGGTFDVSLLEVGDGVVEVKATNGDNHLGGDDWDQKVVDWLVTKFKNAHGVDLSKDKMALQRLREAAEKAKIELSSSSETSINLPYITASSEGPLHLDEKLTRAEFQKMTSDLLDRCKTPFQQVVKDAGINVSDINHVVLVGGSTRMPAVADLVKELTGGKEANKGVNPDEVVAVGASLQAGVLKGEVKDVLLLDVTPLSLGIETKGGIFTKIIERNTTIPTKRSEVFTTADDNQPSVEIQVYQGEREIAAYNKKLGTFQLTGLPPAPRGVPQIEVTFDIDANGIVNVGAKDLGTGKEQSMVITGGSALPKDDIDKMMREAEQYAEEDRKRREETETRNNADTLVYFTEKFLRENDEKIPDDVKTEVRTALDEVKENLEGTDIDAIRSGVEKLAQVSQKMGARDVRPEPAREGGATATPLRARRATLPEDEVVDAEIVDDERKDGAA

SEQ ID NO: 14900 - protein, 166 aa, Zea mays
MVRSNSIDSCYSSIQDVTYSCGYCGYALNLSSAARNTANIGSKYGKQIRKKGIVAFVAVDETRFTQADEVTCAPRLRPWTWRLFRRRSRLLCGKCGGRIGAAYEVDEEDEDPAGLSACGGSDDDDDDLRTSPGDDVGASRRRNYLIRIGALQPSTDDPPPADPFSL

SEQ ID NO: 14901 - protein, 445 aa, Thermoplasma volcanium GSS1
MPEDVVEKTLKKLDQDKVEFLQMQFTDIVGNVKSLTVPKNRFENALTEGVVFDGSSVAGYAQIEESDMRAIPNLDSYTLLPDEFGKSRVVRFVCNVYSPDGSRFPGDPRYVLEKLLEKVHKEGNEFFVGPEFEFFLFKRDANGNPTTEPSDYGGYFDNTPLDSASDIRQQIVRELYELGYQPEAAHHEVAYGQQEIDLRYAPALKMADRIVMLKSIIKNVAERNGLYASFMPKPINGVNGSGMHIHQSIMSFDEKVNRFYDKNAKYGLSDYAMHYLGGILSHINEGSAILASTVNSYKRLIPGYEAPVYISWANKNRSALIRIPAGEGTRKRMELRCPDPAGNPYLQFAVILGMGLDGIEKKIDPPEPIEKDIFHMTKEERLQEGITSMPESLGEALHHLRNSKLMRDILGDHVYENFLTVKQREWDQFRSYVGEWEIKKYLPTL

SEQ ID NO: 14902 - protein, 637 aa, Photobacterium sp. SKA34
MGKIIGIDLGTTNSCVAVLDGDKPRVIENAEGERTTASVVAYTQDGETLVGQPAKRQAVTNPENTLFAIKRLIGRRFEDEEVQRDIEIMPYKIVKADNGDAWVEAKGQKMAAPQVSAEILKKMKKTAEDYLGESVTGAVITVPAYFNDAQRQATKDAGRIAGLDVKRIINEPTAAALAYGLDKQGGDRTIAVYDLGGGTFDISIIEIDEVEGEKTFEVLATNGDTHLGGEDFDTRLINYLVEEFKKEQGINLKTDPLAMQRLKEAAEKAKIELSSAQQTDVNLPYITADATGPKHMNIKVTRAKLESLVEDLVQRSLDPLKVALADADLTVGDITDVILVGGQTRMPMVQAKVTEFFGKEPRKDVNPDEAVAVGAAVQGGVLAGDVKDVLLLDVTPLSLGIETMGGVMTKLIEKNTTIPTKANQVFSTAEDNQSAVTIHVIQGERKQASFNKSLGQFNLEGIQAAPRGMPQIEVTFDLDADGILNVSAKDKTTGKEQKITIQASGGLSDADIEKMVQEAEANKENDKKFEELVTARNQADQLIHGTRKQIEEAGDALPADEKAKIEAAVAELEEARKGEDKEAIDAKVQAVVAASQKLMEIAQQKAQAQQADGAGEQQAKQDDDVVDAEFEEVKDNK

SEQ ID NO: 14903 - protein, 208 aa, Arabidopsis thaliana
MTSSVIVAGAGDKNNGIVVQQQPPCVAREQDQYMPIANVIRIMRKTLPSHAKISDDAKETIQECVSEYISFVTGEANERCQREQRKTITAEDILWAMSKLGFDNYVDPLTVFINRYREIETDRGSALRGEPPSLRQTYGGNGIGFHGPSHGLPPPGPYGYGMLDQSMVMGGGRYYQNGSSGQDESSVGGGSSSSINGMPAFDHYGQYK

SEQ ID NO: 14904 - protein, 571 aa, Chlamydomonas reinhardtii
MSNATCTNLFGLTQYDGQCQFFGSGDTALPEGLGWFILVGLGGVFALIPTALIYLDRRINGGGKDSESFATAGHTIGMGLTACDIVAKWTWAATLLQSSNVAYSFGVSGPFWYAAGATVQVLLFAILAVEIKRKAPTIHTFLEIIRCRWGNVAHIIFMVYGFMTNLIVTAMLILGGAAVMEALTGVSVYASSFLIPAGVVIYTCVGGMKGTMVAEWLNVYATNPDLGSISKVWQRLSAIAETKPVVDNMGGSYMTMFSKSGIIFGIINIIGNFGTVFVDQSYWQGAIAAKPSATYKGYLLGGLCWFAIPFTMATTMGLGARALDLPITKAEASAGLVPPALAVHLMGQGGAFLITFQLFIAVTSTACAEQMAVSTIVVYDIYKAYINKNASSRSMLILQRVMVLVYAIISGVVSVILLKLNVSLGWVYLFMGIVIGSAVFPIAACLTWAKCSAVAACTSAIVTTPLAIMTWLITAAKLNDGVINLDTTGQDYPMLAGNLVFSEGYFTMWVVIAMIWGIVASTVCIVLPVFEARHMILMVLSGKKHIPSTVEESVQAKNEHMSLPPVQPNRA

SEQ ID NO: 14905 - protein, 314 aa, Coprothermobacter proteolyticus DSM 5265
MRVKNWLWFSDFFSSSEVHLHGFTEHLLEKTTRFQDIDIVDTPFFGRMLIIDGDVQSSEKDEFIYHEAMVHPAMLLHPHPRRVLIMGGGEGATAREVLKHKTVEELYMVDIDEDMIAAAREFLISWHQGAFDDPRMHLIFDDARKVVENFENGSLNVVISDLTEPFEMGPSFPLFTKQFAQVVYDKLDDQGVYVVQSSILRPLIYTMHAAIRRTLQAVFPVVRSYAVYVESFDTPWSFIIASKGKDPMDWTSEELHGAIRERISGELKMYDAESHWHMFYLPKNIREAIDEPGPILDEEHPIYLTRKGDILPYK

SEQ ID NO: 14906 - protein, 107 aa, Phaseolus lunatus
NEINLGDYKGRVLIIVNVASQCGLTNSNCTELSQLYEKYKQKGLEILAFPCNQFGAQEPGSNEQIQEFVCTRFKAEFPVFDKVDVNGDKADPLYKYLKSSKGGLFGD

SEQ ID NO: 14907 - protein, 313 aa, Vitis vinifera
MAEHTREGEENGVSGCMSSVIPGWFSEISPMWPGEAHSLKVEKILFQEKSDYQNVMVFQSATYGKVLVLDGVIQLTERDECAYQEMITHLPLCSIPNPKKVLVIGGGDGGVLREVARHSSVEQIDICEIDGMVVDVSKKFFPDVAIGYDDPRVNLHIGDGVAFMKNAPEGTYDAVIVDSSDPIGPAQELFEKPFFASVARALRPGGVVCTQAESIWLHMHIIEDIVTNCRQIFKGSVNYAWTTVPTYPSGVIGFMLCSTEGPAVDFKHPVNPIDANESACKSSRPLKFYNSEIHAAAFCLPSFAKKVIDSKTT

SEQ ID NO: 14908 - protein, 454 aa, Methanocaldococcus jannaschii DSM 2661
MHWGMEMNVEQAIEYVKKNNVKFIRFQFVDILGFPKNVAYPVKAGEKGIEELREIFENGVWFDGSSITGFVGIEESDMLLKPDLSTLSVLPWRPEEKSVARVICDVYKDEKTPFEGDPRSRLKAILEELKKEMNGEYFVGPEPEFFLLKRDPHNPHRWVPADDGGYFDVEPLDDAPDIRRDIVLALENLGFHVEASHHEVAPGQHEVDFKFDNALKTADSVITFKMTIKNIAKKHGLKATFMPKPFFGMNGNGMHCHQSVWFNGEPSFYDPEGPYNGLSETCLSYIAGILSHAKALVAITNPTVNSYKRLVPGYEAPVNIAWANKNRSAIIRVPAARGKATRIEFRAPDPTCNPYLAFACMLAAGLDGIKKKMTAPEPVERNIFKMSEEEKKQLGIESVPANLAAALDELECDEVLQKALGKHIYENYMEIKRAEWDDFRTAVTDWETGKYLIY

SEQ ID NO: 14909 - protein, 538 aa, Zostera marina
MGISLAAEIAKYGVLSTSDHTSVASICLFATLLCACIVIGHLLEENRWVNESITALLIGLLTGFIILLTTQWKSSHILVFSEDLFFIYLLPPIIFNAGFQVKKKQFFRNFMTIMLFGAVGTLISFSIISLGAITLLGKINIGLTDIGDYLALGAIFSATDSVCTLQVLNQDETPLLYSLVFGEGVVNDATSVVLFNAIQHFDLVNIDFTIILHFAANFLYLFFTSTVLGVWSLCNQKLIFRKVAAKTFIFFLLIGDFGVFNFISSKSVLTFYSSSMFFCGIVMSHYTWHNVTESSRITTKHTFAALSFIAEIFIFLYVGMDALDIEKWRFIRDSPGKSVAISSIILGTVMVGRAAFVFPLSFLSNLSKKYDHEKISFNQQITIWWAGLMRGAVSMALAYNQFTTSGHTDIHENAVMITSTITVVLFSTVVFGLLTKPLISYLVPPQQGLKHMSSLCSDSVSPKSFLAALLGNNGHEGEETHGVPQPTSLRMLVTSPTRTVHYYWRKFDDAIMRPMFGGRGFVPFVPGSPTEEPSVHPF

SEQ ID NO: 14910 - protein, 664 aa, Glycine max
MACSFSRGSSCFPLAIIVSLGCLFRDFSIAKEEATKLGTVIGIDLGTTYSCVGVYKNGHVEIIANDQGNRITPSWSFTDSERLIGEAAKNLAAVNPERVIFDVKRLIGRKFEDKEVQRDMKLVPYKIVNKDGKPYIQEKIKDGETKVFSPEEISAMILTKMKETAEAFLGKKINDAVAYFNDAQRQATKDAGVIAGLNVARIINEPTAAAIAYGLDKKGGEKNILVFDLGGGTFDVSILTIDNGVFEVLATNGDTHLGGEDFDQRIMEYFIKLINKKHKKDISKDSRALSKLRREAERAKRALSSQHQVRVEIESLFDGVDFSEPLTRARFEELNNDLFRKTMGPVKKAMEDAGLQKNQIDEIVLVGGSTRIPKVQQLLKDYFDGKEPNKGVNADEAVAYGAAVQGSILSGEGGEETKDILLLDVAALTLGIETVGGVMTKLIPRNTVIPTKKSQVFTTYQDQQSTVSIQVFEGERSLTKDCRLLGKFELSGIPPAPRGTPQIEVTFEVDANGILNVKAEDKGTGKSEKITITNEKGRLSQEEIERMVREAEEFAEEDKKVKERIDARNSLETYVYNMKNQVSDKDKLADKLESDEKEKVETAVKEALEWLDDNQSVEKRYEEKLKEVEAVCNPIISAVYQRSGGAPGGGASGEDDDEDSHDEL

SEQ ID NO: 14911 - protein, 614 aa, Lactobacillus sanfranciscensis
MASNKVIGIDLGTTNSAVAVMEGGKPKIITNPDGSRTTPSVVAFKNGEIQVGEVAKRQEITNPNTVRSIKSHMGEEGYTVDIDGKKYTPQQISAMILQYIKGYAEDYLGDTVSEAVITVPAYFNDAQRQATKDAGKIAGLDVKRIINEPTAAALAYGLDKQDKDEKILVYDLGGGTFDVSVLELGDGVFQVLSTNGDTHLGGDDFDQRIIDYLVAEFKKENGVDLAQDKMALQRLKDAAEKAKKELSGVNQTEISLPFIASNDNGPLHLQTTLTRAKFNELTHDLVEKTKIPFENALKDAGLSTSDIDEVILNGGSTRIPAVQEAVKEWSGKEPNHSINPDEAVALGAAVQGGVLTGDVKDVVLLDVTPLSLGIETMGGVMTKLIEKNTTIPTSKSQTFSTAADNQTAVDIHVLQGERPMAADNKSLGRFQLTDIPAAPRGIPQIEVTFDIDKNGIVNVSAKDKGTGKEQKITIKDSNGLSDEEIEKMMNEAKANEEADKKKKEEVDLNNEVDQLIFQTDKTLKDVEGKVSEDEIKGVKDAEEELKKAKADGNLDDMKAKKDTLNEKVQAVAVKLYQQQQSQGGEAGAANGDASKKDDNTVDGDFHEVHDDDKK

SEQ ID NO: 14912 - protein, 642 aa, Xanthomonas campestris pv. campestris str. ATCC 33913
MGKIIGIDLGTTNSCVAIMDGGKARVIENSEGDRTTPSIVAYTKDGEVLVGASAKRQAVTNPKNTFYAVKRLIGRKFTDGEVQKDISHVPYGILAHDNGDAWVQTSDSKRMAPQEISARVLEKMKKTAEDFLGEKVTEAVITVPAYFNDSQRQATKDAGRIAGLDVKRIINEPTAAALAYGLDKNGGDRKIAVYDLGGGTFDVSIIEIAEVDGEKQFEVLATNGDTFLGGEDFDNRVIEYLVDEFNKDQGIDLRKDPLALQRLKDAAERAKIELSTSQQTEVNLPYVTADASGPKHLNIKLTRAKLEALVEDLVKKSIEPCRTALNDAGLRASDINEVILVGGQTRMPKVQQAVADFFGKEPRKDVNPDEAVAVGAAIQGGVLAGDVKDVLLLDVTPLSLGIETMGGVFTKIIEKNTTIPTKASQTFSTAEDNQSAVTVHVLQGEREQARFNKSLAKFDLSGIEPAPRGMPQVEVSFDIDANGILHVSAKDKKTNKEQKVEIKAGSGLSDEEIQRMVADAEANREEDKKFQELVQTRNQADGLIHATRTAITEHGSKVGGDVIGKVEAALADLETAMKGDDKAQIEARSKTLEEAGQSLYAAAAAAEQGGNADAASGNAQASKAADDVVDAEFTEVKDDKKA

SEQ ID NO: 14913 - protein, 108 aa, Zea mays
MGLEAAMALGDPPADYASIATVGLFVAFMCVCIVVGHLLEENRWMNESITMLFIGLGTRAVILFASSEKHSRVLVFSEDLLFIYLLPPIIFNAGNGIHEAGASLIERQ

SEQ ID NO: 14914 - protein, 308 aa, Cryptococcus neoformans var. neoformans JEC21
MSSYRTCTTMATAGPSRRPDGRTPAQLRPLHLSIGELDRADGSARFAFGSNAVLASCSGPIEVRLREELPDKATFEVNHRPLEGVGATPSRALVTTLETIFPPILSLEKHPRSLVQLVVQSLVPSTGRVVYGSVFGAEGVGAEQNTWPATDKDDYAYIPESRKDAARISPAAGYTFTARAASINASTLALLSAGTISILALPVAVALVVTTKGRVMLDPEADEEKQAKARLGFGWAWGAVFGTANEENNMGVAGQNDGGAELVWIESEGSFTRQEWSEALQMSKTASKAILEFIRIQLDAHLSSHQLS

SEQ ID NO: 14915 - protein, 466 aa, Mycobacterium sp. JLS
MIDSRTAPTASEVLARLHAEDIATVILGGTDTHGVMRGKRVPISQLPRMLEHGMPMCDVFWVMHVDESDLVARPDGYRGYFPTERQGYPDILAVPDLTTLRIVPWHNDTALLLCDWELPADHRPVPIAPRSVLRRVVERADAMGYRPLSALELEFYLLREKAGTTHRKRADELVPLQEAPSTYGVVMGSLQEDIGALIRRHMLDYGLPVEACNPETGPGQFEITLRYGNSLKSADDAFLFKSAVKEVAAQNDLLATFMAKPVTDWAGNSCHVHLSLRDIAGGGVFFDQDAPDQLSTALRHFAGGILHTMREFTALMAPTPNSYRRFVPYSWAGTTATWGVDNRSVGLRVIREGDHGTRVEHRQPGGDANPYLATAAALAGGLHGLLNEIEPRELSTTDIYSQPSEDLPVLPATLAEAVDLLADSAAAREWFGDDFVDHYVLMKRAEIAAQSVAVTDWEVARYLEAM

SEQ ID NO: 14916 - protein, 618 aa, Tetragenococcus halophilus
MSKIIGIDLGTTNSAVSVLEGGESQIITNPEGNRTTPSAVAFKNGEIQVGEVAKRQAVTNSDTVTSIKRHIGEDGYKVEANNKSYTPQEISAMILQHIKSFSEDYLGEEVEKAVITVPAYFNDSQRQATKDAGKIAGLEVERIVNEPTAAALAYGLDKTEQDEKILVFDLGGGTFDVSILELGDGVFDVLSTAGDNKLGGDDFDEKIIDYMVSEFKKENGIDLSKDKMALQRLKDAAEKAKKDLSGVSSTQISLPFITAGEDGPLHLEMNMTRAKFDELTSSLVDRTKEPVRQALKDADLSQSDIDQVILVGGSTRIPSVVESVRKETGKEPNKSVNPDEVVAMGAAIQAGVISGDVKDVVLLDVTPLSLGIETMGGVFTKLIDRNTTIPTSKSQVFSTAADNQPAVDIHVLQGERPMAADNKTLGRFQLTDIPAAPRGVPQIEVSFDIDKNGIVNVSAKDLGTQKRTKITIQSSSGLSDDEIDKMVKDAEANAEADEKRKEEVDLRNEVDTLLFTVDKTLSDLDGKVDEEEVKKAENARDELKAAVEADDIEDMKTKRDALNEIVQNLSVKMYEQASQEQQGDQAAQGSDDASNASGDDDVVDADFEEVDDDDNDNQ

SEQ ID NO: 14917 - protein, 442 aa, Carboxydothermus hydrogenoformans Z-2901
MSYTKNDIMDMVREQNVKFIRLQFTDIFGVLKNVAIPVEQLEKALNNELMFDGSSIEGFVRIEESDMYLRPDPNTFAVFPWRPRNGAVARLICDVYNPDGTPFEGDPRYVLKRALAEAKELGYTMYVGPELEFFLFQVDAEGKPTLVTHDNAGYFDLSPVDLGENARRDMVLALEQMGYEVEASHHEVAPGQHEIDFKYSDALDVADKIVTFKVVVRSIAQRHGLHATFMPKPLFGVNGSGMHTNQSLFKDGQNAFYDPNGELQLSETAYYYIGGIMKHIKAITAIANPVVNSYKRLVPGYEAPVYIAWSARNRSPLIRIPAKRGSSTRIELRSPDPSANPYLALAVMLKAGLDGIKNKIKPPAPVNQNLYEMTAEERKALGVDTLPGSLKEAIDCLLEDKVIQEALGKHVFERFVEAKLKEWDEYRVQVHEWEVKKYLTMY

SEQ ID NO: 14918 - protein, 242 aa, Chlamydomonas reinhardtii
MHRTLVCERAVLDRADGSAKWTQEGSSVLAAVYGPRQAKLQKEDAERAVVEVVFKPRAGLQGHEDRSLELEIRGILEGVIPLGMFPRTSVMVVLQVLQDDGGALSCALNAAAAALVDAGVPLNSMFSSVSCVLTSDRRLVLDPDALEEQAAAARFCFTYPHHFDLTTAVPAAATGATTASPGADDASATAVVGESVLGSRCVGAFSGDELLDAAALCRRGCERVATFARLSLAKSLQAAGGA

SEQ ID NO: 14919 - protein, 188 aa, Arabidopsis thaliana
  misc_feature (132)..(132): Xaa can be any naturally occurring amino acid
MASSMLSSAAVVTSPAQATMVAPFTGLKSSAAFPVTRKTNKDITSIASNGGRVSCMKVWPPIGKKKFETLSYLPDLSDVELAKEVDYLLRNKWIPCAEFQLQHGFVYREHGNTPGYYHGRDWDMWKLPLFGXCTHSPPVLYEAPQCQKEFPGALLKDHRDLKTPPTFQCSSFLGLQTPSFSRKPIFSF

SEQ ID NO: 14920 - protein, 350 aa, Zea mays
MYSSGTTGASKGVILTHRNFISAAAMMTADQDALGEGPNVFLCFLPMFHIFGLSVITFAQMQRGNSVVVMSRFDMDSVMAAVQRHRVTHLFCVPPVMIALAKLGSVGKYDLSSLRFIGSGAAPLGKDVMEGVAKNFPEAVIAQGYGMTETCGIISLEYPEKGQIRQFGSTGALVSGVEAKIVDVETLICLPPNQLGEICVRGPNIMQGYFNNVQATEFTIKQGWLHTGDIGYFDEGGQLFVVDRLKELIKYKGFQIAPAELEGLLLSHPEILDAVVIPFPDAEAGEVPIAYVVRSSESSLTEVDVQKFIEKQVAYYKKLRRVTFVDSVPKSASGKILRRELISKVRSSKL

SEQ ID NO: 14921 - protein, 321 aa, Tulipa gesneriana
MAAFSYKQQQHQSNLLLDSTDHHHLSFQFQDLMTNSTSPFLYYPMPTSATNSTLDSASDNQKDCSSSVAEPQSSTEIRKRKDKSDGSCMTSVQSKGTKRETKSRKSQKKPKANESDEMKERTQEEEEAPVGYIHVRARRGQATDSHSLAERVRREKISERMKLLQALVPGCDKVTGKAVMLDEIINYVQSLQNQVEFLSMKLATVSPMLYEFGLDIEGQMNDLERVGSFPQDSQLLVPKTIPFQHRVCEEDTRSYSIGETSAPFLLHDQGPLSFSGVPFSVEMGTKHKAFSVNFCSTTSHLPTIENRRADKGRWGYGRKST

SEQ ID NO: 14922 - protein, 474 aa, Frankia alni
MFTKAEDVLRYIRDEDVQFIDVRFCDLPGIMQHFTIPTQVFAESVFTDGLMFDGSSIRGFQAIHESDMLLLPDPQTAFVDPFREHKTLAMTFFIHDPITKEQYSRDPRNIAKKAETYLRGTSIADTAYFGPEAEFYIFDDVRYDYNPYGSMHHVDSVEAAWNTSRKEEGGNLGYKPRFKGGYFPVPPTDHFTDLRSEMTRVLYETGITVEMQHHEVGTAGQAEIDIRYDTLLKTADNLMLYKYVIRNVARSRGKTVTFMPKPLFEDNGSGMHVHSSLWKDGEPLFYSPNGYGGLSDTARYYIGGLLHHAPALLAFTNPTTNSYRRLVPGYEAPVNLVYSARNRSACCRIPLGGDSPKAKRVEFRVPDPSCNPYLAFAAMLMAGLDGIRNKIDPPDPIDKDLYELPPDELAAVPQVPGSLEKVLDALEADNDFLREGDVFTTDLIETWLEYKRLNEVDAIRLRPHPYEFTLYYDI

SEQ ID NO: 14923 - protein, 181 aa, Arabidopsis thaliana; identical to SEQ ID NO: 13484

SEQ ID NO: 14924 - protein, 456 aa, Coprothermobacter proteolyticus DSM 5265
MTIDEVMKCIKDEGISQVDLKTTDIWGRWRHVTLASTYFSEKTFTEGVGFDASNLGYGNVVQSDLLMIPDPSTAFIEEREGQRLISMICDVYSVDNGKPSPLDPRGILRKAVSSISDVAENVMLAPEYEFHVFNSVAFNLAPNEVFYGVDGEEGFWNEGVTGEYIIGKKGGYHQVTPFDTLATLRGAIVERLMSLGVPVKYHHHEVGTCQVEIELDFCDALKAADYTMLIKYVARNVAKRMGYVVSFMPKPLYDEAGNGMHVHQYLVKNSVNIFSGQELFGLSSTALSYIAGVLTHGKSLMAFTNPTTNSYRRLTPGFEAPTTAVFGLGNRTAAVRIPAYVKDPSKVRIEFRTIDATTNPYLGFAAMVLAGVDGIRRGLDPVSLGYGPVEDSAEGRGEQLATSLSEACDALLKDNGYLSGVFPEALIERWTQKKLQEEREVNRVPNALEFKLYFDV

SEQ ID NO: 14925 - protein, 454 aa, Haloferax volcanii
MTEDNALTDGGLSDEAQAVIDEIEEKNVDFLRLQFTDILGTVKNVSIPASQAEKAFTEGIYFDGSSIDGFVRIQESDMRLEPDPSTFAVLPWRKKENSAAGRLICDVFNTSTGEPFSGDPRGVLKRAIEPEELGYDVNVAPEPEFFLFEEDEDGRATTVTNDAGGYFDLAPKDLASDVRRDIIYGLESMGFDIEASHHEVAEGQHEINFTYDDALSTADNVRTFRSVVRAIAAEHDLHATFMPKPIPRINGSGMHTHISLFKDGENAFHDGDDEFDLSDTAKSFVAGILDHAPAITASLTRRSTPTRRLVPGYEAPVYIAWSDRNRSALIRKPAARTPAASRIEARFPDPSCNPYLAFAALIHAGLDGVEKGLDCPDPVRENIYEFDEAKREEYGIETLPKTSAARRRPRRDEVIQEALGDHVFEKFVEAKRSEFKDYLVDVSQWELDRYLETF

SEQ ID NO: 14926 - protein, 181 aa, Arabidopsis thaliana
MASSMFSSTAVVTSPAQATMVAPFTGLKSSASFPVTRKANNDITSITSNGGRVSCMKVWPPIGKKKFETLSYLPDLSDVELAKEVDYLLRNKWIPCVEFELEHGFVYREHGNTPGYYDGRYWTMWKLPLFGCTDSAQVLKEVEECKKEYPGAFIRIIGFDNTRQVQCISFIAYKPPSFTEA

SEQ ID NO: 14927 - protein, 286 aa, Glycine max
MYPSSSSSSSSSSQSMTQAGLTRYGSAPGSLLTSTVDSLIGGPRPSPYFSRKPSESPCKEQRSFHNHPPFFASSLLRQKNSPDGFLSHLSNHHGVGFTITPGGLSNSNSNSNCSLLKSQLSFTHESLSNTVNVDPSSTTFGMDPWDNNSIAFSATSTKRSKTNTNDPDILHSLNSALESQFNLPHTSLEMSTVDKLLHIPEDSVPCKIRAKRGCATHPRSIAERERRTRISGKLKKLQDLVPNMDKQTSYADMLDLAVQHIKGLQTQVQKLHKEMENCTCGCKQSK

SEQ ID NO: 14928 - protein, 296 aa, Solibacter usitatus Ellin6076
MKYALSLVTTLLAGTLWAQSPEYGPASGTLVIQGGGSDAGTGIFETFINKAGGLGAKIIVVPTAGGNRAADGSLIVYEEEKVLASWKKRGATNVHMLHTHDPKIADTEEFAKVLRDARGVWFVGGRQWNIVDSYANTLTFREFHKVLERGGVIGGSSAGATIQGDYLVRGAIAGSEIMMTPEPEHEHGFAFLRKVAIDQHINTRNRWDDLIPVIKKYPAMLGIGLSEGTAIVVTGDRFEVIGKWKVAIHDNRHLYQPWEKPYYILSPGDVYNMKTRAIEKYGTGSPVPPPAIAAAK

SEQ ID NO: 14929 - protein, 468 aa, Pseudomonas syringae pv. tabaci
MSKSVQLIKDHDVKWIDLRFTDTKGTQHHVTMPARDALEDDFFEVGKMFDGSSISGWKGIEASDMILLPDDETAVLDPFTEEPTLILVCDIIEPSTMQGYDRDPRAIARRAEEYLKSTGIGDTVFAGPEPEFFIFDEVKFKSDISGSMFKIFSEQGSWMSDQDVEGGNKGHRPGVKGGYFPVPPFDHDHEIRTAMCNALEEMGQTVEVHHHEVATAGQNEIGVKFNTLVKKADEVQTLKYVVHNVADAYGRTATFMSKPLYGDNGSGMHVHMSIAKDGKNTFAGEGYAGLSDLALYFIGGIIKHGKALNGFTNPSTNSYKRLVPGFEAPVMLAYSARNRSASIRIPYVNSPRGRRIEARFPDPSANPYLAFAALLMAGLDGIQNKIHPGDAADKNLYDLPPEEAKEIPQVCGSLKEALEELDKGRAFLTKGGVFSDDFIDAYIALKSEEEIRVRTFVHPLEYELYYSC

SEQ ID NO: 14930 - protein, 695 aa, Haemophilus influenzae R2866
MVMKFKMSKNVICYAWLSVCLSSAIPAFAVQPTLKPSDISIPAISEESQLATKRATTRLTQSHYRKIKLDDDFSEKIFDRYIKNLDFSHNTFLQSDIDELRQKYGTKLDEQLNQGDLSAAFDIYDVMMKRRYERYTYALSLLDKEPDLNGQDQIEIDREKAAAPQTEADANKLWDARVKNDIINLKLKDKKWSEIKAKLTKRYNLAIRRLTQTKADDIVQIYLNAFAREIDPHTSYLSPRTAKSFNESINLSLEGIGTTLQLEDDEISIKSLVPGAPAERSKKLHPGDKIIGVGQATGDIEDVVGWRLEDLVEKIKGKKGTKVRLEIEPAKGGKSRIITLVRDKVRIEDQAAKLTFEKVSGKNIAVIKIPSFYIGLTEDVKKLLVKLENQKAEALIVDLRENGGGALTEAVALSGLFIADGPVVQVRDAYQRIRVHEDDDATQQYKGLLFVMINRYSASASEIFAAAMQDYRRGIIIGQNTFGKGTVQQSRSLNFIYDLDQSPLGVLQYTIQKFYRVNGGSTQLKGVAADINFPEIIDAKEYGEDKEDNALAWDKIPSASYMEVGNIDYIDNAVNILNEKHLARIAKDPEFVALNEELKVRNERRDRKFLSLNYKMRKAENDKDDARRLKDLNERFKREGKKALKDIDDLPKDYEAPDFFLKEAEKIAADFVIFNSDQKINQANGLSEAKTESKK

SEQ ID NO: 14931 - protein, 138 aa, Yersinia pestis
TAVMDPFFADSTLIIRCDILEPGTMQGYDRDPRSISKRAEDFLKSSGIADTVLFGPEPEFFLFDDIRFGSSINGSHVSIDDVEGAWNSSTKYEGGNKGHRPAVKGGYFPVPPVDSAQDLRSAMCLTMEEMGLVVEAHH

SEQ ID NO: 14932 - protein, 538 aa, Arabidopsis thaliana; identical to SEQ ID NO: 10526

SEQ ID NO: 14933 - protein, 712 aa, Debaryomyces hansenii
MPVNQKKTSIIAKRQRSIFEFTQTGNDIDVQNSFNPCEVIDLTDDAESFGVKLEQEEINTGGEIEAMGERELDVDAVNCPMCNRSLVDFSMDNRILHIEECLSLVTLKEDVPTITSESSDLKKEEINGTNKSDVDTGRNKRKNRHVLPSDKEKEKYLNKKAKIEHSKPKVIKPPASISASRSKAQIPDVKVLTFPASVNSNYQIAVDAFNYSPHELINKYFLTHFHSDHYGGITKKWCYERVFKDGDDFEDESKYKKIIFCSTITAKLLSLRFRIDPKFIMPLETNRRYLIQSFDTDVETEDGFIQTDDLMLPGLFVTPITANHCPGSVIFLFESLSNNGQRLRVLHCGDFRVNREILDHPRLLTFNIANQGDLCLDKVYLDTTYMSPSYNFPKQELVCNTVSDMFYDLIYSQGETETTDSLFTTWFGVLKQSRITDFITKRDNQYKKKKFLVLIGTYVIGKERLAISISQRLNNCPIYVSTINSRNDKVDLVKSFDDNYLNQVLTTDDLGGSDSECMVHLVPMKIVSSLEELSNYFNHNRYFERFERCVGLRPTGWSFSNKYASTYKDEQDSNMQHSSDLNRLSSSCQDLVKIMKTEPTFSFIENILPQSPLSSLISKSKKVNHDESLYRIYTLPYSEHSSFRELSFFAIFLKIKVIIPTVNISDESSIIKMDSIIKSWELIREYKMNPGSTQELESNVARGIQDLCIEDF

SEQ ID NO: 14934 - protein, 205 aa, Eucalyptus globulus subsp. globulus
MVRGKTQMKRIENDTSRQVTFSKRRNGLLKKAFELSVLCDAEVALIIFSPRGKLYEFSSSSLCKTIEKYQTRAKDMEAKTAEISMQPSKGNTLDMEKKIEHFEISRRRLLGEGLDSCSVEELQQTENQLERSLTKIRARKNHLIREHIERLKAEERKLLEEKRKLLQEIECGKGLTPVSSERPREEIRAESMDVETELFIGPPKR

SEQ ID NO: 14935 - protein, 894 aa, Gemmata obscuriglobus UQM 2246
MYELAITPQGHLLVREEPSEASDPKLPKGLLDAYRESPAGGMLRSASEDAEAVLPPSFEFARSIARLYLTALCRVAPAEVGATVPELPPPAGDLDRAVLQAPPMTGLEYLTPAALSDWWRELDTLVRGEIERHPGGAHGYLRERNPQWRFVGRVTFHLAENKRNPDYPFAFLATFANGLTPQGKVRHEPLGQALQQYAGEQNRAAMLNLLLPVSRAAESSELVRRLVDSGEIYRPLAWSPREAYAFLRAIPLFESNGLIVRVPDWWSAQKPPRPRVSVKVDSKNATGIGVDAMLQFSVGVSLDGEALGPDEIAQLLESSGGLVPLKGKWVEVDREKLQEALKHWKEVERDVRYEGISFFEGMRLLSGANIVKEDGGEHPAADREWSGLTAGPGLDAILEGLRSPDAQREPAPPGLKAELRPYQRAGYGWLRFATRLGLGACLADDMGLGKTIQVIALLLDLKRDGRNKASLLVVPASLIANWKSELAKFAPSLSFAVAHPSETGATDEEIASAADSLDLVVTTYGMLVRQDWMKRHNWRLAILDEAQAIKNSGTKQTRAAKELTADGRIAMTGTPVENRLSDLWSLFDFLNPGLLGTAKQFGSFVKRLQSAPTPSFEPLRNLVRPYILRRLKTDKRVISDLPDKTEVKAYCGLSKHQAALYQHAVDDLARQLEGTDGIQRRGIVLAQLMRLKQICNHPAQVAGTGDYAADRSGKFRRLAEIAEEIASRQEKVLVFTQFREIADPLAEFLATLFGRSGLVLHGGTSVKKRKEFVDQFQREDGPPFFVLSLKAGGTGLNLTAAAHVVHFDRWWNPAIENQATDRAFRIGQKKNVLVHKFICRGTVEERIDEMIARKSRVADEAIGGSDSGEVLLTEMDNDTLLQFVKLDLHQASDG

SEQ ID NO: 14936 - protein, 153 aa, Lupinus luteus
GALTESQAALVKSSWEEFNANIPKHTHRFFILVLEIAPAAKDLFSFLKGTSEVPQNNPELQAHAGKVFKLVYEAAIQLEVTGVVVTDATLKNLGSVHVSKGVADAHFPVVKEAILKTIKEVVGAKWSEELNSAWTIAYDELAIVIKKEMDDAA

SEQ ID NO: 14937 - protein, 159 aa, Listeria monocytogenes EGD-e
MNVHDFSEKAMNGKEIALSDYKGKVLLIVNTASKCGLTPQLEGLEAMYKKLGGDNFEILGFPCNQFLRQDPGSDEEILEFCQMNYGVTFQMFSKIKVKGKDASPLYKYLTEQTGGKKVEWNFAKFLIDENGEVIERFPSKMKPEDFEDKVEALVAKVNN

SEQ ID NO: 14938 - protein, 159 aa, Yarrowia lipolytica CLIB122; identical to SEQ ID NO: 628

SEQ ID NO: 14939 - protein, 515 aa, Brassica napus; identical to SEQ ID NO: 14097

SEQ ID NO: 14940 - protein, 461 aa, Helicobacter hepaticus ATCC 51449
MRPKRNMSTEFYITKAVSMMNKSRVVVAGIIVSLLASSALFVGLSADESHKAKPKVQEVNKLESFKKLRRIMAIVEESYVDELSLDEIVNKAIDGLLSNLDAHSNYLNKKKFDDLRANIDGEFGGIGITVGLKDGALTIIAPVDGTPGDKAGLKSGDVIVKVNDKSTIDMSIDDAVNLMRGTPRTKVELTIVRKGEAKPLNFSIVRDIIKMDFVKVRKIQDTDFAYVRVASFDKNVTRNVLSSLKQMGKVKGIVLDLRNNPGGALDQAVDLSRLFIKNGVIVTQKGRNKNDNVEYRATNAPYASVPIVVLVNGGSASASEIVAGALQDHKRAVLIGEQTFGKGSVQTFMQLDQNEGLKLTTAKYYLPSGRTIQAVGVTPDIIVYPGVAPENENSFSIKESDLKRHLQGELEKVNEQNTKTETASDDKKNITQAMIYQDIQLKSAIDVLKAWGVIGALNPNK

SEQ ID NO: 14941 - protein, 237 aa, Glycine max
HVARPLSPQNLSPNQNDVAAATLNGSDLHFPRHTLRAFDATRFPFTPNPNPISLLHFSNTSATDPPFLRRFFASSTAIALTLYHDTFYHISLTTSTLITLDDIHSITTLTRPINSSSTRPPAGAKKRRRNGGSVAEVFEKWSREIGLGLGVNGNRVASNALSVCLGKWRSLPFRVAAATSFWLGLRFCGDRGLATCQNLARLEAISGVPAKLILGAHANLARVFTHRRELQEGWGES

SEQ ID NO: 14942 - protein, 276 aa, Thiomicrospira crunogena XCL-2
MLYPTWGQQFVMNDVLFEVDTGHQHLIIFKNDQWGTVMALDGVIQTTEKDEFIYHEMMTHVPMFAHGNAKKVLIIGGGDGGILREVLKHPTVDAVTQVEIDQQVIDMCKQYLPKHSAGAFEHPKANVVIADGVDFVNECTEKFDVIISDSTDPIGPGEVLFTSRFYQGIQSCLNDGGVFVAQNGVSFMQTDEVTTTFKRLSPLFNESSFYSAAVPTYVGGIMTFAWATNDLSLKQQSVDVIRSRYDAAAIETRFYTPELHIGAFALPKYVQQAIQA

SEQ ID NO: 14943 - protein, 533 aa, Mycobacterium sp. JLS
MSASLLAVLVVAVLLAAVARRADVSAPLALVVAGLAVGLIPGVPDIQLDPDLVLYVVLPPLLWSAGLESSYVALRRNVRSIGMLAVGLPLATTFAVGVVAYWAVPELTIAAALTLGAIVAPPDAVSATAVGRRLGLPRRLMTLLGGESLLNDATALTAYKVALGLAIGGSASWTGGLWTFALAAVGGVVVGGALGAVIVYVRSRLRDPLVESALGLVAPFGIYLLAEEVHGSGVLAVVVAALILGQHSTNASYATRLQDSAVWKAVQLLLESFAFLLIGLQLPKVIEELAGISAAVLVVSSLAVLATVIAVRIVWVYLFAYLPRLVSPALRYREPSPRPAQVFVVAWAGMRGVVSLAAAFAVPATTLSGAEFPGRPQLVFLTFVVVVGTLLLHGLTLPWLIRRLGVQGDEAHTDAVAAAAAQDRAARAAAERLDEVLEQQRTDGTVDDVHERAADVLRGWNTRRRNSAWEQLGRDEADIGESPAAAFRRLRLEMLAAERATLIAERDSGHIDDKVLRSVLHGLDLEEATLNRR

SEQ ID NO: 14944 - protein, 841 aa, Oryza sativa Indica Group
MVVAVANGTKVEAAPAAGAGAAANADSPTSVLEDEKISECKNGDASDTVEAIKQEDDHLKVLAEERADDFVDASSSLTVELAANNGDLSPHPVPVKEEDQLLEPVKEEKADDFVDATSSLPIDLEAKNGDASLITDAMKEEEDKLHEARVKADEEEEARKRAEAARLAFDPNARFNKLDELLTQTQLYSEFLLEKMETIADVEGVDTPDEEEPVEEKKKGRGRKRKATSAPKYNNKKAKKAVAAMLTRSREDCSPEDCTLTEEERWEKEQARLVPLMTGGKLKSYQIKGVKWLISLWQNGLNGILADQMGLGKTIQTIGFLAHLKGKGLDGPYLIIAPLSTLSNWVNEISRFVPSMTGVIYHGDKAARAEIRRKFMPKTTGPNFPLIVTSYEMAMSDAKQLAHYKWKYVIVDEGHRLKNSKCILLRELKRLPMDNKLLLTGTPLQNNLAELWSLLNFILPDIFSSHQEFESCTNLCCTSTDLFGVYWDAMFTFVSALCLLYRFDFCAKGGEEEQEESEEKRKVDVVSKLHAILRPFLLRRMKEDVEHMLPRKKEIIIYANMTNHQKEIQNHLVEQTFDEYLHEKSEIGMYPPVEKLLEQCGKFQLLNRLLNLLLARKHKVLIFSQWTKVLDIIEYYLETKGLQVCRIDGSVKLEERRRQIAEFNDLNSSMNIFILSTRAGGLGINLTSADTCILYDSDWNPQMDLQAMDRCHRIGQTRPVHVYRLATSHSVEGRIIKKAFGKLRLEHVVIGKGQFEQDRAKPNALDEAELLALLRDEQDEEDRMIQTDITDEDLLKVMDRSDLTGPPANADAAPLVPLKGPGWEVVVPTKSGGGMLTSLTS

SEQ ID NO: 14945 - protein, 551 aa, Burkholderia xenovorans LB400
MDIVFTVLILLLAVAASGVVIRILPIALPLPLVQIAIGALLAWPKLGLHVTFDPEIFMMLFIPPLLFADGWRIPKREFFMARRSILMLALGLVFVTVLVVGYFVHALVPSISLPVAFALAAVLSPTDAVALSGIVGKGKIPGRLMHILEGEALMNDASGLVALKFAIAAALTGVFSLRDASISFVIISVGGIATGAAVSWLFSFVSARFLNLTEDGDPAPGVVMTLLIPFAAYLIAERFELSGILAAVAAGMTMNYATLANAGPVSSRVRANSTWTMIEFVFNGMVFILLGLQFPHILGRALLDAHETSNAQVGLLIGYIAAVAAALYAMRFVWVWLLRWVASRGATKRGMANAVPGLRTVAVTTVAGVRGAVTLAGVLSLPEVLPDGVPLPGRDLAIFIASGVILLSLLVAVVALPLLLSGWRRGKDPHAAEELLARTLAAQAAIRAVDEVHDTECADLDESASAYAADVTARVMDLYRRRLATLDEEQEPRELARRADALEFRMKLAAMRAERKTLLALRSSQAINDETLNKLMREVDLSETALTARRK

SEQ ID NO: 14946 - protein, 471 aa, Alkalilimnicola ehrlichei MLHE-1
MARTAADVLKLIQDEDVKFVDLRFTDTRGKEQHVTIPAHELDEDMFEDGKMFDGSSIAGWKGINESDMIMMPDPETATLDPFFDDPTINLTCDIIEPSTMQGYEKDPRSVARRAEAYLKSTGLGESALFGPENEFFVFDDVRWGADMSGSFYKIDSEEAGWNSERVYGDGNMGHRPKVKGGYFPVPPVDSLHDLRAAMCEALEDLGLTVEVHHHEVATAGQCEIGVGPNTLVKKADEIQKLKYAVHNVAHAYGKTATFMPKPLVGDNGSGMHVHQSVMKDGNNVFGGDSYGGLSEFALYYIGGIIKHARAINAFANASTNSYKRLVKGFEAPVLLAYSARNRSASIRVPYVPNPKARRIEVRFPDSTANPYFAFAAMLMAGLDGVQNKIHPGEAMDKDLYDLPPEEERDIPKVALSLNEALEALDQDREFLKQGGVFTDDTIDAYIELKMEEVERLNMTTHPVEFDLYYSV

SEQ ID NO: 14947 - protein, 882 aa, Hordeum vulgare
MAATAYERRLLAAADLVLSADGKSQLPRLSSADLGVTADLKPHQLDGVHWLIRRYHLGVNVLLGDEMGLGKTLQAISLLSYLKIKSIAPRPFLVLCPLSVTDGWLSEFGKFCPTLKVIQYVGDTAHRRHIRRTMHDDVQKSSHSNDLPFDVMLTSYDIALMDQDFLSQIPWLYVVIDEAQRLKNPSSVLYNVLEERFMMPRRLLLTGTPVQNNLSELWALMHFCMPSVFGPLDEFLSTFKEAGNLLSGSEANQANRQFKILKHILRAFMLRRTKALLIESGILELPPLTELTVMVPLAPLQKKIYLSVLRKELQTLLSFTGGSSRHQSLQNIVVQLRKACSHPYLFSGIEPEPYEEGEHLVQASGKLIVLDLVLEKLHRLGHRVVLFAQMTQTLDILQDFLELRNYTYERLDGSVRAEERFAAIRNFSSQATKGVVRDDNNPSGAFVFMISTRAGGVGLNLIGADTVIFYEQDWNPQADKQALQRTHRIGQLNHVLSINLVSQRTIEEVIMRRAERKLKLSHNIFGDKDATDGKGKDFGNEANDMRSIILGLHQFDPADTAAETINEETLAKLKSMSENVIKMRTHEPAEKDDRAFEINPDLTDGSGAMITRACDSISIDPGVDEAAYLSWVERFKEASHSIEDVPVELERQRPAPEDKLLKREANKKKAEEKRLARWKDLGYQTLGVKVPDNIPNQNISDSGSVQLVYGDCTDPSKVCAAKPAIIFSCVDNSGTWGHGGMFDALTSLSTYIPDAYHRASEVDDLHMGDLHLIELDEADCSRSLDAPLWVALAVVQSYNPKRKIPRSEISMSDLELCLSKAASSAAQRSASIHMPRIGQRSGSQRSEWYTIERLLRKYASLHGIDIFVYYFRRPSRQQPDSD

SEQ ID NO: 14948 - protein, 445 aa, Lactobacillus delbrueckii subsp. bulgaricus
MSKVITEEEIRKDVEEKNVRFLRLAFTDINGTLKNLEVPVSQLDDVLGNQTRFDGSSIDGFVRLEESDMVLYPDLATWLVLAWTTVEEGTIGRLVCSVHNVDGTPFEGDPRNNLKKVIAEMEEMGFSDFEIGFEAEFFLFKEGKNGEETTKVSDHSSYFDMASEDEGAKCRREIVETLEKLGFRVEAAHHEVGDGQQEIDFRFDNALATADKLQTFKMVVKTIARKYHLHASFMAKPVEGLAGNGMHTNMSLLKDGKNAFYDKDGQYNLSTTALTFLNGILEHARAITCVANPTVNSYKRLIPGFEAPVYISWASRNRSPMVRIPNANEVGTRLEMRSTDPTANPYLLLSACLKAGLTGIKEGKLPMAPVTSNLFEMTDDERKELGIKPLPSTLHNAIKAFKEDEVVKSAFSEHIVDSFLELKETEWALYTQSVSEWEVKRYFNY

SEQ ID NO: 14949 - protein, 472 aa, Neisseria gonorrhoeae FA 1090
MSIKNAVKLIEESEARFVDLRFTDTKGKQHHFTVPARIVLEDPEEWFENGPAFDGSSIGGWKGIEASDMQLRPDASTAFVDPFYDDVTVVITCDVIDPADGQGYDRDPRSIARRAEAYLKSSGIGDTAYFGPEPEFFVFDGVEFETDMHKTRYEITSESGAWASGLHMDGQNTGHRPAVKGGYAPVAPIDCGQDLRSAMVNILEGLGIEVEVHHSEVGTGSQMEIGTRFATLVKRADQTQDMKYVIQNVAHNFGKTATFMPKPIMGDNGSGMHVHQSIWKDGQNLFAGDGYAGLSDTALYYIGGIIKHAKALNAITNPSTNSYKRLVPHFEAPTKLAYSAKNRSASIRIPSVNSSKARRIEARFPDPTANPYLAFAALLMAGLDGIQNKIHPGDPADKNLYDLPPEEDALVPTVCASLEEALAALKADHEFLLRGGVFSKDWIDSYIAFKEEDVRRIRMAPHPLEFEMYYSL

SEQ ID NO: 14950 - protein, 894 aa, Oryza sativa Japonica Group
MAPPQMYERRLLAAASLLLSADAQGQPPHAAAQLGVGVTAELKPHQVDGVAWLIRRYQLGVNVLLGDEMGLGKTLQAISLLSYLKIHSISPGPFLVLCPLSVTDGWLSEFNKFCPSLRVIQYVGDKLHRRDLRRMMFQDVQKSSSSSHSTELPFDVMMTTYDIALMDQEFLSQIPWHYVVIDEAQRLKNPSSVLYNVLEQRFIMPRRLLLTGTPIQNNLSELWALMHFCMPSIFGTLDQFLSTFKQSGDSLTGGETNKTDKQFKILKHVLRAFMLRRTKALLIQSGILALPSLTELTVMVPLTPLQKKLYLSVLRKELQTLLTFTGGLSRHQSLQNIVIQLRKASSHPYLFSGIEPEPYVEGEHLVQASGKLVMLDLILKKLHEVGHRVLLFAQMTQTLDILQDFLELRQYTYERLDGSVRAEERFAAIKSFSSQPTKGVVRDDNQSGAFVFMISTRAGGVGLNLIGADTVIFYEQDWNPQADKQALQRAHRIGQLNNVLSINLVSQRTIEEVIMRRAERKLKLSHSVIGEEDATYGKGKYVENEASDMRSIIFGLHLFDTSDTTAETMNDDTASETIKEETMLKLKSMSEKVVLMRSHEPSEKDERAFEINPNMTDNSGAVVTRVSDSVNVDPDFNEAAYLSWLEKFKESSHSKENTRAELERQRIAPEEKFLKREAIKKKVEEKRLAKWESLGYQTLKIKDPDILPNQNIPDSGSVQLVYGDCTNPSVVCPAKPAIIFSCVDNSGTWGHGGMFDALANLSTCIPDAYNRASEFDDLHLADLHLIQLDEAKCNRSLDAPLWVALAVVQSYNPRRKVPRSEISIPDLELCLSRVAFSAAQHSASIHMPRIGLQGGGGGGSQRSEWYTIERLLRKYSSLHGVDIFVYYYRRGNKH

SEQ ID NO: 14951 - protein, 666 aa, Photobacterium profundum SS9
MNCRFRFSLIAAGMMLAASAQALEAKYSLSDLPQLAPEKQHATASKRVASRFTRSHYKQFSLNDQFSSDMFDRYVEMLDFNKSFLTAADVRLLEKWQNKFDDQLKVGDTSGAFEIFNKVLQRRYDRYQYALTLLDNEIKFNTNDDFVVDRSELDWAADRNALNEIWRQRVKYDALNLKLADKDWKEIKETLSKRYNNALKRLTQTHSEDVFQIYMNAFAREVDPHTSYLSPRNAEQFQSEMNLSLEGIGAVLQVVDDYTVIRSLVAGGPASSSKKLAAGDRIIGVAQDGKSVVDVIGWRLDDVVQLIKGPKGSKVKLEILPEGKNAKSYDITIVRDKIRLEDRAVKSEVKTVGSKKIGVIEVPSFYVGLAEDTKKEIAKLNESQVDGVVIDLRNNGGGALTEATALTGLFINSGPVVQVRDSYGRVKVNGDSDDRVYFDGPLTVLQNRYSASASEIFAAATQDYGRAVVIGEQSFGKGTVQQHRSLNHIYDLFDKPLGHVQYTIQKFYRINGGSTQNLGVVPDIAFPTAVDPAETGESVEDNALPWDSIKPASYQKLVNYSPILPSLKAKHEQRISKDMEFGFIRDDIQEYKKDKDIKTISLNEKMRIAEQDKTDSKRLARLNKRQKVLGKKPFATLEDVPKDYESPDAYLDEAVDITADLVNAQS

SEQ ID NO: 14952 - protein, 490 aa, Deinococcus radiodurans R1
MRLSDLAAALQLPAPETDPQTDTEVTGVTHNAAWVQPGSAFVAIRGAKFDGHSFMEQAQAAGAVAVLGEGLADGQTSPLPYLTVPNARAALADAAAALAGHPSRELKVVGVTGTDGKTTTSWLTRHLLRSAGLATGLLSTVGYELPDGELRHFPAHFTTPEAPQVQDTLREMVAAGAQATVLEASSHALSLDRVRGVDWDVAVWTHLSSEHLDFHGTLDNYFADKRKLVERARFAVLNVDDPWTAQLRGIAPGETTYSAENQHADWRAQDIEERHSGLHFRVVSPAGDFQAELPMIGRFNVANALAGMAAAHHLGATALQLQAGLASFRGVPGRMELVPGGATSPRVIVDFAHTPPSLEKALGTLRATTAGHLWVVIGSAGGPRDPYKRAPLGEVATRLADHAILTEEDCRDTPLQDILNEMERGAREEGRSNFVSIGDRREAIRYAVTHAQPGDTVLLAGKGPEDTLERATETLPWNEVAEARAVLAER

SEQ ID NO: 14953 - protein, 467 aa, Rhodobacter sphaeroides
MSKVADALKLMKDEEVEYVDIRFTDPRGKLQHVTLVADLVDEDFFEEGFMFDGSSIAGWKSIDQSDMKLIPDAGSVYIDPFYAEKTLCVHCNVVEPDTGEAYSRDPRGAAVKAEAYLKASGIGDVAYFGPEAEFFIFDDVRYSVTPAKVAYQIDADAGAWNTDSEYEMGNLAHRAGHKGGYFPVNPIDEAQDLRGEMLSTMKRMGMKVDKHHHEVATCQHELGLIFGGLTEQADNILKYKYVIHNVAGMHGKTVTFMPKPMKGDNGSGMHVNMSIWKEQALFAGDKYADLSQEALWFIGGILKQPSVNALTNPATNSYKRLIPGFEAPVLRAYSARNRSGCVRIPWTESPNAKRVEARFPDPSANPYLAFAALLMAGLDGIKNKIDPGPASDKDLYDLPPEELAAIPTVCGSLREALEELEKDHDFLLAGDVFTKDQLEGYMALKWEEVYAYEHTPHPVEYQMYYSC

SEQ ID NO: 14954 - protein, 688 aa, Haemophilus ducreyi 35000HP
MLTKIRIFMKVNKLSRLIAFCLGTMISTAFAIEPKIKANELVLPQPTELHNLSTKRVTARLTQSHYRKFNLDDEFAGKIFNRYIDWLDVAHNTFLQSDIDELRTKYASKLDEELYEGKLDSAFEMYDVMVKRRYERYKHVLSLLDKPLDLKGRDQIENEREKAPFPVTIEEANKLWEQRVKNDVISLTLKNKKWPEIKKTLIKRYNLAIKRLTQVKPDDVLQTYLNAFAREIDPHTSYLSPRAAKAFQESMNLSLEGIGATLSMEDDITTIKSLIPGAPAARSKKLGVGDKIVGVGQEKGEIEDVIGWRLDDVVDKIKGKKGSKVRLEIEPAKAHKTKIITLTRDTVRLEDSAAKLTIDKVAGKNIAVIKIPAFYIGLANDMHKLLAKIKTKKIEGLIVDLRDNGGGSLTEVVELTRLFIKSSPVVQVRDAFNRIKVYEDEPQIQVDKSVVTTNKPLYDGKLMVMINRHSASASEIFAAAMQDYNRAIIIGQQTFGKGTVQQSRSLNFVYDLDRDPLGFIQYTIQKFYRIDGGSTQLKGVQADIKFPEIIDAEKTGESFEDNALPWDKIPAANYQEVGNARDVVAVLTEKHQARIAKEPEFITLSENIAIRKERDQRKFTSLNLEERKKEDQADDMKRLKDLNARFIREGKKPLKNLDALPKDYEGPDFFLKEAKQMMFDWLQINKKA

SEQ ID NO: 14955 - protein, 456 aa, marine gamma proteobacterium HTCC2080
MIAPLSVTDFAARCGAELHCEIDKLLEVSGLAIDSRQVKPGDLFVAIPGVKVDGHDYLEAALERGAGAALVQQQVSSALPQLIVSDSEAALQTFGAMTRAAYDGILVGITGSAGKTTAKNMLAEILSRAGSVVATKGNQNNELGVPLTLADLNNDTEYAVLELGAGKPGDIARLCEMARPNIAILLNVAPAHLANFGSLDAISKTKGALLDDLPADGLAVINADDPRVFDWHVRASPTRCLTFGMNCKADYQAIDLQLKGFSGSDFVLQTPEQDVEVTLNVPGRQGIYNALAAAAVADALGISAITIREGLAAVKPAPGRGGVAVLSPDASLIDDTYNANPVAVRAAIDVLASEPGRRRLVLGAMLELGLDEEKLHAELGVYAREAGLDELWAVGSEAAPAAVAFGEGALCFTDTSELITYAPTLWGANTTLVKASRGAQLEVAVNHWLTGGEGIC

SEQ ID NO: 14956 - protein, 181 aa, Arabidopsis thaliana; identical to SEQ ID NO: 11199

SEQ ID NO: 14957 - protein, 160 aa, Arabidopsis thaliana; identical to SEQ ID NO: 12877

SEQ ID NO: 14958 - protein, 492 aa, marine gamma proteobacterium HTCC2080
MTASASHQHILDRINAALPETAWPNMNGHMTLDSRKVGEGDIFVALPGVQRDGRDYIKQALAQGAALVLAEANDFNISTDADSSSRIMRVPDLSAELPSLAKDFYGDPSQEMALVAVTGTNGKTSVVEFVGQLLRALGVEAGCVGTLGSRLEAAPADAMNTTPDVLTINHQLADWQHQGIKHVALEASSHALHQGRLASLSLHTGVFTNLTRDHLDYHGNAADYAAAKLSLFNTFNLKRAIFNADDPVASQVLAVAGASAIGITLEGAEAHVQVAIRSMRPMLLEIQSPWGAAEINLALSGRFNAFNVVAAIVAVTGLGHDFHRVCAAAESLKPVPGRMERILMSGNRLAVVDYAHTPDALESALQTLRGETKGRLWVVFGCGGDRDSGKRSLMGRSAARWADHIVVTSDNPRGEMPEKIIEDVISGCGNQAEVVVDRAEAIRHALALAESGDTVLVAGKGHEDYQDIAGVRLPFSDQRVLSELQSSDGARS

SEQ ID NO: 14959 - protein, 162 aa, Arabidopsis thaliana
MDPMDIVGKSKEDASLPKATMTKIIKEMLPADVRVARDAQDLLIECCVEFINLISSESNEVCNKEDKRTIAPEHVLKALQVLGFGEYVEEVYAAYEQHKYETMDSQRSVKMNSGAEMTEEEAAAEQQRMFAEARARMNGGVTVPQPEQLEEPQQQQQTSLQS

SEQ ID NO: 14960 - protein, 117 aa, Arabidopsis thaliana
MCRGFEKEEERRSDNGGCQRLCTESHKAPVSCELCGENATVYCEADAAFLCRKCDRWVHSANFLARRHLRRVICTTCRKLTRRCLVGDNFNVVLPEIRMIARIEEHSSDHKIPFVFL

SEQ ID NO: 14961 - protein, 114 aa, Triticum aestivum
  misc_feature (16)..(16): Xaa can be any naturally occurring amino acid
  misc_feature (23)..(23): Xaa can be any naturally occurring amino acid
CGEGISLVGASRVVIXDVHLNPXPFTRQAIGRAFRPGQQKKVFVYRLVAADSPEENTHKTAVKKEVIPKLWFEWSEQRCTSEGFQLNEIDIDDCGDELLDNRAMRQDIKALYTR

SEQ ID NO: 14962 - protein, 590 aa, Saccharum officinarum
PGSTHAGRSIAKCQIVLLHASYPFSKEASYLASVYSQVYLDFGLAIPKLSVHGMTSSLKELLELAPIKKVMFSTDGYAFPETYYLGAKRARDVVYRVLSAACEDGDLSIQEAIEAVEDIFRRNALHLYKLNVVNGSINHETTIVADSVSLSSVEEDVLFVRIIWSDASGQYRCRVVPAGRFYEITRNKGVGLTFAAMGMTSFCDGPADGSNLTGVGEIRLVPDMPTLVRIPWSRREEMVMADMQIRPGECWEYCPRNAMRKVTKVLLDEFNVTMKAGFENEFFLRRKLVSDGVEQWVPYDNTNYCSTSAFDGASSILQEVYSSLKASGIVVEQLHAEAGKGQFEIALKYILCTLAADNLIYARETIQSIARKHGLLATFLPKPDLNDFGSGSHVHLSLWENDQNAFMGSSKDNFHGMSKTGAQFLAGVYHHLPSILAFTAPHPNSYDRIQPDTWSGAYQCWGKENREAPLRTACPPGVPLDLVSNFEIKSFDGCANPHLGLAAIVAAGIDGLRRDLKLPEPIESNPSDHASKLKRLPQNLQESVEALSADKVLHELIGDKLVTAAIAIRKAEIDHFSKNPGAFNDLIFRY

SEQ ID NO: 14963 - protein, 180 aa, Bacteroides fragilis YCH46
MKAFFSFVAALVLSLSMAAQNKSFYDFTVKTIDGKEYPLSGLKGKKVLVVNVASKCGLTPQYAELQELYDQYKDQNFVIIGFPANNFMGQEPGTNEEIAKFCSVNYDVTFPIMAKISVKGKDMAPLYHWLTEKKLNGKQDAPVQWNFQKFMIDENGNWVGFVAPKESPFSETIISWIEKK

SEQ ID NO: 14964 - protein, 450 aa, Thermoanaerobacter tengcongensis MB4
MELKEKRVFVAGLGVSGVALCRVLVNLGANVIAYDRKNEIALKEALEELKDLPVEIKLGEFKEEFLKGIELVVLSPGISLESEIVKKAKDMGLEILGEVELAYRLSKAPIYAITGTNGKTTTTSLLGEMFRNAGRKVYVAGNIGYPLIYAALEAGPNDHIVAEISSFQLETVKEFRPKISCIINITPDHLDRHKTFENYANIKGRIFENQREEEYVVLNYDDPVTWGLKERAKAKVFPFSRKKVLENGAYVKEGFLYLQNKKVIKVEDIYIPGEHNLENALAASSVAYLSGIEVDAIETTLRTFKGVEHRIEFVAEIEGIKFYNDSKGTNPDASIKAIQALKTPIVLIAGGYDKGSEFDEFVKTFDKKVRKLILIGQTAQKIKKTALKYSYPEEDIFLVDSLEEAVRKAYEVAEKGDSVLLSPACASWDMFKNFEERGKAFKKAVMDLRR

SEQ ID NO: 14965 - protein, 215 aa, Arabidopsis thaliana; identical to SEQ ID NO: 10805

SEQ ID NO: 14966 - protein, 158 aa, Arabidopsis thaliana
MDPMDIVGKSKEDASLPKATMTKIIKEMLPPDVRVARDAQDLLIECCVEFINLVSSESNDVCNKEDKRTIAPEHVLKALQVLGFGEYIEEVYAAYEQHKYETMDTQRSVKWNPGAQMTEEEAAAEQQRMFAEARARMNGGVSVPQPEHPETDQRSPQS

SEQ ID NO: 14967 - protein, 492 aa, Thermoanaerobacter tengcongensis MB4
MVSIGARRPIMRLVDLLKGVKHEIKGNPNVDISGVCYDSRKAKPKYLFIAIKGFKTDGLLYVEEAIKNGAVAVVTDRDISEYPGVTVVLVEDARAAMAKIASNFYNNPTSKLTLIGITGTNGKTSVTYMLKAILEQQNNKVGLVGTIQNMIGDRVIPTTHTTPESLDLQELFSLMVNEGVKYVVMEVSSHSLALHRVDSCDFDIAVFTNLSQDHLDFHESMEEYAKTKSKLFKMAKKASVINIDDKYSSMMIESSKGKVLTYGIKDFAYVMAKEIKNSLSGVKFKVQIQDKKEEISLKIPGLFSVYNALAAITVADFLGIPLRSVREALSHVTVKGRFEPVETGRDFYVFIDYAHTPDGIRNIMEALKEYEAGRKILVFGAGGDRDKSKRPLMGEVAGKYADFCILTSDNPRSENPKEIIAQIEEGIKKTNCPYVVIEDRREAIRYALSNAQKDDVIILAGKGHETYQIIGDKVIPFDEREIVKEILAESEK

SEQ ID NO: 14968 - protein, 493 aa, Vibrio parahaemolyticus RIMD 2210633
MTKAISMDALLSPWVDCPSLASVLVSELELDSRKVQPGTTFVALVGHVVDGRKFIASAIEKGANAVIAQACDVKAHGTIDIIDDIPVVYLDALDKCLSEIAGQLYTYPDMKLIGVTGTNGKTTITQLIAQWIGLVGSKAAVMGTTGNGFLDDLKEAANTTGNAVEIQHTLASLAEQQAQYTALEVSSHGLIQGRVKSLSFAAGVFTNLSRDHLDYHGTMEEYANAKLTLFTQHQCAQAIINVDDEVGAAWAKQLTNAIAVSLAPTTEFEHALWASQVAYAESGITIRFDGQFGEGTLHAPLIGEFNAANLMLAFATLLSLGFDKSDLLATAAQLQPVLGRMELFQAEHRAKVVVDYAHTPDALEKALQALRVHCDGQLWAIFGCGGDRDAGKRPMMAEIAERLGDKVVLTDDNPRSEDPVLIVKDMLAGLSKPAEAIVQHDRFKALFYALENAAPQDIILLAGKGHEDYQIRNGETIHYSDRESAMQLLGLSS

SEQ ID NO: 14969 - protein, 1052 aa, Clostridium acetobutylicum ATCC 824
MFNITKDNIRKLMKPKTYKEALDLYNGNKVFNIVVNENHNDFYDANFVKINAEVMDGSGNDYTCMILFNNKTGINIIKCNCSNVKNNDICSHVGAVLIKYIDGKNNVKSDYSKRLLYGLKQSIIKREIKGKPINIEVKLHYFTETTKKSYINIRVGEDRLYVVKDVSTFLKSILENKQIKIGEKFTYYPYKYSIKKRDEELFELLFAIYHDNEDVVKDKEKSILGKNIYLTESGLSRLMIILEDRDFSILINDEGITDCYIVVDEFPKINLTIEEKEESVKLTLSGGEPISLVRGNKYVFYQGKVYKLDQYKINIYSLLIKVFSNSKVVKYYKEDRQDVLSYVYPVLKELGIAACKNVINYDYLKPKVYMDKIDENMLINIKFENNDKKLKDVNGEVYIIKILQDFGFYKDGEIIYINDSLDKMVEFMSVGLDKIQSKGYEIYYSENIKKFKVYSPHMYKGSLKVNEGNMIEVSFEIDGIDNSELYNIFEALRLKKKYYKLKEGEIVDLSNKVIKKIADMFKYMDLDYSKINQKPAILSKENAAYINRYIDEENLMFFDKDTRFERMVKLSKGLENMKVGIPNEFNSIMRDYQKRGFRWFKSLDHFGVGGILADEMGLGKTLQTIAFISSGTGHKETSIIIVPTSIVYNWKEEIEKFSKNLKTLIISGTKRERAEAIGEYYNYDVLITSYSLIRMDIEEYSKIKFKYCILDEAQYIKNKNSLITKAVKKIRAKNCFALTGTPIENCLSELWSIFDFIMPGYLLSYSKFVNKYENPIIKEKDKRALYELNRHIEPFILRRLKESVVKELPSKVEHKILIEMSQKQKEVYYAYLKNAREKIYRSIEEKGINNSKFIIFSLLTRLRQICSNPRTVVENYNGKNAKMDVLMDTIKTSIANRHRILVFSQFTSVLKSIKDKLIEKDIDVMYLDGNTKMKDRFQLADEFNKGKGEVFLISLKAGGTGLNLTGADIVVHFDPWWNPAVENQASDRAHRIGQKKNVEIIKLITRGTIEEKIYKLQQEKKKMVDNVLGDKMFSEENVLLNLDEQKIKNIFG

SEQ ID NO: 14970 - protein, 182 aa, Triticum aestivum
MSDAPASPPGGGGGGGGGGSDDGGGGGGFGGVREQDRFLPIANISRIMKKAIPANGKIAKDAKETVQECVSEFISFITSEASDKCQREKRKTINGDDLLWAMATLGFEEYIEPLKVYLQKYRETEGDSKLAGKSGEVSVKKDALGPHGGASGTSAQGMGQQVAYNPGMVYMQPQYHNGGISN

SEQ ID NO: 14971 - protein, 635 aa, Prochlorococcus marinus str. MIT 9215
MGKVVGIDLGTTNSCVAVMEGGKPTVIANAEGFRTTPSVVAYTKNQDQLVGQIAKRQAVMNPENTFYSAKRFVGRRVDEVNEESKEVSYSIEKSGSSVKLKCPILDKQFSPEEVSSQVLRKLADDAGKYLGDKVTQAVITVPAYFNDSQRQATKDAGKIAGLEVLRIVNEPTAAALAYGLDKENEKILVFDLGGGTFDVSVIEAGDGVTEVLSTSGDTHLGGDDFDRCIVDHLANTFKSNEGIDLRQDKQALQRLTEAAEKAKIELSNATQSEINLPFITATPEGPKHLDLNLTRAKFEELAASLIDRCKTPVERAISDAKISTSEIDEVVMVGGSSRIPAVLDLVKKIIGKEPNQTVNPDEVVAVGAAIQGGVLAGEVKDILLLDVTPLSLGVETLGGVMTKMINRNTTVPTKKSETYSTAVDGQTNVEIHVLQGEREMASDNKSLGTFRLDGIPSAPRGVPQIEVTFDIDANGILSVTAKDKGSGKEQSISITGASTLSDNEVEKMVKDAESNASADKEKREKIDLKNQAETLVYQTEKQLGELGDKIDAAAKSKVEEKSNALKEATSKEDYESMKKLLEELQQELYAVGSSVYQQPGNQPPSSSAAGGPDQSDSNEKGGDDVIDADFTETKD

SEQ ID NO: 14972 - protein, 712 aa, Dechloromonas aromatica RCB
MTRRPRQAMDGLSSPLWRTTLLKQLCWIVLGLTVSAQAAELAPQPQHQRVVRISAALLGHYHYKPAVLDDALSEAIFERYLKTLDSEKYYFTQSDIDQLSEYRTRLDDAIIEENLQAPFAIFNLYARRAEEHFSYARSLLKGGFRFDQNDRFTFVRDKAEWASSDEALREIWQQRVKNDWLRLKLAGKSDPEIVTALDKRYEQSIRRINRLKSDDAFQMFMNAYTTAIEPHTTYLGPRASADFDISMRLSLTGIGAVLQERNDYTMVREVTPGGPAARSGQLKAGDRIVAVAQGEKGAFVDVVGARLDDTVALIRGAADSVVRLDILPANAGPDAKHRQITLVRKKVDLAQQAAKKAVLDVTDNGSARRIGVITLPAFYDDFEGRRKGDPNFRSATRDVAKLLKELGKEKVDGVVLDLRHNGGGSLKEAIELTGLFIDTGPVVMERNAQGQVFVDGDTTPGTAWDGPLGVLIDGESASASEIFAAAIQDYGRGIVIGEQSYGKGTVQTVLNLDQAVGSEKPALGELRMTIAQFFRINGSTTQVRGVQPDIALPAANDPTLTGEASNDNALPWTHIRAAAYDRVADKGEVIPALLARHVARAANDPEFQRLEETASELQRLRLQTSVSLNEAERRRENESLEKRLSGLARADDGLLDSEREPDTDGKDEKAGNKAKDTRLLAAARIIADEVDLQREKGKPGALERPNQAAINR

SEQ ID NO: 14973 - protein, 674 aa, Pseudoalteromonas tunicata D2
MSKKLKLIPIAAAFLAFNVFAKVDTFTFADLPVLKQESQHSTASKRVTNFFTRAHYKLIQLDDELSSQILDRYIESIDYNRRVFLQSDIDSFEKYRTSVDNALSTGKLDFAFDIFNLSLKRRFERYQYSLALLENEMTFDKADDYLFDREDLPWPKTTDELNEIWRQKVKYDALRLKLTGKDWSEIKTVLEKRYSYTLKRLIQTNSEDAFQIAMNSFARSIEAHTSYLSPRRAEQFKMDMDLELEGIGAVLGYDEDYTVIRSLVPGGPADKSEKIKSNDRIIGVAQGDDKFVDVIGWRLDDVVELIKGPKGTTVRLQYLKGADAHGTPSIVEIIRDKIRLEDKAVKASVFTPKYTELDTKIGVIDIPGFYNNLSADVKKEIAKLKEEKVDGIIIDLRQNGGGSLYEATQLSGLFIDQGPVVQIHTLNGRVEEQKDVDGVTFYDGPLTVLVDRYSASASEIFAAAMQDYGRAVIIGEQTFGKGTVQQHRGLGRNYDLYDNELGSVQYTIAKFYRINGGSTQHKGVIPDISLPSPIDPAEWGESQEDNALPWDHIANAKYSSLADLAPAITFLQKKHDERIKTEPEFNYVFDDIERYKKEKNRKRISLIEKQRITERDDNDKIALQRTNERLKRLGQPEIAKLDDVPEIISELDPFLEETAQITSDYIKYGRYAKK

SEQ ID NO: 14974 - protein, 382 aa, Salmonella typhimurium LT2
MKALHFGAGNIGRGFIGKLLADAGIQLTFADVNQVVLDALNARHSYQVHVVGENEQVDTVSGVNAVSSIGDDVVDLIAHVDLITTAVGPVVLERIAPAIAKGLVKRKAQGVDAPLNIIACENMVRGTTQLKGHVMNALADGDKAWVEQHVGFVDSAVDRIVPPSASATNDPLEVTVETFSEWIVDKTQFKGALPNIPGMELTDNLMAFVERKLFTLNTGHAITAYLGKLAGHQTIRDAILDESIRAVVKGAMEESGAVLIKRYGFDADKHAAYIQKILGRFENPYLKDDVERVGRQPLRKLSAGDRLIKPLLGTLEYGLPHVNLVKGIAAAMHFRSDEDPQAQELAALITEKGPQAALAQISGLDANSDVVAEAVNAYNATK

SEQ ID NO: 14975 - protein, 759 aa, Lactobacillus sakei subsp. sakei 23K
MSNQLFEQIQQLHLAPLLNWGAFGIEKEGHRVTAAGQLSPLSHPASLGSRDFHPYIKTDFAEMQTELVSDTFDNTDEIMQQLGALSEVLEMNLADDELIWPLSMPPVLPSDETTIPIADVAPDARAYRDYLANRYGRRLQMISGVHFNFSLAPALIARLYDEVYHDQFATVKDFSDMLYLQIAQNYSQYRYLLTYLFGASPITEALFQTDTTNLPDYAVRSLRSSQLFGYANHDLVVSFESVAAYHDSLEQAISKKQLISEREYYGSVRLRSHGHLAQDGVDYLEFRGFDLNPFAASGVTQEQLDFLHLFFTYLLSLPKAAESLTARMAEGQQLNEAIALEDATKASAQQAKMQMLMTNIRQFITTYQLNQRFIDAWTVMNERVNDFKQTLSYRLAQEVQDDSLTAFAMQQARQFKRELTEKPFQLQGYTDMELSTQMLMLDAFQKGLHVAVLDRSDQFVELTYQQHHELVKNGNMTSLDRLISWPLVDNKVVTKIVLANQGIRVPAGAEYADLEVAKRDYQAAFGQRALVIKPKTSNMGAGITTFLTRPSETDFVTAFKLAQQYDQQVLVEEYIAGSEYRFLVMDHQVQAVLERVPANVVGDGRSTITQLVAKKNRNELRGEDHRTPLQNIRLGAREQLILKQQGYQVDDVPMRGSQVFLLQNSNISNGGDSVDVTDDIDKSYFAIAEKVAEILNLNVTGVDIIIPNLYQPYDPEHPEMAVVLEANYNPAMLMHLFPMMGQQRRVTTKMLTMLFPEMD

SEQ ID NO: 14976 - protein, 544 aa, Klebsiella pneumoniae subsp. pneumoniae MGH 78578
MSLIAIVLVFIMAIVVTVFLSHLLPVKVPLPLIQIAAGAALAASGFQVDFDPHIFLLLFIPPLLFLDGWRIPKDAFFRDMKPILSLAIGLVMVTILGIGLFIHWLIPAITVAAGFALAAILSPTDPVAVSAMTASSPLPSRMAHILEGESLLNDASGLVAFNFAIAAVLTGSFSPGDAVVKFFLMAFGGILSGLVVVWVTGKCNNFLVRRTREEPAIQILISLLIPFAAYLLAEAFHVSGILAAVAAGIAMHYEQLSGPRLPATRMKSSAVWSMLQTTLNGMIFLMLGEQLPRMLRTLPAVASQAGVSSPWYLLLYAVAITLALGLMRFAWVWLSMKLTIFRRKRRGKAITVRPRFSILAVMALAGVKGSVTLAGILTLPVVLADGSPFPGRELLIFLSMAVILMSLVVAAIGLPFMTRYLADDLPHDTGKDDIGAVMTEVAINRLNALLDEPVEDPSEQALRADAGNMLLETYQRRLHYNDNDEGQDVGLELAKRARLEKYMQREVIIAQRQELFRLRRAHNISDITFYEVLREIDLKEESLR

SEQ ID NO: 14977 - protein, 536 aa, Salinibacter ruber DSM 13855
MQIDTYLTDDDLGTQLDKMRQALVVMNKEYVDPLDAADVAEEGIEGMVSSLDPHSTYIPADRAEDVKDQYQGSFGGIGIVFEVPNDTARVISPVAGGPSEEMGVMAGDRIVGIEDSSAVGLSSNEIQNSLKGEIGTEVQITVYRPTMDDRLDFTLTREEIETQSVRSPYMVDDRTGYINITRFTMKTHDEFREAASTLLDQGMERLVLDLRGNPGGVMRSSWQIANEMLGEKMTIVETKGRSEQMNRTISARPGGMLADQPIIVLVNRGSASASEILSGALQDHDRAFLVGRRTFGKGLIQKQFDLGDKSVLQMTVGRYYTPAGRLIQSPYERGEREDYYEEKFSTINQATYHLNEYRESISDSLAYQTDHGRTVFGGGGILPDYVVQPDTAALTHLVQSGLDYAFARKWFTENETDLRETWQDRPEEFQSSFEPSENMMDSFWSFAEKNGVQITENPDSVDTAERVYAAQTAQDEQAFVATRVKGYLARLIYGRGVARPILNRADPIFQEAMSLWPSSQDLAAYHKTAAPTIQQN

SEQ ID NO: 14978 - protein, 503 aa, Arabidopsis thaliana; identical to SEQ ID NO: 11890

SEQ ID NO: 14979 - protein, 473 aa, Prochlorococcus marinus str. MIT 9515
MAKSPQDVLSQIKDEGIELIDLKFTDIHGKWQHLTLTSDMIEEESFTEGLAFDGSSIRGWKAINASDMSMVPDSSTAWIDPFYKHKTLSMICSIQEPRSGAPYDRCPRSLAQKALSYLDSTGIADTAFFGPEPEFFLFDDVRYDSKEGGCFYSVDTNEAPWNTGRTEEGGNLGYKIQYKEGYFPVAPNDTAQDIRSEMLLLMGELGIPTEKHHHEVAGAGQHELGMKFDSLINAADNVMTYKYVVRNVAKKYGKTATFMPKPVFNDNGTGMHVHQSLWKSGQPLFFGEGSYANLSQTARWYIGGILKHAPSFLAFTNPTTNSYKRLVPGFEAPVNLVYSEGNRSAAVRIPLTGPSPKAKRLEFRSGDALANPYLAFSVMMLAGIDGIKNQIDPGDGVDVDLFELPAEELAKIDTVPSSLNDSLNALKTDKDYLLAGGVFTEDFIDNFIDIKYEEVQQLRQRPHPHEFFMYYDA

SEQ ID NO: 14980 - protein, 378 aa, Pseudomonas sp. cn4902
MKALHFGAGNIGRGFIGKLLADAGIQLTFADVNQVVLDALNARHSYQVHVVGETEQVDTVSGVNAVSSIGDDVVDLIAQVDLVTTAVGPVVLERIAPAIAKGLVKRKEQGNESPLNIIACENMVRGTTQLKGHVMNALPEDAKAWVEEHVGFVDSAVDRIVPPSASATNDPLEVTVETFSEWIVDKTQFKGALPNIPGMELTDNLMAFVERKLFTLNTGHAITAYLGELAGHQTIRDAILDEKIRAVVKGAMEESGAVLIKRYGFDADKHAAYIQKILGRFENPYLKDDVERVGRQPLRKLSAGDRLIKPLLGTLEYGLPHKNLIEGIAAAMHFRSEDDPQAQELAALIADKGPQAALAQISGLDANSEVVSEAVTAY

SEQ ID NO: 14981 - protein, 189 aa, Dacrydium franklinii; identical to SEQ ID NO: 8170

SEQ ID NO: 14982 - protein, 849 aa, Oryza sativa; identical to SEQ ID NO: 12723

SEQ ID NO: 14983 - protein, 388 aa, Floydia praealta; identical to SEQ ID NO: 8172

SEQ ID NO: 14984 - protein, 269 aa, Candida albicans SC5314
MSLLSSIGLRTSIIDNADGSAELSIYNNNSNEASSSSSSSDDNSIIKLITSINGPIEPKQRQELPNRASLEINIYPSIGLSTTKEKLLENKLRSILQNNIIINYKYPRQLIQISIQFLISSGSGSSSSSSSNYGSMMMNLLDLNALINCCYFALIDANIAMNYSFASIVIIIDHQGNLLIPIDGNDLHQQQQQEEDYESIHLCCYSIIAKKVDKLLLLESQGDFNESQLFNVLEKSIYKVEKFHNEIHRQFINDKIKNDYIWKQEREDE

SEQ ID NO: 14985 - protein, 549 aa, Ralstonia solanacearum GMI1000
MFIHFYVPNVRPRLMRTSLKNISLIAIGLVTGVLATLQLSATAQNATVGPLPLEKLRLMADIFGQIKREYVEPVDDDKLLTEAIKGMVASLDPHSAYLDKKDFQELQEGTQGRFAGLGIEISQEEGLVKVINPIEDTPAFRAGVQPGDLITRIDDKPVRGMPLEQAVKRMRGAPGTKVTLTIYRKKEERTFPLTITRAEIQVQSVKAKLLGDGIAWVRITSFQERTVPDLAKKLNDLAHQDARLKGVILDLRNNGGGVLQAAVGVSAAFLPPDVTVVSTNGQVPDAKRVYKTSFANYRLSNFDTDPLVSLDPEFKTVPIVVLTNAYTASASEIVAGALQDHHRAKVMGKTTFGKGSVQTVRPLSNDTGIKLTIAYYYTPSGKSIQAKGIRPDVPVDQSPEGDPDDALITREIDTERHLHNKQESEEPEMTDREKRRVEELRRLEEETAKKTPEQREKERNKKPIEFGSTDDFMLQQAVAELKGQPVKRSKSVLEAAAAVPDKATKSPAAKESSAPAKLPKGKAAPASEPAAPSGPASGVIPAPEPTGAR

SEQ ID NO: 14986 - protein, 388 aa, Lambertia formosa; identical to SEQ ID NO: 8174

SEQ ID NO: 14987 - protein, 526 aa, Mycobacterium marinum M
MTATDHAPAPDTVGTVTASGRWRALLLAAVAACAACGIIYELALLTLSTSLDGGGIVATSLIVAGYIAALGAGALLVKPLLAHAAIAFIAVEVLLGIIGGLSAAALYVAFAFIDGSTWVLALGTALIGGLVGAEVPLLMTLLQRGRLAEAADTGRTLANLNAADYLGALIGGLVWPFVLLPHLGMIRGAAATGIVNLVAAAVVSIFLLRQVVSTRQLAMALSSLLAALGLLVTLLVHARDIETTSRQELYADPIIAYRHTSYQEIVVTRRGNDLRLYLDGGLQFSTRDEYRYTESLVYPALGDGARSVLVLGGGDGLAARELLRLPRIERIVQVELDPAVIELARTTMREANGGALDDPRVQVVIGDAMKWLRGTDSGQSRRFDAVIVDLPDPDTPALGRLYSAEFYALAAHALAPDGLMVVQAGSPFSTPTAFWRTVSTIKAAGYAVTPYHVHVPTFGDWGFALARRGGTAPIPAVPADAPSLRFLNQPVLNAATVFSSDVGPTMLEPSTLDNPRIVEDMRRGYR

SEQ ID NO: 14988 - protein, 724 aa, Candida glabrata CBS 138
MGEFKAPLPQGAGYAIVLGLGTVFAVGMILTTYMLRRYQKEIITAEEFTTAGRTVKTGLVAAAVVSSWIWCSTLLTSASKQLDGMLGGYSYSAGACFQIVAFAILAIKTKQKAPNAHTYLELVRKRYGKIGHCCYLFYAFATNILVTAMLLTSGAAVFESMTGMNSVASCFLLPVGVVIYTLFGGIKATFLTDFIHTCVIIVIIMVFAFKVYATSDVLGSPGKVYDLVREAAKRHPVPHNAQGEYLTMSSRSGGIFLIINLVGNFGTVFLDNGYWNKAISASPAAALPGYVMGGLAWFAVPALLSVTMGFACLATETLKSFPTYPDPLTPEQVSAGLVLPAAAVSVMGKGGAVATCLMVFMAVTSAMSAELIAVSSVFTYDIYRIYINPSADGKRLIYSSHFACVVFGLCMSGFSVGLYYAGVNLGYLYELMGIIISSAVLPVVLTLCWKGQNIIAAVVSPILGTALAIMSWLVCTKSLYGEITLATSFEDYPMLTGNLVALLSPAIFIPILTFLFKPQNYDMELFKEISRVDETKEILEAYPEIEPIISKTQIAHESEGSLIESDYNKEDEKDAVTHIKTTEKHELDRIDTENLSEYDAQEEKKLKRALNWAYFLCIFFALAFLVVWPMPMYGTKYIFSKRFFTGWVVVMIIWIFISAFCVCVFPVWEGRHGIYTTCRGIYWDLTGQSYKLKEWQETNPSELHVVQSQKSIRPKISRIDDLIE

SEQ ID NO: 14989 - protein, 658 aa, Vitis vinifera
MLMRLIYTMAGCLVAISIAKEESNKLGTVIGIDLGTTYSCVGVYKNGHVEIIANDQGNRITPSWVAFTDTERLIGEAAKNQAAVNAERTVFDVKRLIGRKFDDKEVQKDMKLFPFKIVNKDGKPYIQVKIKDGETKVFSPEEISAMILTKMKETAEAFLGKTIKDAVVTVPAYFNDAQRQATKDAGIIAGLNVARIINEPTAAAIAYGLDKKGGEKNILVFDLGGGTFDVSILTIDNGVFEVLATNGDTHLGGEDFDQRIMEYFIKLIKKKHGKDISKDNRAIGKLRRESERAKRALSSQHQVRVEIESLYDGLDFSEPLTRARFEELNNDLFRKTMGPVKKAMEDAGLEKRQIDEIVLVGGSTRIPKVQQLLKEYFDGKEPNKGVNPDEAVAYGAAVQGSILSGEGGDETKDILLLDVAPLTLGIETVGGVMTKLIPRNTVIPTKKSQVFTTYQDQQTTVSIQVFEGERSLTKDCRELGKFDLSGIAPAPRGTPQIEVTFEVDANGILNVKAEDKASGKSEKITITNDKGRLSQEEIDRMVREAEEFAEEDKKIKEKIDARNSLESYVYNMKTQINDKDKLADKLESEEKEKIETAVKEALEWLDDNQNAETEDYQEKLKEVEAVCNPIITAVYQRSGGAPGGSSDAGEDEDSHDEL

SEQ ID NO: 14990 - protein, 388 aa, Roupala montana; identical to SEQ ID NO: 8175

SEQ ID NO: 14991 - protein, 388 aa, Carnarvonia araliifolia; identical to SEQ ID NO: 8178

SEQ ID NO: 14992 - protein, 616 aa, Thermus thermophilus
MAKAVGIDLGTTNSVIAVLEGGKPVVLENAEGERVTPSVVAFRDGETLVGRMAKRQAVLNPEGTIFEIKRFIGRRFEEVQEEAKRVPYKVVPGPDGGVRVEVKGKLYTPEEISAMILRKLVEDASKKLGEKITKAVITVPAYFNNAQREATANAGRIAGLEVLRIINEPTAAALAYGLDKKGNETVLVFDLGGGTFDVTILEIGEGVFEVKATSGDTHLGGSDMDHAIVNWLAEEFKKEHGVDLKADRQALQRLIEAAEKAKIELSSTLETTISLPFIALDPASKTPLHLEKKLTRAKFEELIQPLLKRLRGPVEQALKDAGLTPAQIDEVILVGGATRVPAVQQVVRELLGKEPNRSVEPRTKVVAMGAAIQAGVLMGEVRDVVLLDVTPLSLGVETKGGVMTVLIPRNTTIPTRKCEIFTTAEHNQTAVEIHVLQGERPMAQDNKSLGRFRLEGIPPMPAGVPQIEVCFDIDANGILHVTAKERSTGREASITIQNTTTLSEEEIQRIIEEAKRHAEEDRRRREHAELKNALDSARVQAERVLQERQGAPEARARLEAAIGKAKELVERDAPDPELKAATEELLKAVEEYEKGAQAASGKGPDDVIDADYKPAD

SEQ ID NO: 14993 - protein, 633 aa, Acetobacter aceti
MSKVIGIDLGTTNSCVAVREGNETKVIENSEGARTTPSMVAFTEVGEMLVGQAAKRQAVTNPANTFYAVKRLIGRRFDDPTVQKDKEMVPYAIVQGDNGDAWVEARGKKYAPSQISAFVLGKMKETAESYLGEKVSQAVITVPAYFNDAQRQATKDAGKIAGLEVLRIINEPTAAALAYGLEKKSGGTVAVYDLGGGTFDVSVLEISDGVIEVKPTNGDTFLGGEDFDNRIIGYLADEFKREQGIDLRSDKLALQRLKEAAEKAKIELSSSKETEINLPFITADASGPKHLVLKLTRAKLESLVDDLVQRTLEPCKAALKDAGLSASQIDEILVGGMTRMPKVIETVKGFFGKDPARNVNPDGVVAIGAAIQGAVLKGDVKDVLLLDVTPLSLGIETLGGVFTRLIDRNTTIPTKKSQVFSTAEDNQSAVTIKVYQGEREMAADNKLLGNFDLTGIPAAPRGVPQIEVTFDIDANGIVSVSAKDKATGKEQQIKIQASGGLSDTDIDKMVKDAEANAEADKAKREQVELRNNAEALVHQTEKSLTEAGDKVPAAEKVATESPIAAVKAAMEGTDAEALKRATERLTQAAMKVGEAAYKAGQAGEAAPEAEAAKPDEKEIVDADFEDVNDTKKS

SEQ ID NO: 14994 - protein, 713 aa, marine gamma proteobacterium HTCC2143
MINFCRNVVVKCAINFCAVFLVATTALAIPSTDATIAFNSEQSKTAIDIISKLGNRHYSSQSFDDQLSSSFFDNYLKRLDGNKSFFMQADIEAFEPYRYRLDNTLLKGDLEPGYIIFNRYQQRLIERLSGIVENLPEMVASMDFTLDEELELERKDDPWPLNTEQADNLWRKIIKSRVVSLRIAEKPEEEIVPLLQKRYQNQLNRVMQSNSEDAFQVYINSMTALYDPHTNYLSPTTSENFNINMSLSLEGIGAVLQTEDEFTKVVRLVHSGPADKEGQLQPSDKIVGVAQGDNEFTDVIGMRLDEVVQLIRGKKGSRVQLQVIPVSAKTEDEHSVIDIIRDTVKLEEQSAKSEILEIYHDEQLFKLGIIDIPAFYIDFEAMRKGDPNYKSTTRDVSKLLKDLIADGVDGIIIDLRENGGGSLQEANQLTGLFIEQGPTVQIRHSSKQIYRDGKRTSSSYYTGPLAVLINRLSASASEIFAGAIQDYQRGVIVGTQSFGKGTVQSLTALEQGQLKITESKFYRISGESTQHRGVVPDVAFPAIYDKQKVGESSLDNALAWDTINPIRHRKYFDIPAVIPALIAKHEQRMETDPDFIFLKDQLQVMEENRKITSLSLNEETRRALQLSIEGKALAIENKRRIAKGLEPLDDLETDESESAADANTADTADTAASASDAEDEDKEIGPLLTETGHILLDSLTVYQVDKVAATTKR

SEQ ID NO: 14995 - protein, 364 aa, Mycoplasma pneumoniae M129
MKRINVLHFGAGNIGRGVILPIYQQNDFSIDLVELNQNTVNELQKQKQYQVHYLDCDQSQLVNDFNTWNLKDEAKIIELMERADVISTSIGAKNLASLKTLFDKAKFHKRAIVLCFENGFRISSNFKNILQLNNTQVNFVDVVIDTIAPNFEKKANFLDIYCEKYSEIYAETFPLEIKGVNQKNSLDRFIIKKLLLVNALHSVIGLLGFQQKLKYVHETLQVKSNLTFVEKLAQQIIDALCAEYPEFNKNNLLSYGKNNLVRFANPKIQDLNTRLIREPLRKLNQNERFYAIYKLFKKNKIALNNILQVYLMVLKTNITDDTESQQIAKLINEKAWTELAKLSSLEESEWNLIKQELSREITKK

SEQ ID NO: 14996 - protein, 219 aa, Oryza sativa
  misc_feature (199)..(199): Xaa can be any naturally occurring amino acid
MPDSDNDSGGPSNYAGGELSSPREQDRFLPIANVSRIMKKALPANAKISKDAKETVQECVSEFISFITGEASDKCQREKRKTINGDDLLWAMTTLGFEDYVDPLKHYLHKFREIEGERAAASTTGAGTSAASTTPPQQQHTANAAGGYAGYAAPGAGPGGMMMMMGQPMYGSPPPPPQQQQQQHHHMAMGGRGGFGHHXGGGGGGSSSSSGHGRQNRGA

SEQ ID NO: 14997 - protein, 168 aa, Glycine max
MKNSVFNNKAQVHQNRTCSSYSYSYSSQRDVCYSCGTCGYELNLSSSNRNISSIGSKYGKSIKRGIISFLNVDDSRFTRADEIEFAPYFSKHKWGLFRRKTKLLCRKCCNHIGYAYNDRTSSFFPFVSNRTEPSPPTEASNSSPMKYDIRIRALQPSSSQEHGITVLA

SEQ ID NO: 14998 - protein, 318 aa, Coprinopsis cinerea okayama7#130; identical to SEQ ID NO: 702

SEQ ID NO: 14999 - protein, 185 aa, Xanthomonas campestris pv. campestris str. ATCC 33913
MSLNRLLVLVFAGLFSTAAVAAGTSVLDLDYRPLAGKAPINLNRSYGGKVVMVVNTASKCGFTPQYEGLEALNQRFGSRGFTVLGFPSNDFQGQEPGSEKQIQEFCTLTYGVKFPMFEKVHVLGAQATPLYQRLTRETGVAPGWNFHKYLIGRNGHVVAQFPSKVKPDDPQVLAAIERELKAPAR

SEQ ID NO: 15000 - protein, 228 aa, uncultured cyanobacterium
HEVAGAGQHELGMKYAELIEAADNVMIYKYIVRNVARKYGKTATFMPKPVFNDNGTGMHVHQSLFKGGQPLFFGEGTYANLSQTARWYIGGILKHAPSFLAFTNPTTNSYKRLVPGFEAPVNLVYSLGNRSAAVRIPLTGPNPKAKRLEFRPGDALANPYLAFSAMMMAGVDRIKNQIDPGDGFDEDLFELPAERLASIPTVPASLNGSLEALNADKNYLMEGGVFTE

SEQ ID NO: 15001 - protein, 116 aa, Triticum aestivum
MKSRKSYGQQQSHLLSPVGSPSSDNGGGDSPAKEQDRFLPIANVSRIMKRSLPANAKISKEAKETVQECVSEFISFVTGEASDKCQREKRKTINGDDLLWAMTTLGFEVYVAPLKA

SEQ ID NO: 15002 - protein, 181 aa, Glycine max
MAYSMLSSAAVVTSPAQATMVAPFTGLKSSSAFPVTRKANNDITSIVSNGGRVSCMKVWPPVGKKKFETLSYLPDLTEVELGKEVDYLLRNKWIPCVEFELEHGFVYREHGSTPGYYDGRYWTMWKLPLFGCTDSAQVLKEVQECKTEYPNAFIRIIGFDNNRQVQCISFIAYKPPSFTGA

SEQ ID NO: 15003 - protein, 382 aa, Dunaliella bardawil
MKALHFGAGNIGRGFIGKLLADAGIQLTFADVNQVVLDALNARHSYQVHVVGETEQVDTVSGVNAVSSIGDDVVDLIAQVDLVTTAVGPVVLERIAPAIAKGLVKRKEQGNESPLNIIACENMVRGTTQLKGHVMNALPEDAKAWVEEHVGFVDSAVDRIVPPSASTTNDPLEVTVETFSEWIVDKTQFKGALPNIPGMELTDNLMAFVERKLFTLNTGHAITAYLGKLAGHQTIRDAILDEKIRAVVKGAMEESGAVLIKRYGFDADKHAAYIQKILGRFENPYLKDDVERVGRQPLRKLSAGDRLIKPLLGTLEYGLPHKNLIEGIAAAMHFRSEDDPQAQELAALIADKGPQAALAQISGLDANSEVVSEAVTAYKAMQ

SEQ ID NO: 15004 - protein, 420 aa, Symbiobacterium thermophilum IAM 14863
MFATERMTLNMDERRTRFGLSLLLVAVTGVVSYALGALGWPPALQESMSQLRDRLPVAGSSLSGLQVERLEEVMRAIQGQYVEEVDVEALNVGALRGMVEALGDRYSTFFTPEEYRSFVEGFEPTFSGIGVTVEISQQTGLLTVVSPIKGSPGAKAGLRTGDAIIQVDGRDITGMSLNEAVALIKGPKGTQVRLLVKREGEPEPLEFVITRDTITVPVLDYRMIDQEAGIGYIQLFEFSKKGAASQVKEAIAELRSQGMTRLIFDVRQNPGGLLDEVVEIASFFLPTGDPVVHIVERAKEPRALTAKEAEKWTGPLVVLVDGGSASASEILAGAVKDAGVGTLIGAKTFGKGSVQTFWRLQDGSGIKLTTAKYLTAGGHSIDGQGVEPDIVVGNPNRIIPGEPGDPQLEAAVRHIREMEP

SEQ ID NO: 15005 - protein, 1082 aa, Shewanella sp. MR-4
MNRLSPQEPIQLTQTAIESLFTPPTLMRARDYVMQGRVLSAKANADFRHIEGTVTGTETTPYRQDIRLVSVNHKLVMNGFCSCPASGNCKHMAAVLYSLLTDKTVEDQRIAQWLHLLDEADDPNVNDVESLYDDRVLYILSKDDNGVFIELRRGKLGKKGGYNKGTKIALSDVQYYMPAWIGAEDVLILNLIMSTRRHGASRLYLKAQLGAVAIEKMLATERCFWEESRLALTAGEAITPQFLWQDIDSEHKQMRLVLPERDNWELVPTEPPYYIELDYFHIGLIDTDISVDKLRLLSQMPPVPSTQVELVSHRLIKHFSARTVPPPSAIDFVELRDKLQLRLTLKVVPAGTMPPGSALSSATETRIAQPYLALEFVYGDLVLSGNAAKEALTLVTQGGTTYQINRALEEELQAVSKLQTLGFSRFSLEGAANGASLWSLGHLPDAIREWLAFIDEEVPRLQTQGIEVRLAPEFSLKVVDTPLTVELDDSQEGWFSLSLHADINGQRLPMLPLVATWLKQHGEPADDAELLLPSPSGEWLKIKASVIKPLMSIIQELFEQHRGHSIAIPKYRAHLLNELAESEISLLNGERVRQLATKLAEFNGVVAVSAPTGLNAQLRAYQQQGLNWLCFLKEYQLGGILADDMGLGKTIQTLAFLLKQQEAKSAGQPRLPSLIICPTSLVGNWAKEAAKFAPSLSLAVIHGAQRGPLLSRLSEFDVVVTTYPLMVRDYDYYQTQPFEHIVLDEAQQIKNAQAKVSQQIKALQAPFRLCLTGTPLENHLGELKSLMDFCLPGLLGTTAYFNKAFRYRIERYGDGEQAKVLSQRIAPFVLRRTKAEVVTELPPKTEIYQTLELEKDQRNLYESIRLSMEKKIRELFASQGVAGSHIEFLDALLKLRQACCDPRLVKLEQAQKVKNNAKLNWLSQNLPEMVQEGRKILIFSQFTSMLILIEELLQSLDIDYSKLTGQTRLRQGQIDKFQEGDTPVFLISLKAGGTGLNLTAADTVIHYDPWWNPAAEKQATDRAHRIGQENPVFVYKLIAEGTVEEKIQEMQQHKQGLADSILEGKGKGAWQGSADELLSLFH

SEQ ID NO: 15006 - protein, 112 aa, Prunus persica
KVLVIGGGDGGVLREVARYSSIEQIDICEIDKMVVDVSKQFFPAVAVGYEDPRVKLHVGDGVAFLKAVPAGTYDAVIVDSSDPIGPAQELLEKPFFQTVANALRPGGVVTTQ

SEQ ID NO: 15007 - protein, 143 aa, Cichorium intybus
MAREKIKIRKIDNITARQVTFSKRRRGLLKKAEELAVLCDADVALVIFSATGKLFEYASSSMQELLGKYKLHSTNNVNKVDEPSLDLQLVESQESRMSQEVLEKDRELSQLRGEDLQGLTLEELQRLESLLEGRLNRVAPDKG

SEQ ID NO: 15008 - protein, 1096 aa, Cryptococcus neoformans var. neoformans JEC21
MNPLLAASSAANPNNTSVDDDKLSDYVPNSRDLSVSRAPSVIASEDAGHLDTAPQTPEPEEDEEDEIPEDELNEEELMDGKKITPSAAKRAAQASAKKAQTAERKAQHAEIGKKRSAIEQARFADSMKRFNYLLGQTELFQHFIDLKRQREPQFAQMLDEQIAKQAGKGKKKAIDNRHRKSEKEEDEELLKDEEEDEPFVFEESPAYVKGGKMRDYQVQGLNWMVSLHHNGINGILADEMGLGKTLQTVAFIGYLKFHLGIPGPHLIIVPKSTLDNWAREVAKWVPGFDVVVLQGTKEERGELISRRILTQDFDVLITSYEMCLREKSTLKRFSWEYIIIDEAHRIKNVDSLLSQIIRTFVSRGRLLITGTPLQNNLQELWALLNFILPDVFSSSEDFDAWFKTKDEADPDAVVKQLHKVLRPFLLRRVKADVEHSLLPKKEINLYVGMTEMQRKWYKSLLEKDIDAVNGMTGKKEGKTRLLNIVMQLRKCCNHPYLFDGAEPGPPFTTDQHLVDNAGKMVILDKLLKSMKAKGSRVLIFSQMSRMLDILEDYCQFRGHQYCRIDGSTAHEDRIAAIDEYNAPESEKFVFLLTTRAGGLGINLVTADIVVLFDSDWNPQADLQAMDRAHRIGQTKQVYVFRFITQDAVEERILERATQKLKLDQLVIQEGRAQQTAKVAQNKDDLLDMIQHGAEKIINNKESMLIDDDIDEIIRRGEERTKEINSKYAGLDLDALNNFKSESLVNTWEGEDYGNRQQKRPLLWIEPSKRERKTNYSVDQYYRDSLKTGGPKADKPKVARAPKQVVVNDFQFYPPRLAELQNKETDWHRKSINYQVPVREPEEGETQEQVEAEQKEEQERIDNAVPLSEEEVAEKETLVGEGFHDWQRRHFQSFIRALEKYGRDDLEKVVTDVADRTEDEVREYAAVFFERYKELKDWERIMDRIRAGEEKIKEQQDRIDVLHRKIKATRFPLQELKIVYGQNKGKAYSDEEDRFLLVRMHHHGIDRDDCYELIKRDIGEWPLFRFDWFFKSRTPDELRRRAQTLLLCIMKEDDKVEDEKKPIKGKKRPIDELKSGPGSRDTTPSAAGSKGSKKKKV

SEQ ID NO: 15009 - protein, 103 aa, Prunus persica
ECAYQEMIALLPLCSIPSPKTVLVVGGGDGGVLREVSRHPSVEHIDICEIDKMVVDVSKKFFPQLAVGFQDPRVHLHIGDATEFLRHAPKGKYDAVIVDSSDP

SEQ ID NO: 15010 - protein, 1072 aa, Myxococcus xanthus DK 1622
MNQMPRFLRRITAVAVLLGAWALVGSNRAPLPLTMGAAEAGQGSWDGSLPTVKGEKAPHDLNSLRVLTKVILYVKENYVDPKRVKPKEMMIASLEYVEKSVPDVLVDGNAETGKLNVNVNGKQREFDIAHVDSLWKMSFALKDVFDFLSKNMRPIEDTRDVEYAAVNGMLSTLDPHSVLLRPELYREMKLSTKGEFGGLGFVIQMREGNLTVVKVIPKTPAHRSGIQKDDRIKKIGEESTVNMDLNEAVSKLRGPVDSRITITVERDGWDKPRIMTLSRAMISIESVQHKMLSNNVGYIRLKNFQGNTTRDLEAALTQLRKQADAKGGFKGLVLDMRGNPGGLLEQAIQVSDTFLSSGTIVATVGLSDKLREEKRARATDGEDSYPIAVLVNAGSASASEIVAGALKNLDRATIIGRQTFGKGSVQVLYDFPDDSALKLTIAKYLTPGDVSIQEVGIVPDIQLVPTRATDERVDVFAPRRSMGEADLDQHFGNPDSSTVAKKREDVLNREKPLESLKYLKVDEKQAQATAKKEEGKAPPKTAANAKKHGDKDPLLDVDVAGMGEDLDDQLDAEAQEEIKEDFEVQFARDFVLRAPATTRKEQLKQGKAFIDQKRAEEESRINAAIAALGVDWSAGPTPKNVQMAVSLTPGPDAKILAGEVMEMALTAENRGTEPLKRVRAWTESDNAFLDRREFLFGALAPGEKKTWKVKVRLPKDLTSRRDDVTVRFFDDHGALPETRVAELNFVELPRPAFAFNWQVIDDCATCNGDGTVQRGETVSVLLDVTNAGTGTALDSFTQIKNGGDANIFIEKGRFKLGELKPGETKTARFQLEVKKGFKGNTFPLKLAIIDEPLEEFVMEKLELPVTDAAIATMEPKKGLIRVGDKVDLYGAPAQGARAVAKLSGTTVLPAEAVTKGYYRVELEKDRFAFVRSQDAKELKTGKATTPKATLVTNHRPPDIRLDVDPAAGGMVANGDKFTLSGVVTDPHGLLDVYVLVNDQKVYFKGVDPKGAEPNTLKFSTEFALKEGNNNVLVVAREDNDFASRRTLVIRRRPAEVAQKMASPAGSPANKPQ

SEQ ID NO: 15011 - protein, 693 aa, Pseudomonas syringae pv. tomato str. DC3000
MKQLLPSTALALFVGLGVLPMSASTFAANSWDNLQPDRDEVIASLNVVELLKRHHYSKPPLDDKRSAIIYQSYIKQLDPSRSYFMASDIAEFDKWQFQFDDFLKSGDLNPGFTIYKRYLDRIKARLDFALAELSKGVDKLDFNTKETLLVDRKDAAWPKDTAELDELWRKRIKDEVLRLKIAGKDPAKIQETLTKRYKNQQARLNQTRAEDIFQAYINTFAMSYDPHTNYLSPDSAENFDINMSLSLEGIGAVLQSDNDNVKIVRLVPAGPAAKTKQVAPADKIVAVAQGDKEMVDVIGWRLDEVVKLIRGPKGSVVRLEIIPASNAPNDQTSKIVAITREAVKLEEQAAKKSILHLKQDGKDYKLGVIDIPAFYLDFKAYRAGDPEYKSTTRDVKKLLTELQAEKVDGVVLDLRNNGGGSLQEATELTSLFIDKGPTVLVRNADGKVDVLEDEAKGAFYKGPMALLVNRLSASASEIFAGAMQDYHRALVIGGQTFGKGTVQTIQPLNHGELKLTLAKFYRVSGQSTQHQGVVPDITYPSLIDTKEIGESALPEAMPWDSIKPAIKPAIDPFKPFLAQLQSRHEARSSKDAEFVFIEDRLALAKKLMNEKTVSLNEADRRAEHASIEGKQLALENTRRKAKGEEPLKELKKEDEDALPVEDEKTKPEDDAYLAETGRILIDYLGLSAAVAKK

SEQ ID NO: 15012 - protein, 159 aa, Acidobacteria bacterium Ellin345
MGLYDLSATLNNGKEKKLSDYKGEVLLVVNTASECGFTPQYKGLQELYEKYKNQGFEILGFPCDQFGHQEPGSDKEIASFCEVNYGVTFPIFSKIEVNGANEHPVYKFLKSEKGGLLTNNIKWNFTKFLVDKQGNVVDRYAPQTIPARIAADVEKLLST

SEQ ID NO: 15013 - protein, 522 aa, Cyanothece sp. ATCC 51142
MSLEASAADVAIKENLEQFLVVLSVSLSVATISRIFSWFRQIPYTLLLVIVGLGLAFVDVRLVNLSPELILEIFLPPLLFEAAWNIRWRELKENWIPVVLFAVIGVIISVLGIALALSQLTHLALPIALLVGASLSATDPVSVVALFRELGASKKLTVLMEGESLFNDGVAVVAFLLLVGIPLGTEVFSVTDTVVSFFKFVGIGIGLGCLVGFGISYLTQRFDLPLVEQSLTLVSAYGTYLITEELGGSGVISVVTVGIILGNFGSRIGMNPRTRLLVSEFWEFLAFFVNSIVFLLIGDQIQFDSLSDNLDLIAIAILAVLVTRFIGIYGLANLSNVLTKVDISLPEQTVLWWGGLRGSVSIALALSVPVSLSGRQDIIDTVFGVVLFTLLIQGLSTQWVLKKLDLVGDQPLRQEYSELLARKIALGRVIDHFQTLDESPSINSEFYRYEKELVTGQLKSIEEKIADFQQKYPQLESIAMQQLKQTLLDIEADTYAELIRNGKLGKNLSPIVLEILTESSEH

SEQ ID NO: 15014 - protein, 142 aa, Yersinia bercovieri
MVLMPDASTAVMDPFFEDSTLIIRCDILEPGTMQGYDRDPRSISKRAEDFLKSSGIADTVLFGPEPEFFLFDDVRFGSSIRGSHVSIDDIEGAWNSSTKYEGGNKGHRPAVKGGYFPVPPVDSSQDLRSTMCLTMEEMGLVV

SEQ ID NO: 15015 - protein, 127 aa, Zea mays
MEAEAAAKRTRQSGEDVVAAGISAVIPRWFSEISPMWPGEAHSLKVAKVLFQGKSDYQSVMVFQSSTYGKVLVLDGVIQVTERDECAYQEMITHLPLCSIKDPKKTKSELQLLAYYNMIVEANLKYL

SEQ ID NO: 15016 - protein, 62 aa, Phaseolus vulgaris
TRFKAEFPVFDKVNVNGDKGDPLCKYVKSSKGELFGNNIKWRFSKFLVDKEGKVVDRYAPTT

SEQ ID NO: 15017 - protein, 197 aa, Yersinia bercovieri
SSIGGWKGINESDMVLMPDASTAVMDPFFEDSTLIIRCDILEPGTMQGYDRDPRSISKRAEDFLKSSGIADTVLFGPEPEFFLFDDVRFGSSIRGSHVSIDDIEGAWNSSTKYEGGNKGHRPAVKGGYFPVPPVDSSQDLRSTMCLTMEEMGLVVEAHHHEVATAGQNEVATRFNTMTKKADEIQIYKYVVHNVAHA

SEQ ID NO: 15018 - protein, 918 aa, Bacillus thuringiensis serovar konkukian str. 97-27
MINQTEVTIRLQHVSHGWFLWGEDDSGTPLSVTSWKRNAFTWHSTSFYGTFLKEATFEGKQGVMLTNAQAFEYIANQPMNSFARIQMNGPITALTKDANELWDAFTSGSFVPDMERWPKQPSWKVQHTPIEDDTLASLFSAAVNESILQDNRSNDGWEDAKRLYEHYDFTKRQLDAALHEEDWLRKIGYIEDDLPFTIGLRLQEPQEEFEMWKLETIITPKRGAHRIYVYESIDSLPKRWHDYEERILETQEGFSKLVPWLKDGDTFRSELFETEAWNFLTEASNELLAAGITILLPSWWQNLKATKPKLRVQLKQNATQTQSFFGMNTLVNFDWRISTNGIDLSESEFFELVEQNKRLFNINGQWMRLDPAFIEEVRKLMNRADKYGLEMKDVLQQHLSNTAETEIVEEDSPFNDIEIELDGYYEELFQKLLHIGDIPKVDVPSSLHATLRPYQQHGIEWLLYLRKLGFGALLADDMGLGKSIQTITYLLYIKENNLQTGPALIVAPTSVLGNWQKEFERFAPNLRVQLHYGSNRAKGESFKDFLQSADVVLTSYALAQLDEEELSTLCWDAVILDEAQNIKNPHTKQSKAVRNLQANHKIALTGTPMENRLAELWSIFDFINHGYLGSLGQFQRRFVSPIEKDRDEGKIQQVQRFISPFLLRRTKKDQTVALNLPDKQEQKAYCPLTGEQASLYEQLVQDTLQNVEGLSGIERRGFILLMLNKLKQICNHPALYLKETEPKDIIERSMKTSTLMELIENIKDQNESCLIFTQYIGMGNMLKDVLEKHFGQRVLFLNGSVPKKERDKMIEQFQNGTYDIFILSLKAGGTGLNLTAANHVIHYDRWWNPAVENQATDRAYRIGQKRFVHVHKLITTGTLEEKIDEMLERKQSLNNAVITSDSWMTELSTDELKELLGV

SEQ ID NO: 15019 - protein, 473 aa, Cyanothece sp. PCC 7424
MPETPQEVLKLIQDNNIQMIDLKFIDMPGIWQHCSFYYDQIDESSFVDGVPFDGSSIRGWKAINESDMSMVPDPTTAWIDPFYAEPTLSMICSIKEPRTGEWYSRDPRSIAAKAVEFLQSTGIGDTAFFGPEAEFFVFDDVRFDQTEHKSYYYVDSVEGRWNSGREEEGGNLGYKPRYKEGYFPVPPTDTIQDMRTEMLLTMGKCGVPIEKHHHEVATGGQNELGIRFDTLIKSADNLMIYKYVIKNVAKKYGKTVTFMPKPLFNDNGSGMHTHQSIWKSGQPLFWGDGYANLSPMALHYIGGILRHAPALLALTNPTTNSYKRLVPGFEAPVNLAYSQGNRSASIRIPLSGTNPKAKRLEFRCPDATCNPYLAFAAMLCAGIDGIKNQIDPGDPLDVDIYDLSPEELSKVPSTPGSLEAALENLEKDHAFLTDTGVFTEDFIENWIEYKLDNEVNPMRLRPHPYEFALYYDV

SEQ ID NO: 15020 - protein, 116 aa, Yersinia bercovieri
FEDSTLIIRCDILEPGTMQGYDRDPRSISKRAEDFLKSSGIADTVLFGPEPEFFLFDDVRFGSSIRGSHVSIDDIEGAWNSSTKYEGGNKGHRPAVKGGYFPVPPVDSSQDLRSTM

SEQ ID NO: 15021 - protein, 880 aa, Arabidopsis thaliana
GVLKYFRAPSSLRHRSSPMAQFLRRFSSSPMANEDEFQSPVEPSQQQSQDCVSESYLIGFVIANIVGLKYYSGRINGREMVGLVREPLNVYDNNAIRVLNTRSEQVGHIERTVAAVLAPMIDSHTIVVEGIVPNTRSNSNRYRIPCQIHVFAKLEASSTVKSTISRGGLVLISESDTSFGLSEAVVVKEQMGNGDKRSVDKIFKLVDENVKLMGKLVAAEPPREVIKSELFAHQKEGLGWLLHREKSGELPPFWEEKDGEFLNTLTNYRSDKRPDPLRGGVFADDMGLGKTLTLLSLIAFDRYGNASTSTPTEEPLDGEGDKIEKKGKKRGRGKSSESVTRKKLKTDDVVGMNVSQKTTLIVCPPSVISAWITQLEEHTVPGILKVYMYHGGERTDDVNELMKYDIVLTTYGTLAVEESWEDSPVKKMEWLRIILDEAHTIKNANAQQSRVVCKLKASRRWAVTGTPIQNGSFDLYSLMAFLRFEPFSIKSYWQSLIQRPLGQGNKKGLSRLQVLMATISLRRTKEKSLIGLPPKTVETCYVELSPEERQLYDHMEGEAKGVVQNLINNGSLMRNYSTVLSIILRLRQLCDDMSLCPPELRSFTTSTSVEDVTDKPELLQKLVAALQDGEDFDCPICISPPTNIIITRCAHIFCRACILQTLQRSKPLCPLCRGSLTQSDLYNAPPPPPDSSNTDGEDAKSSTKSSKVSALLSLLMASRQENPNTKSVVFSQFRKMLLLLETPLKAAGFTILRLDGAMTVKKRTQVIGEFGNPELTGPVVLLASLKASGTGINLTAASRVYLFDPWWNPAVEEQAMDRIHRIGQKQEVKMIRMIARNSIEERVLELQQKKKNLANEAFKRRQKKDEREVNVEDVVALMSL

SEQ ID NO: 15022 - protein, 185 aa, Brassica oleracea; identical to SEQ ID NO: 718

SEQ ID NO: 15023 - protein, 1178 aa, Wolbachia pipientis
MSIYGRTWWGKKWLQSFSEVDYDNRLSRGRTYANTGRAFGIQINGNTITAKVSGSRPHPYKVKITLNELNSSAIRCIIENSPSILPKLINRQLPTLLFDKLNDSGIKLFPSNWEEMNASCNCPDWAMPCKHIAAVIYLIAAEIDKNPFVIFNIHNCDLLSLIDDFGNGKLENIQSILKINDLFKSSSKVKVYDQVNLNDIDLSTIPNLASCIENILTNNPLFFEKNFHSILQTAYKHWQKYPTGKSDYFFYSSKKKLSEEELFTSKWGSIEHWQTFQLFINDQYQVIQVSNGIANSFMLSESVSRNIAQFLNDIPISLLHKLNPELRFMHMISQFARMLMEKSALVPQILQNKRGEFIIRWIPALFNESVKEIHRKISSMCPPLLIQYQKTSIEPEEQVNIAISLILLGYMANNFPAALDKYREKNTFPSSMDKYRDKHIFALFFTGSAYKFSEFSNREIPQAINLWLSRLYLTDKPYKLYLMVKDYYERFELDIQVSLDDGKSIIKLKKALSNCSTKLSILSDMGMLSEYIPELERSIDDSSRLLFSLDDFAPLFLNILPVLRAIGVIVILPKSLEKILKPKLSLNLSAKGKIEEDRKSFLTLEKLLKFDWKIAIGDKEISITEFKKLLKDSRGLIKIIDQYVLLDDKEVEALLKKFDKLPERLSQAELMQAALGGELDGAKVGLDQQIKSLFEKLNTYVPVDVPSNLTAQLRPYQKRGFSWLVQNIETGFGSIIADDMGLGKTLQVIAAILYCKNVGFLDEDKVLIVAPTSILSNWQREMERFASELKLFIYHGQNRELANDYDVALTSYGLARRDKKELNRVGWFLLVIDEAQNIKNPHSEQSKAIKAIAAKNRIAMSGTPVENRLLEYWSIFDFTNKYYLGTPKEFKTHFATPIEKARDKVCLEKFMKVTHPFMLRRVKSDKSIIEDLPDKIENNRYCSLTPEQTALYQEVVNTTMKKIERSEGIERKGLILKLINALKQVCNHPSHFGKKKRASIEQSGKMQMLEEILIGISELAEKSLIFTQYTEMGEIIARLLEEKFESKVPFLHGSLSRKARDKMVNDFENSFRSNILIVSLKAGGTGLNLTAANHVIHYDLWWNPAVEAQATDRAYRIGQERNVMVYRLLSTGTFEERIDEMIQSKKELANLTISSGESWITEFSNNQLKDLINIRNAV

SEQ ID NO: 15024 - protein, 201 aa, Yersinia bercovieri
GSSIGGWKGINESDMVLMPDASTAVMDPFFEDSTLIIRCDILEPGTMQGYDRDPRSISKRAEDFLKSSGIADTVLFGPEPEFFLFDDVRFGSSIRGSHVSIDDIEGAWNSSTKYEGGNKGHRPAVKGGYFPVPPVDSSQDLRSTMCLTMEEMGLVVEAHHHEVATAGQNEVATRFNTMTKKADEIQIYKYVVHNVAHAFGK

SEQ ID NO: 15025 - protein, 138 aa, Yersinia enterocolitica
TAVMDPFFEDSTLIIRCDILEPGTLQGYDRDPRSISKRAEEFLKSSGIADTVLFGPEPEFFLFDDVRFGSSIRGSHVAIDDIEGAWNSSTKYEGGNKGHRPAVKGGYFPVPPVDSSQDLRSTMCLTMEEMGLVVEAHH

SEQ ID NO: 15026 - protein, 228 aa, uncultured cyanobacterium
HEVAGAGQHELGMKFAQLIQAADNVMTYKYVVRNVAKKYGKTATFMPKPVFNDNGSGMHVHQSLWKEGQPLFFGEGTYANLSQTAQWYIGGILKHAPSFLAFTNPTTNSYKRLVPGFEAPVNLVYSEGNRSAAVRIPLTGPSPKAKRLEFRSGDALANPYLAFSAMMMAGIDGIKNQIDPGDGEDRDLFELPAEELSKIATVPASLNGALEALNADRGFLTAGGVFSD

SEQ ID NO: 15027 - protein, 654 aa, Gibberella zeae PH-1
MYRPPINFLTLHYAYIIFMGLMALPILYPYGNMAAIDAWFFGASSSTESGLNTIDVKELKTYQQLYIYFIPILTNLGFINIIVVIVRLHWFKRHLKRLAPQMLDGEQNNDIEDTYNESNLKTDTTWKSTSDGPSLATETPNETIDPSDKQPNRERLAARTTTISFDVSTDAHTGNTSLYIPGPRARERDRIKPVNSVMSNNASSSIRRRRLSNDGLPITASKSIDRVANVAASLLLLGSETTPRPRSVNSTSIQQPALNDIPQLSRQATIGRNSHFKNLTEHDREVLGGIEYRTLKLLLKIVTCYFFGLHLFGAICLVGWIHTADSKYTDVLAAAAQDKTWGFYSSQSMLNNLGFTLTPDSMISFRDAKWPMILMSFLAFAGNTLYPVFLRLTIWIMSKITPKTSPTQESLTFLLNHPRRCYTLLFPSGPTWILFSIIFALNFIDILLIILLDLKNDEVASLPLSARVPAAIFQAASARHTGTASFNLANVSPAVQLSLLIMMYIAVFPIAISIRASNAYEEKSLGLWDEEESLNEQNGKSYLLTHMKNQLGFDLWYIFLGTFCICIAEQTRIADVKDPAFSVFSILFEVTSAYGNVGLSLGYPTVSFSLCGMFGIFGKVVICFMMIRGRHRGLPYALDRAIMLPSSQSPEKSR

SEQ ID NO: 15028 - protein, 228 aa, uncultured cyanobacterium
HEVAGAGQHELGMKFAQLIEAADNVMTYKYVVRNVAKKYGKTATFMPKPVFNDNGTGMHVHQSLWKGGQPLFFGEGTYANLSQTARWYIGGILNHAPAFLAFTNPTTNSYKRLVPGFEAPVNLVYSEGNRSAAVRIPLTGPSPKAKRLEFRSGDALANPYLALSAMLMAGLDGIKNQIDPGDGEDRDLFELVAEELSKIATVPASFNGALEALNADRAFLTAGGVFTD

SEQ ID NO: 15029 - protein, 97 aa, Triticum aestivum
LASDPRSKEQIDRWPTTTIHISAAAAGSGGGGGGGSPPERLHGGGGSGDQGIKEQDRLLPIANVGRIMKQVLPPNAKVSKEAKETMQECVSEFISFV

SEQ ID NO: 15030 - protein, 233 aa, Zea mays
  misc_feature (5)..(5): Xaa can be any naturally occurring amino acid
  misc_feature (91)..(91): Xaa can be any naturally occurring amino acid
  misc_feature (165)..(165): Xaa can be any naturally occurring amino acid
FSSTXTVCTLQVINQDETPRLYSLVFGEGVVNDATAVVLFNAIKDLDISQLKGGVVLKVIFDFLYLFATSTVLGISIGLVTAYVLKALYFXELLELSGILTVFFCGIVMSHYAWHNVTESSRITTKHIFATLSFIAETFIFLYVGMDALDIDKWRTSKERMSTRXRPRNLSKVVIWWAGLMRGAVSIALAYNQFTFSGVTSDPVHATIITSTIIVVFFTTLVGISTNKGPSNT

SEQ ID NO: 15031 - protein, 228 aa, uncultured cyanobacterium
HEVAGAGQHELGMVYEELIQAADNVMTYKYVVRNVAKKYGKSATFMPKPVFNDNGTGMHVHQSLWKGELPLFFGEGTYADLSQTARWYIGGILKHAPSFLAFTNPTTNSYKRLVPGFEAPVNLVYSEGNRSAAVRIPLTGPNPKAKRLEFRSGDALANPYLAFAAMMMAGIDGIKNQIDPGDGFDGDLFELPAEQLKNIATVPASLNGALEALNADHHYLMEGGVFSK

SEQ ID NO: 15032 - protein, 203 aa, Populus deltoides
MGRGKVELKRIENSASRQVTFSKRRNGLLKKAFELSILCEAEVSLIIFSPSGKFYQFSSHDMERSVARYRSEVGLPGTNDQRSRSLEFWRSEIEELRRTINKTEAQLRHFIGEDIAPLGLKELKQLERQLKTGVERIRSKKKRVISEHIKLLKSEQRALQEENARLQKRLHELPDANVSSRIPEPNACNAFHQQRIFLDGSHH

SEQ ID NO: 15033 - protein, 228 aa, uncultured cyanobacterium
HEVAGAGQHELGMKFAQLIEAADNVMIYKYVVRNVAKKYGKTATFMPKPVFNDNGTGMHVHQSLWKGGEPLFFGEGTYANLSQTARWYIGGILKHAPAFLAFTNPTTNSYKRLVPGFEAPVNLVYSEGNRSAAVRIPLTGPSPKAKRLEFRSGDALANPYLAFSAMMMAGLDGIKNQIDPGDGEDRDLFELSAEELQKIATVSPSLNGALEALSADRAFLTEGGVFTD

SEQ ID NO: 15034 - protein, 771 aa, Debaryomyces hansenii
MTNEDDLAVYDEPRSARQEEFDSLNTSVKLERLNTLIQRSQVYSQIMAENILQNTMDKKQARGIAADTSENHPSKRRKGVKRQTKTPKHDVVSMLSAPSAEMSTHKQPRLFSGGTLKDYQLDGMEWLITLFENGLNGILADEMGLGKTIQCIAFLTFLMENGINGPFLIVVPLSTISNWCNEVKRFAPSLKMLKYIGSKQERSDLAISSDYNIVLTSYEISIRDFSKLNRINWKYLIVDEGHRLKNMNCTLIKFLKKLNVNNKLLITGTPLQNNLDELWSLLNFILPDIFHDLDLFQQWFNFDELTNFQQQNTGNDDETNRLIEMNIQESLVKNLHTILKPFILRRLKKDVIRNLPPKKEYIIHISLSTLQKKLYNDALNNNLLFGLLEVYLKEYIHYNHGDLFDASEITKLMEKKLAVIPAEKRSKLGSFKEADSDDEFDYIEEHIDNSKPELDEKQIAKLPKKKRKEYIFDNLYYKCLKRLKHLSLQNLIIQLRNICNSPYIFYEPFEPYSNKDAQFMDLLLRNSSKFKVLQQLLDELLSKNHKVLIFSQFTKVLDLINDWLVYENVEICRLDGSMNQSDREEEITEFNAKNSKQQVFLLSTRAGGLGINLTASDTVIIFDNDWNPQIDLQAIDRVHRIGQTKPVKIYRFLIKNSIEEILISKSYSKRFLEKIIIQMGEFKFNKFQKVINEKNLNFKNLVNLSKSFRINGEVKENQSGDNDYDVDERANENKLTDDEMTELLDRSSECYRTEKNFENVSVFETINNMDK

SEQ ID NO: 15035 - protein, 611 aa, Corynebacterium diphtheriae NCTC 13129
MGRAVGIDLGTTNSVVSVLEGGEPQVIANSEGSRTTPSVVAFAKNGEVLVGQSAKNQAVTNVDRTIRSVKRHVGTDWTIAIDDKKYTSQEISARTLMKLKRDAEAYLGEDVTDAVITVPAYFSDAQRQATKEAGQIAGLNVLRIVNEPTAAALAYGLEKGEKEQTILVFDLGGGTFDVSLLEIGDGVVEVRATAGDNELGGDDWDQRIVDWLVEKFKTAQGVDLSKDKMAMQRLREAAEKAKIELSSSQSANVNLPYITVDADKNPLFLDETLSRTEFQRITQDLLDRTKTPFNQVIKDAGVTVSEIDHVVLVGGSTRMPAVSELVKELTGGREPNKGVNPDEVVAVGAALQAGVLRGEVKDVLLLDVTPLSLGIETKGGVMTKLIERNTTIPTKRSETFTTADDNQPSVQIQVFQGEREIAAHNKLLGSFELGGIAPAPRGVPQIEVTFDIDANGIVHVTAKDKGTGKENTIKIQDGSGLSQEEIDRMVKDAEAHAEEDKKRREEQETRNSAESMAYQTRKFLDENGEKVSEEIKTKVTEAADAVDEALKGEDIEAIKTAVEKLSTESQEMGKAIYEAEAANAGAADATNVDPNVVDAEVVEDDDKDGNK

SEQ ID NO: 15036 - protein, 576 aa, Clavibacter michiganensis subsp. sepedonicus
MDYAALGVVGIAILVAVTLVARRIGVATPLVLVLVGVGISYLPGVPPVEVPPELILAGVLPPLLYGAAVTVPLVDFRRNLRTIVSLSVVLVLVSAFGIGLLLYALFPDLSFASALALGAVVSPPDAVAATSIARRLGLPPRLVTVLEGEGLVNDATALVLLRTSIAAVGASVDLWQAAGGFVLSAVGALAIGIAVGIITTEVRRRLDDPVLDTAISFAVPFVAFIPAEEVGASGVLAVVAAGIWSGHRSASTLSAQSRINERLNWRTVLFLLENGVFLVMGLELRDILDEVQEADLGVGRAVAYGVLTLVVLTLIRFGFLVPLLLGLRRHEEHVAARTRRVRRGLERLRRERGDDRPSRRERAATRILRRRRADLQALRSHGLGWRGGLVLGWAGMRGVVTLAAAQSLPSGTPYRAQLVLIAFTVAIVSLLVNGGTLPAVIRLSGIRGSDAVEDQRQLAGLVSELAEAGIRAVDEGVRQLPEGTLVDDDVVERVRRDTALKAEWVTERADAMAADDDAPLSPRAAYLLLRRHVLDAERAALLEARGTGEHPSRVLARAQRMLDQEEARLGRQADAG

SEQ ID NO: 15037 - protein, 597 aa, Mycobacterium avium 104
MTMTDPAEDHPSEAITLGLHDASPPEMVDAMAKDVELELGWGRLIFGQTFANSQELVEALRREGPGRRDICIYARESHVVVAEAPTELFIDPSHTYRLRFTGKEKSLAPTPLGVTVRTLNDPIDADAMNRVYVRCGMVPAGVDVIWENHQHVPAVKYLLAVRDEDGAVVGTVTGVDHELLFNDPEHGSSLWTLAVDPAAGLPGVGGALTRALAEHFRSAGRAYMDLSVAHDNAAAISLYEKLGFRRVPVLAIKRKNAINEPLFSPPPETVDDLNPYARIIADEALRRGIWVEVLDAETGEMRLTHGGRSVITRESLSEYTSAVAMCRCDDKRLTRRLVSEAGITVPRARLATFDEGDFAFLKEVGEVVVKPTRGEQGKGITVGVTAENGPDDLSAALARARAQYPDVLIEQRVPGDDLRLVVIDGRVVAAALRLPPEVIGTGEHSVRDLIAAESRRRSAATGGESRIPLDELTEATVAEAGWKLDDVLPQGTRLRVRRTANLHQGGTIHDVTAQVNSELCRVAVTAAEAIGIPVTGIDLLVPDVTGADYAFIEANERPGLANHEPQPTAAAFIDFLFPGHPGQPQAWTPEESRFARG

SEQ ID NO: 15038 - protein, 435 aa, Mesorhizobium loti MAFF303099
MGNDLAAFAKKNGVKYFMISYTDLFGGQRAKLVPAQAIADMQKDGAGFAGFATWLDLTPAHPDMLAVPDPDSVIQLPWKKEVAWVAANCIMDDKEVDQTPRNTLRRLIAEAAGDGMHVKTGVEAEFFLISPDGSVISDQYDTASKPCYDQQAVMRRYDVIAEICDHMLALGWGPYQNDHEDANGQFEMNWAFDDVLATADKHSFFKFMVKSVAEKHGLRATFMPKPFQGLTGNGCHAHISVWDETGKTNVFADNSMELGLSAKGKNFLGGIMKHASALAAITNPTVNSYKRINAPRTISGATWAPNTVTWTGNNRTHMVRVPGPGRFELRLPDGAANPYLLQAVIIAAGLDGIRSKADPGKRYDIDMYQHGHTVKGAPKLPLNLLDALREFDKDKSLKAALGEEFSSAYLKLKHQEWNSYASHFTQWERDHTLDI

SEQ ID NO: 15039 - protein, 271 aa, Catharanthus roseus
MDQQASYNLAGDTVPYNLAEIWPFPMNSATAATSFHNNNNAANSLAAAAAAGISMNMNVNLSVNRDHDPMVMDQAPNLNGGVRRRREDDDSAKGVSTSNDANAMNEGDNKRLKTGGSNENHESKAEGEETAKPAEPPKQDYIHVRARRGQATDSHSLAERARREKISERMKILQDLVPGCNKVIGKALVLDEIINYIQSLQRQVEFLSMKLEAVNSRLSPGIEGFPSKEFGQPPYDPSGMAFGSQSSREYGRDTSPEWLHMQIGGGFERTT

SEQ ID NO: 15040 - protein, 186 aa, Bdellovibrio bacteriovorus HD100
MIRCPLLSQNEISSHTHAAPLRRFPMKKHLYDFTVKAANGQPVSLDQYRDKVVLVVNVASKCGYTPQYKGLEELYQQNKDNGLVILGFPCNQFGAQEPGSNEEIQQFCELNYGVSFPVMGKVDVNGGNADPLYQWLKEEAPGLLGTEMIKWNFTKFLVGKDGAVLKRFAPKDEPKDIADDIKKALA

SEQ ID NO: 15041 - protein, 638 aa, Medicago truncatula
MDKELQLCSVDAADEEEMVSQQKPQRSKGGLVTMPFIIGNEALAKMASVGLLPNMILYLMGSYRLHLGISTQILLLSSAASNFTPVIGAFIADSYLGRFLGVGIGSSISFLGMSLLWLTAMIPAARPSACNHPSEGCESATPGQLAMLFSALILIAIGNGGITCSLAFGADQVNRKDNPNNYRVLEIFFSWYYAFITIAVIIALTGIVYIQDHLGWRIGFGVPAALMLISTVLFFLASPLYVKITQRTSLLTGFAQVSVAAYKNRKLSLPPKTSPEFYHHKKDSDLVIPTDKLRFLNKACVIKDHEQDIASDGSAINRWSLCTVDQVEELKAIIKVIPLWSTAITMSINIGGSFGLLQAKSLDRHIISSSNFEVPAGSFSVILIVAILIWIIIYDRVLIPLASKIRGKPVIISPKKRMGIGLFFNFLHLITAAIFETVRRKEAIKEGYLNDTHGVLKMSAMWLAPQLCLAGIAEMFNVIGQNEFYYKEFPKSMSSVAASLSGLAMGVGNLVSSLVLSIIESTTPSGGNEGWVSDNINKGHFDKYYWVIVGINALNLLYYLVCSWAYGPTVDEVSNVSKENGSKVEESTEFKHMNPHFDDKVSGETSSKEKELTEFKNGAQVEKVFKNSEQRDLKEEDL

SEQ ID NO: 15042 - protein, 566 aa, Pseudomonas putida KT2440
MAMFRLAIVSGSQRKLSRMQSAYTVLILLTLVSLSKLVGRVIPLPLPLVQIAAGALLAWPTLGLHVALDPELFLFLFLPPLLFADGWRIPKRELWRIRGPVVALAVGLVLFTVVGAGYFIHWLLPSIPLPVAFALAAVLSPTDAVAVSAIAQDRLPTPLMHMLQGEALMNDASGLVTFKFALAAAITGVFSLADASFSFVLVALGGLAVGVVLSWLIGRLRMWMITRGWDDPATHVVFMLLLPFAAYVLAERLGVSGILSAVAAGMMQSWLDLLPRQTSTRLLNRSVWSLLEFAFNGLIFLLLGLQLPDIIKAVVSHEATLWPTLAYRCLDVVAIFAALIMLRFIWVQSIWRSIGVVRRWRGKPALVLMPTARSCWLLTLGGVRGAVTLAGVMSIPLLIGAGTAFPERDLLIFIAAGVILLSLISACIALPILLRGVTKSPDERLHQEVQEAWRRTAEAAIHALEAEEVIDSNAPQDAAQATLATELKARLMAEYRDELESYDDSAEAKALAAQMDLLERRLRLRALRAQRLELYNLHRQHLVGDEVVRQVLGELDMSEANLGSVK

SEQ ID NO: 15043 - protein, 151 aa, Yersinia enterocolitica
AVMDPFFEDSTLIIRCDILEPGTLQGYDRDPRSISKRAEEFLKSSGIADTVLFGPEPEFFLFDDVRFGSSIRGSHVAIDDIEGAWNSSTKYEGGNKGHRPAVKGGYFPVPPVDSSQDLRSTMCLTMEEMGLVVEAHHHEVATAGQNEVATR

SEQ ID NO: 15044 - protein, 672 aa, Oryza sativa Japonica Group
QLIFLLLLAVLAAASSRNDEEARALMALKESLDPAGRVLGSWARSGEPCGGSFVGVTCDSGGRVTAISLQGRGLSGTLPPAIAGLRRLTGLYLHYNGIKGAIPREIGSLSELTDLYLDVNHLTGPLPVEIAAMENLQVLQLGYNQLTGSIPPQLGKLNKLAVLALQSNQLTGAIPATLGDLTQLARLDLSFNSLFGSIPSKIAEVPLLEVFDVRNNSLSGSVPAGLRRLNGGFQYVNNKGLCGVGFSLLDLCLSSEDGLKPSKPEPFGPDGTVKTRQVPQSANTDNHCEGSGCSKSSNASVGVLVVGVVAVVIGAAFCGIFAFSYYRRQKQKIGSSLEVSDSRLSTDHYQQKEVCRRSASPLISVEYSNGWDPLSGGGVGSSGEVGDSFRFNLEEVECATQYFSEVNLLGKSGFAATYKGILRDGSVVAVKSLNKTSCKQEESDFLRGLKMLTVLRHENLVGLRGFCCSRGRGECFLVYDYMVNGCLSQYLDVKEGSGANVLDWPTRVSIIRGIAKGVEYMHSKKANKPSVVHQNISAEKILLDHHLTPRLSVPGLHKLLADDVVFSTLKASAAMGYLAPEYATTGRFTEKSDVFAFGIVVLQVITGRRAVSQLKVSTVANDLDSLIDENLNGVFSRTEAAKLAAIAALCTSETASQRPTMEAVVQQLSNCH

SEQ ID NO: 15045 - protein, 152 aa, Yersinia enterocolitica
GINESDMVLMPDASTAVMDPFFEDSTLIIRCDILEPGTLQGYDRDPRSISKRAEEFLKSSGIADTVLFGPEPEFFLFDDVRFGSSIRGSHVAIDDIEGAWNSSTKYEGGNKGHRPAVKGGYFPVPPVDSSQDLRSTMCLTMEEMGLVVKRTT

SEQ ID NO: 15046 - protein, 468 aa, Methylococcus capsulatus
MTPKDVLQIIKEKEVRYVDLRFADTRGKEQHVTVPASTIDEAAFEEGKMFDGSSIAGWKGINESDMILMPDASTAVMDPFFDDPTLILRCDIVEPATMQGYERDPRSIAKRAEAYMKSTGIADTALFGPENEFFIFDDVRWGANMSGSFYKVDSEEAGWNSEKVYEDGNIGHRPGVKGGYFPVPPVDSFQDLRSAMCNTLEDMGMVVEVHHHEVATAGQCEIGVRCNTLVKKADEVLLLKYAVQNVAHAYGKTATFMPKPLVGANGNGMHVHQSVAKDGKNLFSGDLYGGLSETALHYIGGYISMPKALNAFCNASTNSYKRLVPGFEAPVMLAYSARNRSASIGIPYVMNPKARRIEVRFPDSTANPYLAFAAMLMAGLDGIQNKIHPGDAMDKDLYDLPPEEEKAIPQVCYSFDQALEALDKDREFLTRGGVFTDDMIDAYLDLKGQEVTACDEHSSVEFDMYYSL

SEQ ID NO: 15047 - protein, 164 aa, Yersinia enterocolitica
ESDMVLMPDASTAVMDPFFEDSTLIIRCDILEPGTLQGYDRDPRSISKRAEEFLKSSGIADTVLFGPEPEFFLFDDVRFGSSIRGSHVAIDDIEGAWNSSTKYEGGNKGHRPAVKGGYFPVPPVDSSQDLRSTMCLTMEEMGLVVEAHHHEVATAGQNEVATRF

SEQ ID NO: 15048 - protein, 1455 aa, Arabidopsis thaliana
MPFSLSLSAHLSLFHFLKPVKIKNFSKNSRTSSSSSQTRIFVFALMECIGKRVKSRSWQRLQAVNKRKKMETVAPVTSPPKKRRQKKPKNYDSDIEDITPTCNDSVPPPQVSNMYSVPNNSVKESFSRIMRDLNVEKKSGPSSSRLTDGSEQNPCLKERSFRVSDLGVEKKCSPEITDLDVGIPVPRFSKLKDVSEQKNTCLMQKSSPEIADLDLVISVPSSSVLKDVSEEIRFLKDKCSPEIRGLVLEKSVPGEIEILSDSESETEARRRASAKKKLFEESSRIVESISDGEDSSSETDEEEEENQDSEDNNTKDNVTVESLSSEDPSSSSSSSSSSSSSSSSSSSDDESYVKEVVGDNRDDDDLRKASSPIKRVSLVERKALVRYKRSGSSLTKPRERDNKIQKLNHREEEKKERQREVVRVVTKQPSNVVYTCAHCGKENTGNPESHSSFIRPHSIRDEIEDVNNFASTNVSKYEDSVSINSGKTTGAPSRPEVENPETGKELNTPEKPSISRPEIFTTEKAIDVQVPEEPSRPEIYSSEKAKEVQAPEMPSRPEVFSSEKAKEIQVPEMPSIPEIQNSEKAKEVQANNRMGLTTPAVAEGLNKSVVTNEHIEDDSDSSISSGDGYESDPTLKDKEVKINNHSDWRILNGNNKEVDLFRLLVNSVWEKGQLGEEDEADELVSSAEDQSQEQAREDHRKYDDAGLLIIRPPPLIEKFGVEEPQSPPVVSEIDSEEDRLWEELAFFTKSNDIGGNELFSNVEKNISANETPAAQCKKGKHDLCIDLEVGLKCMHCGFVEREIRSMDVSEWGEKTTRERRKFDRFEEEEGSSFIGKLGFDAPNNSLNEGCVSSEGTVWDKIPGVKSQMYPHQQEGFEFIWKNLAGTIMLNELKDFENSDETGGCIMSHAPGTGKTRLTIIFLQAYLQCFPDCKPVIIAPASLLLTWAEEFKKWNISIPFHNLSSLDFTGKENSAALGLLMQKNATARSNNEIRMVKIYSWIKSKSILGISYNLYEKLAGVKDEDKKTKMVREVKPDKELDDIREILMGRPGLLVLDEAHTPRNQRSCIWKTLSKVETQKRILLSGTPFQNNFLELCNVLGLARPKYLERLTSTLKKSGMTVTKRGKKNLGNEINNRGIEELKAVMLPFVHVHKGSILQSSLPGLRECVVVLNPPELQRRVLESIEVTHNRKTKNVFETEHKLSLVSVHPSLVSRCKISEKERLSIDEALLAQLKKVRLDPNQSVKTRFLMEFVELCEVIKEKVLVFSQYIDPLKLIMKHLVSRFKWNPGEEVLYMHGKLEQKQRQTLINEFNDPKSKAKVFLASTKACSEGISLVGASRVILLDVVWNPAVERQAISRAYRIGQKRIVYTYHLVAKGTPEGPKYCKQAQKDRISELVFACSSRHDKGKEKIAEAVTEDKVLDTMVEHSKLGDMFDNLIVQPKEADLVEGFSILMP

SEQ ID NO: 15049 - protein, 153 aa, Yersinia enterocolitica
KGINESDMVLMPDASTAVMDPFFEDSTLIIRCDILEPGTLQGYDRDPRSISKRAEEFLKSSGIADTVLFGPEPEFFLFDDVRFGSSIRGSHVAIDDIEGAWNSSTKYEGGNKGHRPAVKGGYFPVPPVDSSQDLRSTMCLTMEEMGLVVEAHH

SEQ ID NO: 15050 - protein, 633 aa, Saccharomyces cerevisiae YJM789
MLSKVLLNIAFKVLLTTAKRAVDPDDDDELPPSPDLPGSDDPIAGDPDVDLNPVTEEMFSSWALFIMLLLLISALWSSYYLTQKRIRAVHETVLSIFYGMVIGLIIRMSPGHYIQDTVTFNSSYFFNVLLPPIILNSGYELNQVNFFNNMLSILIFAIPGTFISAVVIGIILYIWTFLGLESIDISFADAMSVGATLSATDPVTILSIFNAYKVDPKLYTIIFGESLLNDAISIVMFETCQKFHGQPATFSSVFEGAGLFLMTFSVSLLIGVLIGILVALLLKHTHIRRYPQIESCLILLIAYESYFFSNGCHMSGIVSLLFCGITLKHYAYYNMSRRSQTTIKYIFQLLARLSENFIFIYLGLELFTEVELVYKPLLIIVAAISICVARWCAVFPLSQFVNWIYRVKTIRSMSGITGENISVPDEIPYNYQMMTFWAGLRGAVGVALALGIQGEYKFTLLATVLVVVVLTVIIFGGTTAGMLEVLNIKTGCISEEDTSDDEFDIEAPRAINLLNGSSIQTDLGPYSDNNSPDISIDQFAVSSNKNLPNNISTTGGNTFGGLNETENTSPNPARSSMDKRNLRDKLGTIFNSDSQWFQNFDEQVLKPVFLDNVSPSLQDSATQSPADFSSQNH

SEQ ID NO: 15051 - protein, 144 aa, Yersinia frederiksenii
LMPDASTAVMDPFFEDSTLIIRCDILEPGTMQGYDRDPRSISKRAEDFLKSSGIADTVLFGPEPEFFLFDDVRFGSSIRGSHVAIDDIEGAWNSSTKYEGGNKGHRPAVKGGYFPVPPVDSSQDLRSTMCLTMEEMGLVVEAHH

SEQ ID NO: 15052 - protein, 499 aa, Brucella melitensis 16M
MHATEPVFGMAMKLKEIALFNELAPGEAGEVEITGITSDSRAVQRGFLFAALKGVKADGAVFAADAAKRGAVAIIAGKDTAIADAGVPVLHVDDPRHVLAIAAAQFYGKQPEVMVAVTGTSGKTSVASFTRQIWAYAGFPAANIGTTGVFSPTRSDYNSLTTPDPVELHRVLAELASEGVTHAAMEASSHGLDQRRLDGVRLAAGAFTNLGRDHMDYHATIDEYLGAKMRLFNALLPKGAPAIIFADDQFSAQAIEAATLAGCDVKTVGRKGNFIALKRVEHERFRQHVEVRIGEEIFEIELPLAGDFQVANALVAAGLAMVTGVPAAAAMRALALLKGAPGRLDLVGATEDGAPAYVDYAHKPEALENVLTSVRPFTTGRVIVVFGCGGDRDKGKRPIMGEIASRLADVVIVTDDNPRSEVPAQIRSEIMAAATGATEIGDRREAIFTAVSMMQPGDTLVVAGKGHEEGQIVGNITLPFSDHAEVAAALAARLEEHLK

SEQ ID NO: 15053 - protein, 481 aa, Brucella melitensis 16M
MSNRELSDWLWTSDAMVEAMEGRPFGNLPAGVTGISIDSRTLKPGEAFFAIKGEQFDGHDFATAAMAAGAGLLVVAEHRLPAFGNTKVPMIVVEDVLEALIRLGIAARARSKAQIIAVTGSVGKTTTKEALRHVLSDVGKVHASAASFNNHWGVPLTLARMPADVDYGVFEIGMNHHGEIRPLVKMVRPHVALITLIAPAHLGHFANLEEIAVAKAEIFEGIVPGGYALLNRDDKRFRQLQELAEKAGVEHIATFGENARADYRLRDVKLHPTCSCMTVKIGTHEAAVKVGIPGRHVVQNMLAVLGAAHLVGADIAKVMMAMATLSAQGGRGARHVLQHPEGAFTLIDESYNANPTSMRAALSLLHSTVPEGSRGRRIAVLGDMVELGRQSGKLHADLARPIVDAEVNTLFIGGSEMSVLKNALPVEIQTEYRQSTDELLPLVVKAVRPGDVVMVKSSNRTGFSKIVKALIAQFPPVEAAE

SEQ ID NO: 15054 - protein, 554 aa, Tetragonia tetragonioides
MAFDLSYFVSNKLGMLATSDHASVVSMNLFVALLCGCIVLGHLLEENRWMNESITALIIGLGTGVVILLISGGKSSHLLVFSEDLFFIYLLPPIIFNAGFQVKKKQFFRNFITIILFGAVGTLISFTIISLGAMEFFKKLDIGSLDLGDYLAIGAIFAATDSVCTLQVLNQDETPLLYSLVFGEGVVNDATSVVLFNAIQNFDLTHIDHRIALQFAGNFLYLFFTSTLLGAMTGLLSAYIIKKLYFGRHSTDREVALMMLMAYLSYMLAELFYLSGILTVFFCGIVMSHYTWHNVTESSRVTTKHAFATLSFVAETFIFLYVGMDALDIEKWRFVSDSPGISVAVSSILLGLLMLGRAAFVSPLSFLMNFFKKSQAEKVSLRQQVIIWWAGLMRGAVSMALAYNQFTRSGHTQLRGNAIMITSTISVVLVSTVVFGILTKPLILFLLPQPKHFNSTSTVSSENLGSPKSFTLPLLGNHQDSETDIGNHQDSTDRGLGRPSSLRMLLNAPSHTVHHYWRKFDNAFMRPVFGGRGFVPYVPGSPTEQSTNNLTERT

SEQ ID NO: 15055 - protein, 526 aa, Synechococcus sp. PCC 7335
MPWIVAAIKPVLEDPAIESNLRQFLLVLSVSLGVATLSRVFSVLRNIPYTLLLLLVGLGLAVVDVRLVNLSPELILFIFLPPLLFEAAWNIKWSRLKSDFFPILLYAILGVVICILGLVFGLQQLAGASLATALLVGASLSATDPVSVTALFRELGVDKRLTTLMEGESLFNDGVAVVAFNLLLGIAIGIEQFDVSVTLARFGIFVGLGISLGGLIGFGISFLTQRFDIPLVEQSLTLVSAYGTYIIAEEVGGSGVIAVVTTGLILGNFGSRIGMNPRTRLVVSEFWEFLAFFVNSIVFLLIGDQVRFQALIDYSETIFVAILIIIIARAVSVFGLGAFSNWVTKGENISMSGQTILWWGGLRGSVSVALALSVPESLAQREEIIAVVFGVMLFTLLVQGLTTQPLLSWLNLLGDQPTRQRYTQLVAHRVALNRVLDRLKELIDRQEVDEEFAKYQIALVEGQLEELKDDLVELQRSNPDLLTYAAEQIRDELLAIESDTYAEFIRAGQLKDELAPLLQDVLPQSA

SEQ ID NO: 15056 - protein, 444 aa, Zea mays
MATTSFRSLLLLFLSVLGASARNEEDARALAALKRALDPAGRVLGSWDPSGDPCAGSFVGLTCGRDGRVTAVSLQGRGLSGTLPPAVAGLRRLQGLYLHYNGIKGPIPREIGKLSELTDLYLDVNHLTGPVPVEIAAIANLQGGAGVGSPGQVVGDSFRFNLEEVECATQYFSDVNLLGKSGFAAATYKGILRDGSVVAVKSLSKTSCKQEESDFLRGLKMLTLLQHDNLVSLRGFCCSRGRGECFLVYDFMVNGCLSRYLDVKDGSSGATVLDWPTRVSIIRGIAKGIEYLHSKKGSKPPVVHQNISADKILLDHHLAPRLSVPGLHKLLADDVVFSALKASAAMGYLAPEYAATGRFTDKSDVFAFGVVVLQVLTGRRDVSQLKVGAAAVSDLGGLVDANLDGAFSRTEAARLAADAAYCTSETPGQRPTMEAVDQQLSSTQ

SEQ ID NO: 15057 - protein, 228 aa, uncultured cyanobacterium
HEVAGAGQHELGMKFAELIQAVDNVMTYKYVVRNVAKKYGKTATFMPKPVFNDNGTGMHVHQSLWKGGQPLFFGEGTYANLSQTARWYIGGILKHAPSFLAFTNPTTNSYKRLVPGFEAPVNLVYSEDNRSAAVRIPLTGPSPKAKRLEFRSGDALANPYLAFSAMMMAGFDGIKNQIDPGDGVDVDLFELPADELAQIATVPASLNGALEALNADKHYLMEGGVFSE

SEQ ID NO: 15058 - protein, 1122 aa, Physcomitrella patens; identical to SEQ ID NO: 8233

SEQ ID NO: 15059 - protein, 771 aa, Debaryomyces hansenii CBS767
MTNEDDLAVYDEPRSARQEEFDSLNTSVKLERLNTLIQRSQVYSQIMAENILQNTMDKKQARGIAADTSENHPSKRRKGVKRQTKTPKHDVVSMLSAPSAEMSTHKQPRLFSGGTLKDYQLDGMEWLITLFENGLNGILADEMGLGKTIQCIAFLTFLMENGINGPFLIVVPLSTISNWCNEVKRFAPSLKMLKYIGSKQERSDLAISSDYNIVLTSYEISIRDFSKLNRINWKYLIVDEGHRLKNMNCTLIKFLKKLNVNNKLLITGTPLQNNLDELWSLLNFILPDIFHDLDLFQQWFNFDELTNFQQQNTGNDDETNRLIEMNIQESLVKNLHTILKPFILRRLKKDVIRNLPPKKEYIIHISLSTLQKKLYNDALNNNLLFGLLEVYLKEYIHYNHGDLFDASEITKLMEKKLAVIPAEKRSKLGSFKEADSDDEFDYIEEHIDNSKPELDEKQIAKLPKKKRKEYIFDNLYYKCLKRLKHLSLQNLIIQLRNICNSPYIFYEPFEPYSNKDAQFMDLLLRNSSKFKVLQQLLDELLLKNHKVLIFSQFTKVLDLINDWLVYENVEICRLDGSMNQLDREEEITEFNAKNSKQQVFLLSTRAGGLGINLTASDTVIIFDNDWNPQIDLQAIDRVHRIGQTKPVKIYRFLIKNSIEEILISKSYSKRFLEKIIIQMGEFKFNKFQKVINEKNLNFKNLVNLSKSFRINGEVKENQSGDNDYDVDERANENKLTDDEMTELLDRSSECYRTEKNFENVSVFETINNMDK

SEQ ID NO: 15060 - protein, 540 aa, Ustilago maydis 521
MVKRRRKTRTHLKGPNNSAATSTSAPKSFIIRTGKVARSVSSLVQDTRKVMEPNTATRLRERNSNKLKDFISMAGPIGVTHLLIFGQTDAGTNLRILRAPRGPTLTFRVNKYALSKDVQASSRRPAPPGSEFVTPPLLVLNNFGGEERQIKLLVATFQNLFPPIQVQSMKLSQARRIVLLNYNSATGTIDWRHYLISVRPVGVSKSVRRVVEGSRSTSRSSRAKLPDLSSTQDISDYVLGRTTSTSCTNGEFETDASEAESEAEDVADPRNKVHLHDRYVGRGNAANTQKAVRLREIGPRMELKLVKIEEGCNQGAVLFHEYVKKTAHEEAQLQREHMEKLKLQKQRREQQQENVERKKHDKAELRKASRRNAGLGSEDDATDGSHDEQEEENDEEEDEFAYEDQYGDHANDDQIDEDEELFDDAQLSSDNDREQDDDDDDDDDDDNDDPPTWIPSRSASGGYDNPPGVDPHSDDSDLEPIPLGGMQHDYSSAEDWPEYSDDDDTPAPSAATNQSKSTAASKTLSKPKFAAASQRKKSRR

SEQ ID NO: 15061 - protein, 228 aa, uncultured cyanobacterium
HHEVATAQHELGMKFAELIQAADNVMIYKYVVRNVAKKYGKTATFMPKPIFADNGSGMHVHQSLWKAGQPLFFAPGTYANLSDTARWYIGGILKHAPSFLAFTNPTTNSYKCLVPGFEAPVNLVYSEGNRSAAVRIPLTGPSPKAKRLEFRSGDALANPYLAFSAMMMAGIDGIKNQIDPGAGVDVDLFELPADELAKIATVPASLNGALEALRADHHYLLEGGVFTK

SEQ ID NO: 15062 - protein, 153 aa, Lupinus luteus
GVLTDVQVALVKSSFEEFNANIPKNTHRFFTLVLEIAPGAKDLFSFLKGSSEVPQNNPDLQAHAGKVFKLTYEAAIQLEVNGAVASDATLKSLGSVHVSKGVVDAHFPVVKEAILKTIKEVVGDKWSEELNTAWTIAYDELAIIIKKEMKDAA

SEQ ID NO: 15063 - protein, 1151 aa, Solanum lycopersicum
MELLVETRPFRIVEESISAESSDPTNAVIFVGISLLLGIGCRHLLRGTRVPYSVALLVLGIGLGALEYGTHHGLGRIGDGIRIWANIDPDLLLAVSFPALLFESAFSMEIHQIKRCAVQMLLLAGPGVLISTFFLGAALKIAFPYNWSWSTSLLLGGLLSATDPVAVVALLKELGASKKLGTIIEGESLMNDGTAIVVYQLLLRMVTGWTFNWGAVIKFLVQVSLGAVGFGIAFGIASVLWLGFIFNDTVIEISLTLAVSYVAYFTAQQGADVSGVLTVMTLGMFYSAVAKTAFKGESHQSLHHFWEMVSYIANTLIFILSGVVIAEGILAGDNIFKIYDNSWGYLILLYVLILVSRAVVVGVLYPFLRYFGYGLDLKEAFILVWGGLRGAVALSLSLSVKRSSDGSQYISSDTGTLFVFLTGGVVFLTLIINGSTTQFALHYLGMDKLSAAKKRILNYTKYEMLNKALEAFGDLGDDEELGPADWPTVKRYITSLNDVEGEPVHPHTSSGNDDNVDHMHLEDIRIRLLNGVQAAYWEMLNEGRIPQTIANLLMQSVEEANDVVSHEPLCDWKGLKSYVNIPNYYKFLQTSFVHRKLVTYFTVERLESACYICAGFLRAHRTARQQLNEFIGESEIASLVIKESEEEGEDARKFLEEVRVSFPQVLRVVKTRQVTYAVLNHLIDYVHNLEKIGILEEKEMAHLHDAVQTDLKRLVRNPPLVKFPKIRDLISVNPLLGALPPTVRETLIGSTKEIMKLRGATLYEEGSKATRVWLISNGVVKWSSKSTSNIHLLHPTFSHGSTLGLYEVLVGKPYICDIITDSVALCFSVDNERILTALRSDPAVEDFFWQESALVLAKVLLPQMFETTKMQDMRTLVAERSTMSIYIRGESFELPHHSIGFLLEGFVKSHGSHEGLLSAPAPLLPLALEQQSFHNTEASGVHAASFSHQPSQYQVETRARVIMFDIAGFLSGRGLQRRSSSLLSHSIDHPSRSFSRELGGLMSWPENTYKAMQHRQDVERTGQQETNMSTRAMQLNIFGSMISDTRSRSRSFPGISAAKTSHSQSYPEVRSDGVQTLVSVRSEGSTTLRKKAQVQGENKDMSIQLPSAPIEESDTREYSSDDSGGEDEHLIRIDSGRPSFPQWIAEEDKTS

SEQ ID NO: 15064 - protein, 153 aa, Lupinus luteus
GALTESQAALVKSSWEEFNANIPKHTHRFFILVLEIAPAAKDLFSFLKGTSEVPQNNPELQAHAGKVFKLVYEAAIQLEVTGVVVSDATLKNLGSVHVSKGVADAHFPVVKEAILKTIKEVVGAKWSEELNSAWTIAYDELAIVIKKEMDDAA

SEQ ID NO: 15065 - protein, 1030 aa, Mycoplasma pneumoniae M129
MTIAEIRKFAQTTQKFVEAENLFEHGNVVLPKKYLNKARGMAEVLYNSQVIKVSFTAKDGELTCKCSCLANVDNCVHIVAVLLKYHQMLVESKRSFNLAEAFHLDCDQAEMLIENLSLEIIAGGWNFKLGFTINLDKHNPQPSVLRFYCCDATFVYFLHLENDTLHSVELSKFKPEERATLLFFDKLCKQFTVGYDRNSLLFPLAGFLKELQANTEPTIFVFNDDKIDNILFLRISKKHHGLNHVCGFSGKKVFDFVTYKQKEKQIVLRSAYLSKFTDFKFPYTINIYKLQFGEPLFFYFLIQLKRDGFKNFYFQSEDSIVKEKEYLPKLYFKVEYDPVKNKFVSDAFFKYKNHFNKGTTTVYPHRYYMAKKSDRGGFNRLLFYEEAVENFYQDQFDLGYFRKFEHLPIQDKNQIEAFKAALDDLMPVDLAEVSLSDNLLHQKPLHFALSDLEAVAVDDKQIKLSFAPSAVELKLIKRILSAYHKGNVVCIDQESWYDLKQPAAKELIQFWNQFDLRNATSDGNHIYLPKYYLFEVAKIFSQYLDIKNLFDVPTIKKIEDQNNNVFDLSLEHKKITSLRNYQQEGVKWIRGLEENKFGGILADEMGLGKTVQVIFALLDSYLKNHVNLPSLIIVPASLLLNWKSEFEKFAPQIKVKVANIPSKERGELYEKLTNEILIVSFNVLRSDVKLITKQRFHYVVIDEAQGIKNDSSSITKAAKKVKGNFCLALTGTPIENRLLDLWSCFDFVLPSFLGNKKQFTDQFEKEKTDQSFHLLMQRTSPFILRRTKSKVLKELPNKITTDIYVELNPMHQKLYEEERDRGLEEIKQIQDKSSFNILTLILKLRHLCSLPKNSQGILENSAKKEAALEIIHEAIENQRKIILFTQFIDVIDHFKDTFKEQGIEYFIFDGRKSPKSRHSIIEKFNNAKNPCVLLASLKAGGVGINLTAAEVVIHFDVWWNTAVENQATDRAHRIGQKKTVQVYRIIAKNTIEERVCQVQAEKQELVSKTLVEDVNFFESLTNEELLRLFE

SEQ ID NO: 15066 - protein, 159 aa, Burkholderia xenovorans LB400
MTSIYSFSARTLGGEEVSLEQYSGKVLLIVNTASECGFTPQYAGLQKLYETYAARGLAVLGFPCNQFGKQEPGDAAQIGSFCEKNYGVTFPMFDKVDVNGANAHPLFRYLTGEAPGVLGLEAIKWNFTKFLIDREGNVVKRYAPLTKPEAITEDIEKLL

SEQ ID NO: 15067 - protein, 588 aa, Brassica napus
MSLPETKSQTLLDAWDFQGRPADRSKTGGWASAAMILCIEAVERLTTLGIGVNLVTYLTGTMHLGNATAANTVTNFLGTSFMLCLLGGFIAHTFLGRYLTIAIFAAIQATGVSILTLSTIIPGFQPPRCPTTSSHCVQPSGIQLTVLYLALYLTALGTGGVKASVSGFGSDQFDETEPKEQSQMTYFFNRFFFCINVGSLLAVTVLVYMQDDVGRKWGYGLCALAIVLSLSIFLAGTNRYRFKKLIGSPMTQVAAVIVAAWWNRRLELPSDPSFLYDLDDVIAAEGSMKSKQKLPHTNQFRSLDKAAIKDQEMAMTQNVYNKWTLSTVTDIEEVKQIVRMLPIWATCILFWTVHAQLTTLSVAQSETMDRHIGSFEIPPAAMAVFYIGGLLLTTAVYDRLAIPLCKKLFNYPHGLRPLQRIGLGLLLAAMGMAVAALVEIKRLRTAHAHGPTVKTLPLGFSLLIPQYLIVGIGEALIYTGQLDFFLRECPKGMKTMSTGLLLSTLALGFFFSSVLVTIVEKVTDKAHPWIADDLNKGRLYNFYWLVAVIVALNFLVFLVFSKWYVYKEKRLADLGIELEDEPDIPMGH

SEQ ID NO: 15068 - protein, 488 aa, Bacillus licheniformis ATCC 14580
MKLTKLLTYLKNVPSYAGQEDPDITSIEMDSREVKTGSLFVCIKGYTVDGHDYARQAAEKGAAAIVAEREVDADVPVIIIRHTKRALAVLSDAFYGQPTKQLRLIGITGTNGKTSTSHMVEEIFRKAGSRTGLIGTMYTKIHDETFEAKNTTPESVTLQKTFRKMVDQGVDTAVMEVSSHALHMGRVHGCDYDIAAFTNLTQDHLDYHETMEEYKHAKSLLFSQLGGSFNHETPKWAVLNADDPASAYFAQVTSAHLLTYGIQNDADVMAENIKMAPKGTTFDLVTPKGSAQVTIPLVGLFNVYNVLTAAAIAIAADIPFATITEGIEGLKGVRGRFELVDAGQDFPVIVDYAHTPDSLENVLNTCRGLTEGKLFVVVGCGGDRDKTKRPKMAKIAVDLADEPVFTADNPRSENPLAILNDMEEGVKGAYYHSIVNREQAIFFAIANAKKGDVVLIAGKGHETYQQIGGQTFDFDDAEVAKRAILELK

SEQ ID NO: 15069 - protein, 245 aa, Triticum aestivum
MASDTVFVLPGDSIDPSLIPSHPKKPLRLGPGLRHVPPNDIIPTLAGQLVTDRQKNAIRVENARGRYTPRVGELVIGTIQRSAADFFFVTLSDYTAPAQLPQLSFEGATKKTRPQLAAGALVYARVALANRHMDPEIECVSASTGKSEGLGPLAGGMLYNVSLGMARRLMMPKSVQEGRVVVLEELGNAGLQFETATGRNGKFWVDSENVKTVIAVGRAVQETDEKNLDVEDQKKLVRKIIKELS

SEQ ID NO: 15070 - protein, 637 aa, Medicago truncatula
MDKELQLCSVDAANEEEMVSQQPQRRKGGLITMPFIIGNEALARMASLGLLPNMILYLMGSYRLHLGISTQILLLSSAASNFTPVIGAFIADSFLGRFLGVGIGSSISFLGMSLLWLTAMIPSARPPACNHPSEGCESATPGQLAMLFSALILIAIGNGGISCSLAFGADQVNRKDNPNNRRVLEIFFSWYYAFTTIAVIIALTGIVYIQDHLGWKVGFGVPAILMLISTVLFFLASPLYVKIKQKTSLFTGFAQVSVAAYKNRKLPLPPKTSPEFYHQQKDSELVVPTDKLRFLNKACVIKDHEQDIASDGSAINRWSLCTVDQVEELKAIIKVIPLWSTAITMSINIGGSFGLLQAKSLDRHIISSSNFEVPAGSFSVILIVAILIWIIIYDRVLIPLASKIRGKPVIISPKKRMGIGLFFNFLHLITAAIFETVRRKEAIKEGYLNDTHGVLKMSAMWLAPQLCLAGIAEMFNVIGQNEFYYKEFPKSMSSVAASLSGLAMGVGNLVSSLVLSIIESTTPSGGNEGWVSDNINKGHFDKYYWVIVGINALNLLYYLVCSWAYGPTVDEVSNVSKENGSKVEESTEFKHMNPHFDDKVSGETSSKEKELTEFKNGAQVEKVFKNSEQRDLKEEDL

SEQ ID NO: 15071 - protein, 242 aa, Arabidopsis thaliana
MVSMTTSSSSYGTFSTVFNSSRPNSSATFLVPSLKFSTGISNFANLSNGFSLKSPINPGFLFKSRPFTVQARAAAEKTVHDFTVKDIDGKDVALNKFKGKVMLIVNVASRCGLTSSNYSELSHLYEKYKTQGFEILAFPCNQFGFQEPGSNSEIKQFACTRFKAEFPIFDKVDVNGPSTAPIYEFLKSNAGGFLGGLIKWNFEKFLIDKKGKVVERYPPTTSPFQIEKDIQKLLAELKNFCS

SEQ ID NO: 15072 - protein, 637 aa, Medicago truncatula
MDKELQLCSVDAADEEEMVSQQKPERSKGGLVTMPFIIANEALARMASTGLGPNMILYLMGSYNLHLATATQILLISSAAGNFTPLVAAFIADSYIGRFLGVGIGSIISFLGMAMLWLTAMVPAAQPPACSNPPEGCISAKPGQMAMLLSALILIGIGNGGISCSLAFGADQVKRKENSNNNRALEIFFTWYYASTTIAVIAALFGIVYIQDHLGWRIGFGVPAALMLISTVLFFLASPLYVKITQRTSLLTGFAQVSVAAFKNRKLSLPPKTSPEFYHHKKDSVLVVPTDKLRFLNKACVIKDHEQDIASDGSIINRWSLCTVDQVEELKAIIKVIPLWSTGITMSINIGGSFGLLQALSLDRHIISNSNFEVPAGSFTIILIFVILIWIIIYDRVLIPLASKIRGKPASISPMIRMGLGLFFNFLHIVVAAIFESIRRKKAIQAGFLNNTHGVLKMSAMWLAPQLCLAGIAEAFNVIGQNEFYYKEFPKTMSSVSSALSGLAMAAGNLVSSFVFSTIENTTSSGGNEGWISDNINKGHFDKYLWVIAGINVLNLLYYLVCSWAYGPTADQVSKVSEEENGSKEENSTEFKNVNPQIDDKVSDETSSKEKELTEFKNGGQVEKVSKVSEENGSKEE

SEQ ID NO: 15073 - protein, 453 aa, Xanthobacter autotrophicus Py2
MMRRTSLFLFGVAAGALVAVAAVQPRVLAPFFLGTAAEAASSDTYKQLNLFGDVFERVRSDYVEKPDDAKLIEAAINGMLQSLDPHSSYMDAKNHRDMQVQTRGEFGGLGIEVIMEDGLVKVVTPMEDTPASKAGILSGDLIAKLDNDQVQGLTLNEAVDKMRGPVNTPITLTILRKGVEKPLEIKLVRDTIKIQTVRSRIESDDIAYIRLNSFTNEQTYEGLKKAIDDLTAKIGPDKIKGYILDLRNNPGGLLDQAVAVSDAFLERGEIVSTRGRNAEETQRFNARGGDLTKGRPVIVMVNGGSASASEIVAGALQDHKRATVLGSRTFGKASVQTIIPLGQQGALRLTTARYYTPSGRSIQAKGIEPDIVLVQDLPDEMKQKLGASLDTTRGEASLKGHLKNGDDEQTGSPSYVPPDPKDDTQLKLAVELMKGTVKNAAFPASPNKASQAN

SEQ ID NO: 15074 - protein, 670 aa, Actinobacillus pleuropneumoniae serovar 1 str. 4074
MKINQLSRLIAICFGTIVSSAFAVEPQIQESALVTPKPTEQHSLSTKRVTARLTQSHYHKFKLDDEFADKIFNRYMDWLDGAHNTFLQSDIDEMRAKYAAKLDDELYEGKLDSAFEIYDLMTKRRYGRYKYALSLLDKEPNLKGSDQIENDREKAAFPATVKEANQLWEQRVKNDVINLYLKDKKWPEIKKTLIKRYNLAIKRLTQIKADDVLQTYLNAFAREIDPHTSYLSPRAAKAFQESMNLSLEGIGATLAMEDDVTTIKSLVPGAPAARSKKLVVGDKIVGVGQDNDEIEDVIGWRLDDVVDKIKGKKGTKVRLEIEPEKGGKTKVITLVRDKVRLEDSAAKLTVDKINGKNVAVIKISTFYIGLTNDVRKLLDEMKTKKVDGLIIDLRENGGGSLTEVVELTGLFIKDGPVVQVRDAFNRIKVHEDPEADKSLYDGKIMVMINRHSASASEIFAAAMQDYNRAIIVGQQTFGKGTVQQSRSLNFVYDLDQEPLGFIQYTIQKFYRIDGGSTQLKGVEADIKFPEIINAEKTGESFEDNALPWDKIPAASYQEAGHARDAVSALTAKHEERIAKEPEFITLNEDIAIRKERDARKYSSLNLEERLKEDRADEAKRLKDLNARFAREGKKAIKNIDALPKDYEAPDFFLKEAEKMMVDWLEIDKKS

SEQ ID NO: 15075 - protein, 226 aa, Zea mays
MGAARDSTAAGQKRGTGTRCELCGGAAAVHCAADSAFLCLRCDAKVHGANFLASRHVRRRLVPRRAADPEASSAASSGSSCVSTADSAESAATAPAPCPSRTAGRRAPARARRPRAEAVLEGWAKRMGFAAGPARRRAAAAAAALRALGRGVAAARVPLRVGMAGALWSEVAAGCRGNGGEEASLLQRLEAAAHVPARLVLTAASWMARRPDARQEDHEEGWAECS

SEQ ID NO: 15076 - protein, 1122 aa, Physcomitrella patens subsp. patens
MRRSAAPSMLAKKLQEQGKENVINAKSAIFEKAGGSEPFRNIIPSRKRFRTPFTSPQAVVSPRTKLHSAGGTESYGSEGLAICKGSNVVRDAPTAGRKPSQVLQLMQSRRIGTMSNISSTVSDQCDKLSPQSASPLDLYSASDIVEKVAFEEGNSDLFSKADLETIPGNSSSFESSCAVGAKRDCPEDGELENASLDVRKKHCPAEKEGEPLLSEKGLCVEQAAAISKETVACAYDRLNEDLKLDLIPSGGADTVNLKENLESTSNKGEGEPYVHVKEDHNDEVVSLSSKPTNPEETLHGPHRQFSSLHGVNLLEAVNHTHELPTTVHYLVMYCPRKKNAKRKGPWSDGIIVCQGRSCTLQDMDSKVVSKSNFQGLKDMPEGATLEVGKFEVEVMRKASNEEVLSGTLYMANKLLPSIPIQCPLKTLKKQPFKSSKLDGSQQSSMTILYLVHVKDAWKLNEDSSTEVPVVVDPYIASKLRPHQKDGVMFMYECIMGLRSNSFCGCLLADEMGLGKTLQVITLIWTILKQHTLFVLLDLSNEDVSSVICKRMKLYMTVGVDFHSQGPGGSPAVKRVLVVCPSSLVHNWGNEVHKWLGRERLRFMAVHAGTAYREAAQKFADFKAGFSSPLLITSYEILRKHIDIIASTKPGLLVCDEAHRLKNCAGNKTIDALVGLQCPRKILLTGTPVQNDLNEFYAMIDFANPGLLGPLSSFKRIFAEPIERSQDRTASEEEQKLGQARSLELQSRTEFCILRRTANINEAYLPTKTEVVARKILFKHEGITGWHHCPMSPKEGSMALRSVYMTENVSATILSSITSLRKLCSHPQLSYNDIIEGTNLDAELKSQIIAAGLSRFSDSTDNIEVLQSRASLSDEGWKFSGKLACLYWLLRTVYTSRTARQKDRVVVVSNFTRTLDLIQDMCTSQGWNWLRLDGSTEASKRQLLVDQLNSGVGDVFVFLLSSKAGGTGLNLIGANRLVLFDPDWNPATDSQAIARIWREGQLKPVLIYRLLSTGSIEEKIYQRQIMKGGMSAAVEGDADVHTKKSNIGRHFSKEELKELFTLNLATNCDTFDLISRTKTAPAKTWMDDSENVDDPALQSAIKSGIVSFVYNDRRPAPQQLATV

SEQ ID NO: 15077 - protein, 406 aa, Yarrowia lipolytica CLIB122
MAARKSKKRTHVQISEEDMDKIPKSMIFKMGSKKVGSVAASPASQHALTQLVRDTRCAMEPHTAGKLRERKGNKLRDFVTMAGPLGVSHLMIFTKGESGMTSLRMARVPRGPTLHFKVSQYSLIKDVRKFVRSPKSNDGKLYKQPPLLVMNNFSLKSDDATNPHETLVTQMFQNMFPPLSAQNTRIPSIRRVVMLNKDKETGSIEFRHYAIDTRPVDVTRGVKKLTKLKHKLRKKIPNLSKKQDMADYLLDPDAGAFTSDSDMSEVEEDAIVDLNPDDDDEMPLEEGPSKRAVKLVEIGPRMTLDLIKIEDGVCSGKVLHHTRIKKSEAEIKKLEKRHSSAAKIKADRKAEQLANVKAKTEKKGRMARGKEKAKLKGDDGDEENEAGDDEDEENEADQEDDDEDDE

SEQ ID NO: 15078 - protein, 173 aa, Glycine max
MSDAPPSPTHESGGEQSPRGSSSGAREQDRYLPIANISRIMKKALPPNGKIAKDAKDTMQECVSEFISFITSEASEKCQKEKRKTINGDDLLWAMATLGFEDYIEPLKVYLARYREAEGDTKGSARSGDGSATPDQVGLAGQNSQLVHQGSLNYIGLQVQPQHLVMPSMQSHE

SEQ ID NO: 15079 - protein, 674 aa, Saccharomyces cerevisiae
MVTSYQMVVTDANYLQKMKWQYMILDEAQAIKSSQSSRWKNLLSFHCRNRLLLTGTPIQNSMQELWALLHFIMPSLFDSHDEFNEWFSKDIESHAEANTKLNQQQLRRLHMILKPFMLRRVKKNVQSELGDKIEIDVLCDLTQRQAKLYQVLKSQISTNYDAIENAATNDSTSNSASNSGSDQNLINAVMQFRKVCNHPDLFERADVDSPFSFTTFGKTTSMLTASVANNNSSVISNSNMNLSSMSSNNISNGKFTDLIYSSRNPIKYSLPRLIYEDLILPNYNNDVDIANKLKNVKFNIFNPSTNYELCLFLSKLTGEPSLNEFFRVSTTPLLKRVIERTNGPKNTDSLSFKTITQELLEVTRNAPSEGVMASLLNVEKHAYEREYLNCIQRGYHPNVSAPPVTIEVLGSSHVTNSINNELFDPLISQALSDIPAITQYNMHVKKGIPVEDFPKTGLFPEPLNKNFSSNISMPSMDRFITESAKLRKLDELLVKLKSEGHRVLIYFQMTKMMDLMEEYLTYRQYNHIRLDGSSKLEDRRDLVHDWQTNPEIFVFLLSTRAGGLGINLTAADTVIFYDSDWNPTIDSQAMDRAHRLGQTRQVTVYRLLVRGTIEERMRDRAKQKEQVQQVVMEGKTQEKNIKTIEVGENDSEVTREGSKSISQDGIKEAASALA

SEQ ID NO: 15080 - protein, 540 aa, Hordeum brevisubulatum
MGWGLGDPPADYGSIMAVGLFVALMCICIIVGHLLEENRWMNESTTALLLGLGAGTVILFASSGKNSRLMVFSEDLFFIYLLPPIIFNAGFQVKKKQFFRNFMTITLFAVVGTLISFSIISLGAMGLISRLNIGALELGDYLALGAIFSATDSVCTLQVLSQDETPFLYSLVFGEGVVNDATSVVLFNAIQNFDLGNFSSLKFLQFIGNFLYLFGASTFLGVASGLLSAYVIKKLYFGRHSTDREVAIMMLMAYLSYMLAELLDLSGILTVFFCGIVMSHYTWHNVTESSRVTTKHAFATLSFISETFLFLYVGMDALDIEKWKIVSETYSPMKSITLSSIILALVLVARAAFVFPLSYLSNLTKKTAGEKISIRQQVIIWWAGLMRGAVSIALAYNKFAKSGHTQLPSNAIMITSTIIIVLFSTIVFGLLTKPLIRLLIPARHLTREVSALSEPSSPKSFLEQLTVNGPETDVENGVSIRRPTSLRMLLASPTRSVHHYWRKFDNAFMRPVFGGRGFVPFVPGSPTESSVPLLAHGSEN

SEQ ID NO: 15081 - protein, 135 aa, Glycine max
ARGSMEKFNNSPDARVFFGSIKACGEGISLVGASRIIILDVHLNPSVTRQAIGRAFRPGQMKKVFVYRLVSADSPEEEDHNTCFKKELISKMWFEWNEYCGDRAFEVEAVEVKECGDLFLESPLLGEDVKALYKR

SEQ ID NO: 15082 - protein, 197 aa, Yersinia frederiksenii
SSIGGWKGINESDMVLMPDASTAVMDPFFEDSTLIIRCDILEPGTMQGYDRDPRSISKRAEDFLKSSGIADTVLFGPEPEFFLFDDVRFGSSIRGSHVAIDDIEGAWNSSTKYEGGNKGHRPAVKGGYFPVPPVDSSQDLRSTMCLTMEEMGLVVEAHHHEVATAGQNEVATRFNTMTKKADEIQIYKYVVHNVAHA

SEQ ID NO: 15083 - protein, 227 aa, Ostreococcus tauri
MVEKHVLSSKRSLGRFERYARAHCLNSADTSCSSLGVLSAKFMKLLSETENGILDLNHAATSLSAQKRRVYDITNVLEGIGLVSKLSKSKVALRRVDEDFVETTSGQHKEHKSLSRTVNIESSQTLPLASEDDASLHIETIRSFIRSVFTDSQLETGIFISQADIIEQHALSSDMLIAVRAPTGAALLLPSPFTQERSPPHYRLFLRSNENSSAGVEVFVLATDGST

SEQ ID NO: 15084 - protein, 164 aa, Brassica napus
  misc_feature (5)..(5): Xaa can be any naturally occurring amino acid
  misc_feature (12)..(12): Xaa can be any naturally occurring amino acid
  misc_feature (14)..(14): Xaa can be any naturally occurring amino acid
RKTLXQIVTRIXSXGFGIVLIYIVTLSIFPGYITEDVHSDLLGDWFPVLLIAAFNVFDLVGKSLTAVYMFTDEKIAVGGCIARLLFYPLFWGCLHGPMFLRTEIPVALLTCLLGLTNGYLTSVLMILAPKSVPLKHSETAGIVSVLFLVIGLASGSVLAWFWVI

SEQ ID NO: 15085 - protein, 509 aa, Xanthomonas campestris pv. vesicatoria str. 85-10
MRVAVLSVALSLALFASPGWAQKAGPAAAQASADDPEANEAAVSKVPLDEIRRFVAVYNAVKQAYVDPVEDKKLMHSAVRGLLSDLDPHSTYFDKEDAEAFDEQATGAYDGIGVELLQQQDNTLKVIAPIDDTPAARAGIRAGDVIVAIDGKPIDASKAMEPLRGESGSKVVLTIMRDKTPKPFDVTLQRETIRVASVRSKLLEPGYGYIRISTFQADTGADFQKNLKQLQAGGKLRGLVLDLRSNPGGLLTSAVQVADDLLDKGNIVSTRGRISISDAKFDATPGDLLSGAPVVVLVDAGSASASEVLAGALRDNKRARIIGSRTFGKGSVQTVLPLDNGDSVKLTTARYYTPSGKSIQASGIMPDVLLTPEPQPGDADVPASLTDYSEATLPGHLRGDDEGEEGYSAGDVLPGDGPIAEALAELKQPGSVAKAQAARKAKAQAAQKAKPAKTGADPKPAAARPATTDKPTSAEPAGKAKPATAPAAPAEPVQPAPPKDTPASTEPAN

SEQ ID NO: 15086 - protein, 703 aa, Saccharophagus degradans 2-40
MIKNIAVSLVFIFSVTCAVAKPPEAPKLIPTKVQSQTIVDVIAQLNARHYRNQAIDDSLSTRFLESYIDSLDPAHMFFYTKDVENFKKHNLKYDDYFRKGKLEEGFEVYRTYRARVVSRLESAIEMLADENVKFDFNAKDEIILDRSELPWPTTQAEADELWYKRTKLSLLNLKLAGKTLEEAKETVTKRYKNQLNRILQQDSADVFEIMVNSLTLLFDPHTNYWSPRTSENFNINMSLSLEGIGAVLQSEDEFTKVVSLVPGGPASKQGQLKPADRIVGVGQGDEGEVVDVTGWRLDEVVDRIRGPKNTVVRLEVLPAKESNGETAVIRIKRDEVKLEDQAAKKGVLELSDEERLYKIGVINLPAFYINFDKANSRDPDYRSSTRDVSRLLDELQAEGVDGIILDLRNNGGGSLREATMLTDLFIDHGTVVQIRTPDGYIARHNHARLRAKYRGPLIVLVNRLSASASEIFAGAIQDYDRGLIVGTQTFGKGTVQSVAPTVEGKIKLTESKFYRVSGDSTQHRGIIPDIELPMLVDMKEVGESAYDNALPWDTIHPVPHAKYFDLDASIPYLTEAHKKRIAHDPDFNYLLDQIAVMEENKRKKAVSLNEKQRIAEKENLEKQAMVIENKRRTGKGQDPYKTLAEYRAAQEEENPEDAPVVSSRETVIDLDGDTLLNESGNILIDYIRFQTTNAQKQASNFSK

SEQ ID NO: 15087 - protein, 193 aa, Yersinia frederiksenii
GWKGINESDMVLMPDASTAVMDPFFEDSTLIIRCDILEPGTMQGYDRDPRSISKRAEDFLKSSGIADTVLFGPEPEFFLFDDVRFGSSIRGSHVAIDDIEGAWNSSTKYEGGNKGHRPAVKGGYFPVPPVDSSQDLRSTMCLTMEEMGLVVEAHHHEVATAGQNEVATRFNTMTKKADEIQIYKYVVHNVAHA

SEQ ID NO: 15088 - protein, 451 aa, Zea mays
MDHMTFPHLTRFQVKKKQFFRNFMTITLFGAVGTMISFFTISLGAIAIFSRMNIGTLDVGDFLAIGVIFFATDSVCGLQGLHQDETPFLYSLVFGEGVVNDATSVVLFNALQNFDLNHIDVAVVLNFLGNFCYLFVSSTLLGVFTGLLSAYIIKKLYIGRHSTDREVALMMLMAYLSYMLAELLDLSGILTVFFCGIVMSHYTWHNVTESSRVTTKHAFATLSFIAETFLFLYVGMDALDIEKWEFASDSPGKSIGISSILLGLVLVGRAAFVFPLSFLSNLTKKSPLEKITFRQQIVIWWAGLMRGAVSIALAYNKFTRSGHTELHGNAIMITSTITVVLFSTMVFGMMTKPLIRLLLPACSNTATSEPSSPKSLHSPLLTSMQGSDIETGSAQIVRPSSLRMLLSKPTHTVHYYWRKFDDALMRPMFGGRGFVPFSPGSPTEQSVHDGR

SEQ ID NO: 15089 - protein, 187 aa, Yersinia frederiksenii
ESDMVLMPDASTAVMDPFFEDSTLIIRCDILEPGTMQGYDRDPRSISKRAEDFLKSSGIADTVLFGPEPEFFLFDDVRFGSSIRGSHVSIDDIEGAWNSSTKYEGGNKGHRPAVKGGYFPVPPVDSSQDLRSTMCLTMEEMGLVVEAHHHEVATAGQNEVATRFNTMTKKADEIQIYKYVVHNVAHA

SEQ ID NO: 15090 - protein, 1202 aa, Chlamydia muridarum Nigg
MILMILNSLSMFRRQATRFLQDNRESIAVSFFKNTYKITIPDEDSPDGEWISTLSFNEEERLSFAACSCPDGDCCEHLLIATLAAYTPTEGALLHTKFEASFWWRLFCKLFLSKASLQAPGEKIYTVKSEQISVSIQCLSAESLTSWLPIVHNSPEPQKITEETFPQSALYRIARELFLYTQKGASLIVQENPQGFPSLFSFQWAGISLTIEILDVDTLKELFPLLELSQTSLYNGDSYLLRDVHVVPEQAKIYFTKEYPPLSKSIREYQATNLGSIEYFAGAHKCTAIPQKLSLPIHIIPALDHSFREQLLSQLCYETEERPIHYDIHFFRDASLSFSAYLETPGDLAEGHIIYPGFCYIPNKGLLAVSGLLSPESTFTIRADHIESFLDEYGALIKEPGFETFSNKSPTGTLSYSVTEQGVLLFHYDTGNSSDIELNFGKWTYYSRQGFFLNSRLDLALQDGLTIEAPHVADFILKHEVALKSIPNFFAPQPPLKTIRFEVHKEKKGVGIYLKPIFEGLEQESCRLFGQFLYRENIGFSLLPASLQMVCQIPTEVPANQVTEFLLQFSKDDRMIFPDPQLALPEQVQLNILSIQRPHPSSPLHLKLEIKTNIGSISLGTVLQALKGKKEFLFSKAGFLNLDNCLFVFLKQFLSSQRYDIQESTLITMVTDIFKLDALAPLITDPNIDASEEDLAYFSQLKSACLPPIPMNLFSTDHKLRPYQNSGLLWLWFLYNHRLSGLLCDEMGLGKTHQATALLDIVAQTAKNPKFLVVCPTSVLPHWELVLASHLPKATLFSFHGPHKPKTLPDCDIIITSYGTLRQNYALFYKVSFTVAVFDEIHMAKNKSSQIHKILCRLDAQMKLGLTGTPVENNLIEFKGLLDIILPNYLPSDGLFKRLFTHKNSSETDENIVSSKDLLLKLTRPFILRRTKKLVLPELPDKVESLIPCQLSPEQAQLYASTLKKEKCQIQQLEKEDDPAAVNYLHVFALLNQLKQICDHPAIYFKDPESYKNYASGKWAAFVKLLNDSLASGYKVVVFSQYIQMIRIISLYLEEQNIQYALVQGKSQNRKEEIDRFSNDPNCRVFIGSLLAAGTGINLTAGNVVIMYDRWWNPAKENQALDRVHRIGQKNTVFIYKLVTEDTLEEHIHYLIEKKMRLLNQVTTTQDSNILHVLNREDLITILSYKDEHGLSDEVQEDSGDS

SEQ ID NO: 15091 - protein, 1023 aa, Gibberella zeae PH-1
MARSSSPLPIRHSNVLPRTPSLARNTSTIDDADELADTIPCSPSAFLRDPQTTQPTQVLQKPTLAPMRSSSPASSIIEVPASSPFQQAKKPTPLGNRLAPAGTVFRPPQRTFPSMNNKRPAQEPISLISDDEDDLTPPRGDIRPTMFKAHVAAFAYKPEVDAIEQQAVITKLRQIYDVFGDKVPSHKAKEALNVCRNDLDETILYLERQFQPRPALKPKTGRRLISKGALQTSATSSRGNSVSYTASPSPEKKPRRRLVQGLRQQSIPSSPPFPSSPAAAPAHASSDDPLVIDLVDDDKEDNYQAEASPDLSDDDDKNNKVLISLNTCTVQELAAMTGMKEDQLACMIEKRPFEDLAKARRVTIGKKPGAKKASKISIGDNVVDAVEVFLNAVEAIDNVVDKCERDAKDIKQQVDTWDIDTFGHDKLRVQRQDSEDLPPTPTSISATKYVRPPIAKQPKYMDGHCKMKPFQLVGLNWMSLLYKFNIGCILADEMGLGKTCQVISLISHFVEDYEESTSSNKGRRPWPNLVVVPPSTYNNWLVEFGRFAPDLSVIGYRGSQAERAQIAFEIEQEPEAFHVVLATYSQINNEADIEAMQSIRLNAAIFDEGHKMKNPQTKIYRDLRRIPASWKMLLTGTPVQNNLMEMTSLLNFINPEIFKGCMDQIQYIFSQKVTIRDVSNGAFLYSERVKRARTILEPFILQRRKDQVLSDMPPKICTVVRCDLDEKQKQVYADYEEMFKMEPSKRVTKVRGRGNDQNNCWMQLRKAALHPLLFRRHFNDKKVEKMATILMNSVSQDDLRQPDIKHLIQELKDSSDFGLHLWCRDYPGLLGKFDIPPEAEMDSGKVRKLLELINHYQENGDRVLVFSKFSRVIELLQEVLAQQQIQHRVLMGSTTVEERQTLIDEFNEDSDIPVFLLTTGAGGTGINLTAANKVIIFDQSDNPQDDIQAENRAHRLGQKRDVEIIRLIATNTIEELIYKACQKKIELANKVTGAVADEDPAVAEQTLETEVRKMLMGEQMTPP

SEQ ID NO: 15092 - protein, 157 aa, Brassica napus; identical to SEQ ID NO: 788

SEQ ID NO: 15093 - protein, 400 aa, Magnaporthe grisea 70-15
MSQTNGTHTKKAVHFGAGNIGRGFVACFLHNSGYEVVFADVTDRTCDALNNQTSYKVIEVGAEGTEEKTITNYRAINSKTKEDELLQEIATADVVTCSVGPNILKFIAPVIAKGLDMRSEELKPAAVIACENAIGATDTLAEHIKEHLPATRVEDLSTRARFANSAIDRIVPAQDPNSGLDVKLEKFYEWVVDRTPFADHEVPSIEGIHWVDNLEPYIERKLYTVNTGHATAAYHGYNRQKRTVYDALQDREIQSEVRRALENTSKLITAKHGINPEEQQAYVRKIMTRIGNPHLEDAVERVGRAPLRKLSRKERFVGPAAELAEKGEDCSALLDAAEMALRFQNVEEDAESKELAKIMAENSAEQVVSQVCGLQPSEKLYPKMVEIVHRVQQDSMDDTE

SEQ ID NO: 15094 - protein, 470 aa, Ehrlichia ruminantium str. Welgevonden
MFLSAEDTLNYIKKNTINFVDLRFTDSTSRWHHITRNAETINTYVLSSGVNFDSSSIPGWQSVEKSDMILLPDVSTAFVDPFTAQPTLVIICNVINPYDKSEYPKDPRYTAHKASQYMLSTGIADKCYFGPEVEFFVFDNATFYNGMYHSYFKIESSEHISQFQKREHINNSHCPKIKGGYMPTPPVDSLHDLRSEILTMLKEVGITPLIHHHEVAASQCEVGFQHDELIRSADNVQKCKYIIHGVASSYGKTATFMPKPVIGDNGSGMHCHQSLWKDNINIFVNSDGSMSEICLYYIGGIIKYGKAINAFTNPSTNSYKRLVPNFEAPTWLTYSYENRSSAIRIPYVPNTDLNAKRIEVRFPDPLANPYLCFSAQLMAGLYGIKNKIHPGPSIDKNLYTLDKKELQSFISVANSLEESLDALDNNREFLLEGDVFTNDQIDTYIKLKSSEVRDLHLHPHPIEFINYYSS

SEQ ID NO: 15095 - protein, 508 aa, Mycobacterium sp. JLS
MAMKLRPSHPVGHALGALAEQVQAVPAPGFPVPDIRVTGVTLRGQDALPGDLFAALPGSSAHGARFVADAVAAGAVAVLTDAAGAVMLGADPVVPVLVHPDPRAVLGAVASTVYGHPSQHLRVVGVTGTSGKTTTTYLVEAGLRAAGRVAGLIGTVGIRIDGRDQPSALTTPEAPDLQALLAVMVEQGVDTVVMEVSSHALTLGRVDGVHFAAGGFTNLSRDHLDFHPTMEDYFDAKAGLFDPQSRTRAELAVVCVDDDAGRAMAIRAGRAVTVSASGRPADWRAEDVRAVEAGAQEFVAVDPAGVHHGLRIALPGHYNVANCLLAAALLDAVDVSPEQAAPGLRTATVPGRLEAVDRGQDFLALVDYAHKPGALRAVLETLRGQGTGRIAVVFGAGGNRDAGKREPMGRVAAELADLVVVTDDNPRDEDPATIRAAIMAGARAAGGGADVVEVGDRREAIAHAVRWARSGDVVLVAGKGHETGQTAAGRTHPFDDRVELAELLEKRG

SEQ ID NO: 15096 - protein, 513 aa, Alkaliphilus metalliredigens QYMF
MQNNITIAIETAKAQGDEKMNIDGVEVQGVTSDSRKVKTGYVFVAIKGAESDGNNYIGEAIQRGAVIIYTEHRITALGVMIKICSNARKTLADLCNAFYDHPSEKIRVIGITGTNGKTTTSHIIYHALKESGVSVGLIGTLDIKINNQTHFTELTTPSAEDIYYYLNKMVQQKVQVVVMEVSSHGLKSERVHGIKFDIAIHTNIERDHLNYHKNMGDYIRSKKKLFDCLSPGKVALLNLDDNHSLELLTGNNGLIVVTYGLNVRATVTASSIDTELNTTFHFCLQRGMTTLAGLEVEPFEYPFSINLLGKHNIYNSLAAITCCLLLDLSCEEIAKNIKSFTGVTRRLEVIYKKGYTVIDDFSHNPASYGAVFESMQNLEYKNLHVINAIRGSRGADINQENADVLKIWYELLGMKTLMITSSKDKTGKLDEVQVEEIGAFFKVLSEGSVNFEYVDHLSDAIETIIPRIEEGDLLLLLGAQGMDKGKEIFLKDIGEEYMKLGNEYKSNDCIQIN

SEQ ID NO: 15097 - protein, 281 aa, Clostridium tetani E88
MDLWLKEGQISDAVMTYKIKETLVRKKTEYQDLAIVDTYALGRMLVLDGIVQTSIKDEYVYHEMITHIPLYTHPNPKKVLVVGGGDGGTIREILKHPSVEKAVLCEIDEEVVKECKKHLPEISNNALEDSRCEVFIGDGIKYVNEHKNEFDVVIIDSTDPFGAAEGLFGGSFYGKISECLTEDGIFVAQTETPFYLPEIVKRVYDDSKAVFPVTKLFMAAIPTYPSGYWSFTIGSKKHDPEKAPVPEVLPFETKYYTPRLHSASFVLPKFVENLIFANISE

SEQ ID NO: 15098 - protein, 307 aa, Gibberella zeae PH-1; identical to SEQ ID NO: 791

SEQ ID NO: 15099 - protein, 431 aa, Anabaena variabilis ATCC 29413
MIGGAIATTATISVFGPAWTRSVRAALQDSPKAVIDQVWQLVNNEYVDGKFNQQDWLAVRKSLLSKDYSSKEEAYVAIREALQRLNDPYTRFMDPKQFEVLTSQTSGEVSGIGIRMELNEITKRLTVLEAIENSPALKAGIKAGDEILAIDGKPTQQMKVDDASKLIRGKEGTAITLRLGRTGNSAFDLKLTRAKIEVPTVSYNLKQEGSRRVGYIRLREFSAHAAEQMARAIRNLNGQKVDSYVLDLRGNPGGLLQASIEIARMWLDDGGIVRTVNRQGFNEDTKANRTALTKLPLAVLVDGNSASASEILTGALKDNKRAVVIGGQTFGKALVQSVHELPDGSGLAVTIAHYYTPNGTDINHKGITPDIKLELTDAQERQLANNPKLIATQNDPQYARAIAVLSGNTFARPPLNQTNQPMSLGANELKF

SEQ ID NO: 15100 - protein, 469 aa, Shewanella sp. ANA-3
MSVESVLKQLEELEVKFVDLRFTDTKGKEQHVSIPAHQVDADFFEDGKMFDGSSIAGWKGINESDMVLMPDPTTFVLDPFTEETTALIRCDILEPGTMTGYDRDPRSIAKKAEEYLRSTGIADTVLVGPEPEFFLFDDVRFGTDMSGCFVKIDAKEAAWNSGTSYEGGNTGHRPFVKGGYFPVAPVDSSQDLRSAMCLVLEEMGQVVEAHHHEVATAGQNEIATRFNTLTKKADEIQILKYVVHNMAHAYGKTATFMPKPIVGDNGSGMHVHQSLSKDGVNLFAGDKYAGLSETALYYIGGIIKHARALNAFTNPSTNSYKRLVPHFEAPVMLAYSARNRSASIRIPVVPSPKGRRIETRFPDPHANPYLGFAALLMAGIDGIQNKIHPGEAMDKDLYDLPAEEAAEIPQVATSLENALENLQADHEFLTRGGVFSEDFIQSYIALKSAEAERVSRTTHPLEFEMYYSL

SEQ ID NO: 15101 - protein, 138 aa, Zea mays
  misc_feature (24)..(24): Xaa can be any naturally occurring amino acid
  misc_feature (74)..(74): Xaa can be any naturally occurring amino acid
  misc_feature (88)..(88): Xaa can be any naturally occurring amino acid
  misc_feature (114)..(114): Xaa can be any naturally occurring amino acid
APALTKVSADDAARKPLPPCCLKXAKARVPANRANCHDTGDAGWFTGTQIAFWYITSKVHDFNNPMRPGEAHSXLKWDKSCFKGNSPXYQEILGFESSTYGNVLVLDGIFQLTXKDDCAYLELGTHLPLCSIPAPNML

SEQ ID NO: 15102 - protein, 303 aa, Triticum aestivum
MMDQEHLDFIMRRHHHQGGMGFVPADRGDSEEALGSSESEPAGRPRGKRARAAEVHNLSEKRRRCKINEKMKALQSLVPNSSKTDKASMLDDAIEYLKHLQLQVQMLSMRNGMYRPSVNLPGAAGHLPTSQMCAALNQNSVDASSNPPAAMLPMNHFLGAMSGARPSFDHPNQDRPRHEPLVLSSVPCTTTREPPFLLGPSQESPLRSLQLTLPAEMIFQEEAMLKHWLCSTQETASVPAGHEMKPVRQETPAARAGHFDTCSIWKNQPQDMVPNNTESILFVPHLQRFQNSNADSGLRAESK

SEQ ID NO: 15103 - protein, 966 aa, Oryza sativa Japonica Group; identical to SEQ ID NO: 12834

SEQ ID NO: 15104 - protein, 182 aa, Gossypium hirsutum
MASSMISSATIATVNCSSPAQANMVAPFTGLKSASAFPVTRKANNDITSLASNGGRVQCMQVWPPLGKKKFETLSYLPDLTPVQLAKEVDYLLRSKWIPCLEFELEEGFVHRKYSSLPTYYDGRYWTMWKLPMFGCTDSAQVLEELENCKKEYPNAFIRIIGFDNVRQVQCISFIAYKPKGY

SEQ ID NO: 15105 - protein, 475 aa, Oryza sativa; identical to SEQ ID NO: 13973

SEQ ID NO: 15106 - protein, 529 aa, Bacteroides thetaiotaomicron VPI-5482
MMMKKIKVYALLVCLLATSAAQAQSFGSAAMRKLQMAEFAISNFYVDKVDEDKLVEEAIIKMLAQLDPHSTYSDAEEVKKMNEPLQGNFEGIGVQFQMIEDTLLVVQPVSNGPSEKVGILAGDRIIAVNDSAIAGVKMSTEDIMKRLRGPKGSKVNLTIVRRGVQDPLVFTVKRDKIPILSLDASYMIQPKIGYIRINRFGATTAEEFKKAMKDLQKQGMKDLILDLQGNGGGYLNAAIDLANEFLGQKELIVYTEGRTAQRSEFFAKGNGEFRDGRLIVLVDEYTASASEIVSGAVQDWDRGIIVGRRSFGKGLVQRPIDLPDGSMIRLTIARYYTPAGRCIQKPYDSSTDYNKDLIDRFNHGELMNADSIHFPDSLKVQTKKLKRTVYGGGGIMPDYFVPIDTTLYTDYHRKLVGKGVIIKFTMKFIEDHRKELADKYKKFDSFNEKFVIDDDMLATLREMGEKEGVKFNEEQYQKALPLIKTQLKALIARDLWDMNEYFRVMNTTNESVQKALEIFRSGEYQKKLK

SEQ ID NO: 15107 - protein, 584 aa, Psychrobacter arcticus 273-4
MTLSTSSPSTTTVTLQQLFEASSSDRHLPPQVLTANLAASVSESSSSNLSNQVSSNQMTAVQLDSVVNIPFQQFCLDSRQLIRNEAFALLKSHTPNCQKSRDYLYQAANNAAFILSEIDPLALIATGNIPPHANLELTPDNAKYIAQQQLDALPCPVLYVPNIRDFLGSLIQARLQYQQRVTLPTVVAVTGTNGKTTISQLVAQLTQLTGMSSAVMGTAGNGRLGALVQASHTTGDTLAVQQFLHQMGKEGAELLALEASSHGLDQQRLQGMPVSVAIYTNLSRDHLDYHADMAEYAAAKAKLFDKAHFPDLTHAIINIDDEYAQIMLDTAHASHLKVWTYSLDPSKTATFVAADITPSLHGVEISLCTDFGDGKVNHLDIVSPLLGRFNVANLLAAIAAAVALGHKTGIDIERIIAVIPQLQGAVGRMQRVPSNDGCFIVDYAHTPDALSQVLASLKTHCKGQLWAVFGCGGDRDTGKRPLMAQAGLAGADKVILTADNPRTEDPNVILQDMQAGMSTEQYQRTHIESARQTAIEYAVSQAAADDIVVIAGKGHETYQEINNIRYDFDDSVILQNALEQAGRV

SEQ ID NO: 15108 - protein, 469 aa, Vibrio cholerae O1 biovar eltor str. N16961
MSVENVLSLIQENEVKFVDLRFTDTKGKEQHISIPAHQIDADFFEDGKMFDGSSVAGWKGINESDMVMMPDPSSAVLDPFTEDATLNIRCDILEPATMQGYDRDPRSIAKRAEEYMRSTGIADTVLVGPEPEFFLFDDVKFATNMSGSFFKIDDVEAAWNTGTEYEDGNKGHRPGVKGGYFPVAPVDSSQDIRSAMCLIMEEMGLVVEAHHHEVATAGQNEIATRFNTLTTKADEIQIYKYVVHNVAHAFGKTATFMPKPLVGDNGSGMHVHQSLAKDGVNLFAGDKYGGLSETALYYIGGIIKHARALNAITNPSTNSYKRLVPHYEAPVMLAYSARNRSASIRIPVVPSPKARRIEVRFPDPAANPYLAFAAMLMAGLDGIKNKIHPGEAMDKDLYDLPAEEAAEIPKVAESLQQALQYLDADREFLTAGGVFSDDFIDSYIALKTKDVERVNVAVHPLEFELYYSV

SEQ ID NO: 15109 - protein, 432 aa, Bradyrhizobium sp. BTAi1
MSSSLHAVACERGIKYFLISYTDLFGVQRAKLVPAAAIDGMVKTGAGFAGFATWLDMTPADPDVFAMPDPASLIQLPWKPEVGWLAADPWMNGKPVAHAPRNLLKRMVADAAAQGYELKSGVECEFFLITADGSAPSDVADKQSKPCYDQQALMRRYEVIAEICDAMLALGWKPYQNDHEDANGQFEMNWEFDTALTTADRHAFFKYMVRSIAEKHGLRATFMPKPFVDLTGNGCHAHVSVWKDGRNLFEDEAGELGVSELGYQFLGGIMHSADALAALFNPTVNSYKRINAARTTSGATWAPNSVTYSGNNRTHLIRIPEAGRFEVRLADGAANPYLLQAGLLAAGLDGIANDRDPGPRLDINMYTDGHAVKTGKKLPLNLLDAIRALQASPVMAEKLGDFIPCYVKLKTEEWNAYARHLTEWERETTLDC

SEQ ID NO: 15110 - protein, 638 aa, Xylella fastidiosa Ann-1
MGKIIGIDLGTTNSCLAIIEGGKGRVIENSEGDRTTPSIVAYTKDGEILVGAAAKRQAVTNPKNTFYAVKRLIGRKFGDAEVQKDLDLVPYKITQHDNGDAWVATADGKKLAPQEISAKVLEKMKKTAEDFLGEKVTEAVITVPAYFNDSQRQATKDAGRIAGLDVKRIINEPTAAALAYGLDKKGGDRKIAVYDLGGGTFDVSIIEIAEVDGEKQFEVLATNGDTFLGGEDFDKRVIDYLVDEFNKDQGIDLRKDPLALQRLKDAAERAKIELSSSQQTEVNLPYITADASGPKHLNIKLTRAKLEALVDDLVRKSIEPCRIALNDAGLRTSDVQEVILVGGQTRMPKVQQAVADFFGKEPRKDVNPDEAVALGAAIQGGVLAGDVKDVLLLDVTPLSLGIETMGGVFTKIIEKNTTIPTKASQVFSTAEDGQSAVTVHVLQGEREQARFNKSLAKFDLAGIEPAPRGQPQIEVSFDIDANGILHVSAKDKKTNKEQKVEVKAGSGLSDSEIQQMVADAEAHREEDKKFQELVQARNHADGLIHSTRSAIKEHGSKVGGELIGRVEASLAELEAAVKGDDKNQIEAKSKTLEEVAQSLHMAATAEQQSGSTGAGAGASAKVDDVVDAEFTEVKADKK

SEQ ID NO: 15111 - protein, 215 aa, Vitis riparia; identical to SEQ ID NO: 805

SEQ ID NO: 15112 - protein, 573 aa, Coccidioides immitis RS
MPFRSRWSIPIPNTSLPSLIFKSPQHPHSDTRKCYVDTTRPDTHFFTVHGYFLWCKRLAAGLRKSGLKSGDRVLLFSANTFMYPVAFMGIVMAGCVFTGANPTYTPRELAYQLSDSGATYLLCAESALDTGIAAAEQSGLARDRIFVFNDLVYEGTGEGTKGCRYWGELFASTKEGERFSWEELSTPEAADRTLALNYSSGTTGVPKGVQITHKNYVANTLQFTNSTYLDKDHAEKLKRTRWMCFLPMYHAMAQNIFIAAALILGVPVYLMPRFDFIQMLENTQKFRISNLILVPPIAVALAKHPAVKNYDLSSLEQIGCGAAPLGREISEELEGLFPKGKLFVRQGWGMTETTCSILGWDPNQKGTSASVGELNPNCEAKIMAEDGVTELGRNQQGEIWVRGPNIMKGYWNKPEATKETLTEDRWLKTGDIGYVDDAGKFYILDRKKELIKVKGNQVAPAELEAILLDHSAVADAAVIGVTKRTDASHWCKRDNEEYPRAYIILKPGSPTTVETAQNIVDYMKDKVAPVKRITGGIVFVDTIPKNPSGKILRRELRDRARSEIKAGLASSKL

SEQ ID NO: 15113 - protein, 150 aa, Yersinia intermedia
NESDMVLMPDASTAVMDPFFEDSTLIIRCDILEPGTLQGYDRDPRSISKRAEEFLKSSGIADTVLFGPEPEFFLFDDVRFGSSIRGSHVSIDDIEGAWNSSTKYEGGNKGHRPAVKGGYFPVPPVDSSQDLRSTMCLTMEEMGLVVEAHH

SEQ ID NO: 15114 - protein, 128 aa, Yersinia pestis
ADSTLIIRCDILEPGTMQGYDRDPRSISKRAEDFLKSSGIADTVLFGPEPEFFLFDDIRFGSSINGSHVSIDDVEGAWNSSTKYEGGNKGHRPAVKGGYFPVPPVDSAQDLRSAMCLTMEEMGLVVEA

SEQ ID NO: 15115 - protein, 469 aa, Agrobacterium tumefaciens str. C58
MTTANDILKQIKDNDIKFVDLRFTDPKGKLQHVTMDVVCVDEDMFADGVMFDGSSIAGWKAINESDMVLMPDPATAHIDPFFAQSTLVVLCDILDPVSGEAYNRDPRGTAKKAEAYLKASGIGDTVFVGPEPEFFVFDDVKYKADPYNTGFKLDSSELPSNDDTDYETGNLGHRPRVKGGYFPVPPIDSLQDMRSEMLTVLAEMGVVVEKHHHEVAAAQHELGVKFDTLVSSADKMQIYKYVVHQVANAYGKTATFMPKPIFGDNGSGMHVHQSIWKGGKPTFAGDEYAGLSENCLYYIGGIIKHAKAINAFTNPTTNSYKRLVPGYEAPVLLAYSARNRSASCRIPFGSNPKAKRVEVRFPDPTQNPYLGFAAMLMAGLDGIKNKIHPGKPMDKDLYDLPAKELKKIPTVCGSLREALESLDKDRKFLTAGGVFDDDQIDSFIELKMQEVMRFEMTPHPVEFDMYYSA

SEQ ID NO: 15116 - protein, 297 aa, Rhizobium sp. NCHA22
DMVLMPDPDTVHMDPFFAQSTMVILCDILDPISGESYNRDPRGTAKKAEAYLKASGIGDTAFFGPEAEFFVFDDVKYKADPYNTGFKLDSSELPSNDDTDYETGNLGHRPRVKGGYFPVPPIDSCQDMRSEMLTVLTEMGVTVEKHHHEVAAAQHELGIKFDTLVRSADGMQIYKYVVHQVANAYGKTATFMPKPIFGDNGSGMHVHQSVWKGGKPTFAGDEYAGLSETCLYYIGGIIKHAKAINAFTNPSTNSYKRLVPGYEAPVLLAYSARNRSASCRIPFGSNPKAKRVEVRFP

SEQ ID NO: 15117 - protein, 196 aa, Yersinia intermedia
SIGGWKGINESDMVLMPDASTAVMDPFFEDSTLIIRCDILEPGTLQGYDRDPRSISKRAEEFLKSSGIADTVLFGPEPEFFLFDDVRFGSSIRGSHVSIDDIEGAWNSSTKYEGGNKGHRPAVKGGYFPVPPVDSSQDLRSTMCLTMEEMGLVVEAHHHEVATAGQNEVATRFNTMTKKADEIQIYKYVVHNVAHA

SEQ ID NO: 15118 - protein, 1895 aa, Gibberella zeae PH-1
MGSIGEDDPYSWDINVVVQRLCVLGWAWSGDIDSLATRIREEEIDGKTLLTFEHVCSRQELMDCLHIKKARHKAAFAEVIVTLRSKSKGYWLWEQDFKRKRSSYWDEQVEERTICTKDRADSSNLPSGGHQKQGETSTLASASNATLHSADERITQEHASTNQMSGLQKDSQPNSVGNSNPPLIHERPTQGTESDERSTKRRRMAPTLLEEKPLNIAGAFLPTEADVLTYAAANANLVSEKAFPWEDAPAYAYLGDGKVSPEAIISPDNALTSLVREHKDSFDSISLRRIPPARRLVVNKALRRLFTGRYRIPQHSSSSPSVLYDPDDEILELAELGGVGDETDDKTWDEVEKEESEYKNALHNGGESNALVTPERIAEVLNEAIDAVEAKWREKKLPKYERKAHGIWQKSRRHGTKNLQIQRAHELAKHLINRIQKLCHEIQKQDWTSESSYRDAAKSLEQSLEDKLYQTWLIKMLESSKPPPKPQGAHRPKPTTERQLNELLDDEVLTSSDEDDFVVPDSHTGLVEEGLGRDQRSPIRTMKEEPMDAETTFVDLTQDDLDDLDDRDGCDMTNPIDLTSPAKDTNMCFVEETQNEAPETHTSETALPESTVPGGDVSGTSPPETQAPAGPIMESRDLDKQLDELPLETSLCPRSLTNLEPPPIENFGDLQKLASESLNKLAKNSDRWRLLIGEMWQMEHERRKAAVNLILSEEPGAVWSKHIVPYLDALVRGKQGSNEEGSKGVLFDVIRLCHCFFMCQHKTEEHMSSMKPAKIKKHLVRQQSRLNMFEPFYMFIKLLVPHFPQDSQIYKQETYVLGDHFPEEEDDLDILDDLSDIDAEADRDRQRPRPKEIIRDKAAVDLREREKQRIEEQELRRSKLRTALASQPLAAGDGNRIIINESKEEDQGLIYVNDHIARSIKQHQVDGVRFIWNQIVRDASVRQGCLLAHTMGLGKTMQVITVLVALAEASESQDPSVVAQIPKDLQNSRTLVLCPAVLVDNWMDEFLKWAPANALGALRKCTANTPEHERPSIVTSWASGKGVLILSYNMFQILIEMSPELSNLLRDRPDVVVCDEAHYMKNRDSKTNKACSRFQTKSRIALTGSPLSNKLLEYFAMIDWVAPNFLGPYSEFREIYSAPVKQGLFHDSTTAERREAQMLLKALEQMVAPKVHRRNIVVMKGDLPPKQEFIIFVPPTEPQKKLYRLYMEGVSRDGGGTPDTLAAIPHLGLICSHPKCFQAKILEIIQNKIMSKVGEETDKSFPKTIIPEFTETLESFGDLDSPAISWKTELLTTVLNEAREVNDKVLVFSQSLITLDYLEDMCKNQGRTVSRMDGKTPVAVRQQQVKDFNQGSKEVFLISTAAGGVGLNIHGANRVVIFDIRHNPSHEQQAVGRAYRIGQQKKVFVYRFMVAGTFEDNLNNRQVFKMQLASRVVDKKNPISWSKRKGDVVAEIRDRPAADLVPYLGKDPILDKLIKLRENGEAIRSIVSTDTFEEEDLNATLTEEENKAVTKMIELNRLRVSNPEEYARRARSGMYLTEQARLRREQELPLHPTQAQPAHQSFDGAMDMPGDAQFLPASSTATRHQWDLPSINRPPALLNQGSAPMPMTGANTFFRGQYQTETPSTQQPVPNATFRELTQPLPSPNPSAGSTRIAQITNVSSNNPPNRESRSTQSPALLSHPSPIFKQNRMFNVRAEIPARTKFENRLRESIGNLQKCDLWPMRDYTFEDARALTTRIDRIREEGRYGLLPDMQQWNMLNEFISRQKFVIAIISGYISPEYVAQATAEDLEKRFEAIGGFNEAEIFAKAREKAKDPDPINLQNIGRHNSHQDEERSKARNDMKVMREAMDNRRSRAVRLPTWANEALENAQKYRASPVVDTLKKQSISKSGTPHGA

SEQ ID NO: 15119 - protein, 297 aa, Rhizobium sp. NET30
DMVLMPDPTTACIDPFFSASTMVINCDVLEPATGEPYSRDPRGMAKKAEAYLKSTGIGDTVYVGPEAEFFVFDDVKFSADPYNTGFKLDSVELPINGQTEYEGGNLGHRIAIKGGYFPVPPQDSAQDMRGEMLAAMAAMGVKVEKHHHEVASAQHELGMKFDTLTHMADQMQVYKYAIHNVAQSYGKTATFMPKPVYGDNGSGMHVHLSIWKGGKPLFAGNKYADLSQECLWFIGGVIKHAKALNAFTNPSTNSYKRLVPGYEAPVLLAYSARNRSASCRIPWTTSPKAKRVEVRFP

SEQ ID NO: 15120 - protein, 428 aa, Vitis vinifera
MIFFLEIPPQSSSTHLIGFLSLVLLRCFRQLKRKSEPDYEAESSEWTAVPGFTEVVNSPVQTPVSGKGGKAQKTSRITKCSRSGPQTPVSNAGSPGNNLTPVGPCRYDSSLGLLTKKFINLIKHAEDGILDLNKAADTLEVQKRRIYDITNVLEGIGLIEKKLKNRIQWKGLDVSRPGEVDENVTSLQEEVENLSIQERRLDAQIRDMQERLRDLSEDENNQKWLFVTEEDIKGLPCFQKETLIAIKAPHGTTLEVPDPDEAVDYPQRRYRIVLRSSMGPIDVYLVSQFEEKFEEINGLEAPPSFPSSSGYNEDPTAAMVTEESRGKEIEIQGQDAHRMSSDLNASQDFVSGIMKIVPSDVDSDADYWLLSDADVSITDMWRTEPGVEWNELDALNDDYAMANVSTPQPQTPPSSAAEVPPAANTPGR

SEQ ID NO: 15121 - protein, 581 aa, Pseudomonas fluorescens Pf-5
MKAHATAYSQRLLRGQAPSYERLQARFAEDGSEPGCEPIAVHCGWGRLLIGHTFPDPTSLAGELLNERPGERDIALYVAAPQQVLGLEPAQLFLDPSDTLRLWFSDYRQATRVFRGFRIRRAQSEADWQAINQLYQARGMLPIDPQLLTPRHQGGPVYWLAEDEDSGAVIGSVMGLNHHKAYQDPEHGSSLWCLAVDPDCSRPGVGEVLVRHLIEHFMSRGLSYLDLSVLHDNRQAKNLYAKLGFRTLSTFAIKRKNGINQPLFLGPGPQAEFNPYARIIVEEAHRRGIDVQVDDADAGLFTLSHGGRRVRCRESLSDLTSAISMSLCQDKSLTHKVLKGAGLNLPAQQLAGNADDNLGFLDEHQRVVVKPLDGEQGQGVAVDLRTIEEVQKAIDHARRFDSRVLLESFHEGLDLRILVIGFEVVAAAIRRPAEIIGDGQHSIGALIEARSRRRQAATGGESKIPLDQETQRTLHAAGYDYNSVLAAGERLFVRRTANLHTGGTLEDVTGILHPTLADAAIRAARALDIPVVGLDLMVPAADQPEYVFIEANERAGLANHEPQPTAERFVDLLFPHSQPAP

SEQ ID NO: 15122 - protein, 200 aa, Yersinia intermedia
SSIGGWKGINESDMVLMPDASTAVMDPFFEDSTLIIRCDILEPGTLQGYDRDPRSISKRAEEFLKSSGIADTVLFGPEPEFFLFDDVRFGSSIRGSHVSIDDIEGAWNSSTKYEGGNKGHRPAVKGGYFPVPPVDSSQDLRSTMCLTMEEMGLVVEAHHHEVATAGQNEVATRFNTMTKKADEIQIYKYVVHNVAHAFGK

SEQ ID NO: 15123 - protein, 297 aa, Rhizobium giardinii bv. giardinii
DMVLMPDPTTACIDPFFSASTMVINCDVLEPATGEPYSRDPRGMAKKAEAYLKSTGIGDTVYVDPEAEFFVFDDVKFSADPYNTGFKLDSVELPINGQTEYEGGNLGHRIAIKGGYFPVPPQDSAQDMRGEMLAAMAAMGVKVEKHHHEVASAQHELGMKFDTLTHMADQMQVYKYAIHNVAQSYGKTATFMPKPVYGDNGSGMHVHLSIWKGGKPLFAGNKYADLSQECLWFIVGVIKHAKALNAFTNPSTNFYKRLVPGYEAPVLLAYSARNRSASCRIPWTTSPKAKRVEVRFP

SEQ ID NO: 15124 - protein, 588 aa, Brassica napus; identical to SEQ ID NO: 15067

SEQ ID NO: 15125 - protein, 389 aa, Vitis vinifera
MAVWGDDPSLSNQQSRFQSDTRNPSLNPFFPSSQRKPHLFPFFSCPMNDSSFVSDTRTHCHSDDRQSAFVKLPLKQTNEIDHCKGQTSRQATLDGHGEEMKFPSLEPESCVGESPNILNPVVTCRYDSSLGLLTKKFISLIQEAKDGTLDLNRTADVLEVQKRRIYDITNVLEGIGLIEKTSKNHISWKGFDMSGPQKMDNEVTRLKAEVERLYAEECRLDDCIREKQELLRAIAGDENCQKYNQTLIAIKAPQASSVEVPDPDEDIGFSQRQFRIIIRSTTGPIDLYLLRIVAATNFRMQVRSAHWAQRDLGIQKIIPSDFKIDDDYWLRSDPEVSITDLWANEDWAQENDIFQEDSITSDASLAQTQPSLRGSLSEPDKNQAVGCSG

SEQ ID NO: 15126 - protein, 638 aa, Salmonella enterica subsp. enterica serovar Typhi str. CT18
MGKIIGIDLGTTNSCVAIMDGTQARVLENAEGDRTTPSIIAYTQDGETLVGQPAKRQAVTNPQNTLFAIKRLIGRRFQDEEVQRDVSIMPYKIIGADNGDAWLDVKGQKMAPPQISAEVLKKMKKTAEDYLGEPVTEAVITVPAYFNDAQRQATKDAGRIAGLEVKRIINEPTAAALAYGLDKEVGNRTIAVYDLGGGTFDISIIEIDEVDGEKTFEVLATNGDTHLGGEDFDTRLINYLVDEFKKDQGIDLRNDPLAMQRLKEAAEKAKIELSSAQQTDVNLPYITADATGPKHMNIKVTRAKLESLVEDLVNRSIEPLKVALQDAGLSVSDINDVILVGGQTRMPMVQKKVAEFFGKEPRKDVNPDEAVAIGAAVQGGVLTGDVKDVLLLDVTPLSLGIETMGGVMTPLITKNTTIPTKHSQVFSTAEDNQSAVTIHVLQGERKRASDNKSLGQFNLDGINPAPRGMPQIEVTFDIDADGILHVSAKDKNSGKEQKITIKASSGLNEEEIQKMVRDAEANAESDRKFEELVQTRNQGDHLLHSTRKQVEEAGDKLPADDKTAIESALSALETALKGEDKAAIEAKMQELAQVSQKLMEIAQQQHAQQQAGSADASANNAKDDDVVDAEFEEVKDKK

SEQ ID NO: 15127 - protein, 295 aa, Oryza sativa Indica Group
MALNGSPSGLSVMSATPGGPAENSGILPGDVILAIDNRSTEDMDIYDAAQRLQGPEGSSVDLDIRSGSNTRHVVLKRQTVTLNPVRSRMCEIPGAKDNSKVGYIKLTTFNQNAAGSVKEALQKLRENNVKSFVLDLRNNSGGLFPEGIEIAKIWMDKGVIVYICDSQGVRDIYEADGISTVAASEPLVVLVNKGTASASEILAGALKDNKRAVIYGEPTYGKGKIQSVFALSDGSGLAVTVARYETPAHTDIDKVGVIPDRPLPASFPTDEDGFCSCLRDSNSACNLNAAQLFTR

SEQ ID NO: 15128 - protein, 1409 aa, Cryptococcus neoformans var. neoformans B-3501A
MSDSQPQQPRPAPLVIDDERKLEMFKNMDPGRIANIRKRITELQSAGSSKESSTELAKLKMILDMYARAMQLEQERAAAANKPDGPADTSTAASTNGQAGPSNPAHVSMNPTQIAQLRTQAAAYQHLSRGQPVPSYLLAAAQGTPPPGIGGQPPVPTGLNGIQGKVADKTVEAVVEDSIEAKKAREKEEQQDKTSEGPDGAAPPDGPSQPPYAMEFDETSIIYPYNAYTDPSFYSKRKFDEEVINPLHKRQRLITPSIMPRGLDPYLLMEERNRFIETRMAWRMKELENMDSTAGLGQPGAGDVPNVIESEKPGTPMGVRARIELMGLRLLGKQRLLREDVVRAMHGASQIPADRSQFRRFRTHTLRDARATETAERRQRTEPLIGAGVSTARGQGADKMKRLGRAMMKLHAETEREEQKRIERIAKERLKALRNDDEEAYLALLGEAKDSRISHLMDQTDQYLETLAAAVVEQQNDDVHRDAIMAVPFEQEEGVASEEMFGAKRQDGEESGAERRAGKVDYYAVAHKIQEKVTKQASILSGGTLKDYQVKGLQWMISLYNNRLNGILADEMGLGKTIQTISLITYLIEKKKQPGPFLVIVPLSTLTNWTMEFERWAPAVRTLILKGSPAVRREAYPRLRAIDFQVCLTTYEYIIKERPLLSRIKWIHMIIDEGHRMKNVKSKLSQTLNEYYSSRYRLILTGTPLQNNLPELWALLNFVLPKIFNSVKSFDEWFNAPFANTGGEKMEMNEEEALLVVKRLHKVLRPFLLRRLKKDVESELPDKVEKVIYTKMSALQWKLYESVQKYKTLPTDMSVAKPQKRQNLQNALMQLRKICNHPYVFREVDEDFTVGNTTDEQIIRVAGKFELLDRILPKLFKTGHKVLIFFQMTEIMTIVSDFFDFRGWKYCRLDGSTKAEDRQTLLSTFNDPNSPYQVFILSTRAGGLGLNLQSADTVIIYDTDWNPHADLQAQDRAHRIGQKKEVRVLRLISSGTVEELVLARAQRKLEIDGKVIQAGKFDEVTTGAEYEALLQKAFETSAEEDNEETNELDDDELNELLARGDNELGIFTAMDNERKERKIAEWRASGSKGELPPPLMQESELPPFYRRDIGQELAEELANEEEQGRGRRNKGEVRYTDGLTDDQFIAALENSDDDVEDAADRKRKRAEKKAERKRMNEVLVQAEAEGRPLDVVATKEVVEPIKKKRGRPSSSVTPSVTGDEVPTKKRKMEKVQGPEVQLMTKLFIEVNKLKSDLGEDLNQFFLVPVNRKDYPDYYRIIAQPIAMSQIKAKIGKPSYNLASFRNDLHLLWNNARTYNQEGSWVFNAAEDMQEAFDKMWDDEVPQFLASQAAGAENSVGETSAGASGSSTPMFKPVGDKTTAPKIRISMGKKKIEAAMDGDESMDGGEDDDY

SEQ ID NO: 15129 - protein, 85 aa, Glycine max
  misc_feature (14)..(14): Xaa can be any naturally occurring amino acid
  misc_feature (25)..(25): Xaa can be any naturally occurring amino acid
  misc_feature (66)..(66): Xaa can be any naturally occurring amino acid
  misc_feature (71)..(71): Xaa can be any naturally occurring amino acid
VGFEDPHVLLTVGXDGLSFVEGFPXGTYHTIIEDSSDPIGPAQELSEKLFIRPIQMLSHKKIVCNXTESIXSYMHIIEDIVSNCL

SEQ ID NO: 15130 - protein, 420 aa, Zea mays
  misc_feature (249)..(249): Xaa can be any naturally occurring amino acid
PTQASPSTTSSSAAPTCAPPLSRWSTPPPASAAASKPQGASVTLYSDLVSGARETEYRRPPTKQSDTTALMYSSGTTGASKGVILTHRNFISAAAMMTADQDALGEGPNVFLCFLPMFHIFGLSVITFAQMQRGNSVVVMSRFDMDSVMAAVQRHRVTHLFCVPPVMIALAKLGSVGKYDLSSLRFIGSGAAPLGKDVMEGVAKNFPEAVIAQGYGMTETCGIISLEYPEKGQIRQFGSTGALVSGVEXKIVDVETLICLPPNQLGEICVRGPNIMQGYFNNVQATEFTIKQGWLHTGDIGYFDEGGQLFVVDRLKELIKYKGFQIAPAELEGLLLSHPEILDAVVIPFPDAEAGEVPIAYVVRSSESSLTEVDVQKFIEKQVAYYKKLRRVTFVDSVPKSASGKILRRELISKVRSSKL

SEQ ID NO: 15131 - protein, 434 aa, Prochlorococcus marinus str. NATL1A
MLKRFLKICLLIAICPSPSFSFQANSSTLITNNPKEIIDQVWQIIYRDFLDYSGKYKAEDWIKLRKEILSTKYFDNDEAYIAIKDMLTELDDPYTRFLDPKEFNEMRIDTTGELMGVGIQISLDEVSNQIVVVSPIEGTPAFLAGIKPKDIIVSIDGKAIDGLSIDSTVKLIRGKKGTKVELGIIRDEELLNISLIRDRIEINVVDSRINNTVSGAKIGYVRLKQFNAKSPKEMSLSINKLEKQQPFGYVLDLRSNPGGLLEASIEIARQWINTGIIVSTKTKDGITDIRKAKSRALTNRPVVVLIDEGSASASEILSGAIKDNKRGVLVGKKTFGKGLVQSVRSLSDGSGLTVTVAKYLTPSGKDINKNGIAPDIRADLLLNEKNKLTNADLGTLKDSQYVAAENILLKKFKIESNKNSYNPLKSNLGYALKN

SEQ ID NO: 15132 - protein, 754 aa, Streptococcus mutans UA159
MHINQLLQHANSDLPLLQANFGLERESLRINKTNHRLAQTPHPTALGSRQFHPYIQTDYSESQMELITPVAHSSKEVLRFLGAITDVAERSIDQNQYLWPLSMPPQITEDEIEIAQLEDDFEFSYRQYLDKKYGKILQSISGIHYNMELGADLMNELFELSGYQSFIDFKNDLYLKVAQNFLNYRWFLTYLYGASPLAEKGFLNEELSQTVRSIRNSHLGYVNTDDIKVPFDSLENYISSIEHYVKSGALSAEKEFYSAVRLRGSKHNRDYLTKGITYLEFRCFDLNPFNNRGITQETIDSVHLFILAMLWLDTPKKLNQALDKAQKLNDKIALSHPLEKLPKENSASLIIEAMEALIKHFKLPSYYDDLLIAIKKQVENPKLTLSGRLFEHIKHASLEHFGQKKGQDYHNYAWQNYYALKGYENMELSTQMLLFDTIQKGIHFEILDENDQFLKLWHNDHIEYVKNGNMTSKDNYVIPLAMANKVVTKKILRENGYPVPAGAEFDNKDEALRYYSQIKNKPIVVKPKTTNFGLGISIFETAASHNDYEKALDIAFIEDYSVLVEEFIPGTEYRFFILDGKCEAVLLRVAANVVGDGHSTVRQLVAQKNRDPLRGREHRSPLEIIDLGDIELLMLQQEGYTLEDILPKGKKVNLRGNSNISTGGDSIDVTETMDPSYKQLAANMATAMGAWVCGVDLIIPDTNLKASKGKPNCTCIELNFNPSMYMHTYCYQGPGQVITGKILAKLFPEISTKI

SEQ ID NO: 15133 - protein, 1133 aa, Gibberella zeae PH-1
MADQSASMSVEEIQEELTVQKVVLDSLADADYDGVEEMRQDAHEEINRLKKLLRDLRQKKQSNITGEALQSTAAPENSSLSSSSGGQQRDTASVMNSSAGYGSFSLPSRKRDVDSARLSAHENQAKARRLSPPMFENLTSDVLTNNGRFLDFVDLTGDDDDDVIAEQVKAEQRQKQEQSDREFAEFLCGQDSSDQMAIQPPQNDAFTRLMSSQPPLGPPIADVEIPFHMPGSYDTLWDDPAGAGPAFMMPQGQSDLQFPTMSTYPNPRAEEENDLIFAGSVARAPHPIGRAEQLFPGMGMGYPDLTRRNIHQPPHLADMSGFSYRPPTSFAPGSFATPSSLGEVIGRTNGFDLVNGVDGGGNPLPPRLRKWMDENDYDPHVDSQGPELDAKELENLLSNISSDMDLPKAGLGEAPAGLKRPLYPHQDIALAWMKKMESGTNKGGILADDMGLGKTISTLALLLARPATTRPKTNLIVAPVALIRQWEEEIATKTKSSHRLSVYVHHGKRTLIDELLTYDVVLTTYGSLSHELKRYEKFRKDNPEEDQIDWNHRTPSLSFPLLHPKAKFYRVILDEAQCIKNDKTQSAKACNQLKSIHRWCLTGTPMMNGVLELYSLVRFLKVRPYCKWDDFRQSFGRLFGRQGDTKSTAMRKLQVFLKAIMLRRKKNSLLDGKPILRLPEKTEDVIYATFSPEELDFYKQLEKNAQVLVNKYIREKSVSKNYSSILVLLLRLRQACCHPHLNLDVDDAPSTDSDEKRKTVEDLNEAIVERIKGIESFECPICYDAVQCPSFFVPCGHDSCGECLVRIVDGATANNLQEGSESSRARCPVCRGHFDPTKCFSYDIFRQVHMPETIEQGSVKDEDVCETDTSEDSESDSDYESDDEIDKKGNLKDFIVNDDLSDDEASTGKKRKAKAKGKGKEKALDVKPSMLKTLRKEASRNRDAYKKYTRYLRKTWEPSSKVTECLNLVKEIEGTGEKTIIFSQWTLLLDLLQVAMKRENMAKPERYDGSMSATQRNIAAHNFRDGKDVRVMLVSLKAGNAGLNLTAASRVIIMDPFWNPYIEMQAVDRAYRIGQQKPVKVYRILTNETVEDRIVDLQNKKKEMVEAALDEKQGASIGRLSENDIKNLFGIPT

SEQ ID NO: 15134 - protein, 388 aa, Oryza sativa
  misc_feature (371)..(371): Xaa can be any naturally occurring amino acid
MEGGGAKDGSAAAAQTRGSGDDGSHKPLPPCCLKAKAAAAESEAKCHATVVSGWFTEPRSHSGKTSKVQYFNNPMWPGEAHSLKVENILYQGKSPYQEILVFESSTYGNVLVLDGIVQLTEKDECAYQEMVTHLPLCSIPSPKSVLVVGGGDGGVLREIARHASVENIDICEIDQLVIDVCKDFFPQLSVGFKDPRVQLHVGDAVDFLRNAPEGKYDAIIVDSSDPIGPAQELVEKPFFQTIARALKPGGVLCNQAESMWLHTHLIQDMLSICRETFKGAVHYAWTSVPTYPSGVIGFLLCAKEGPAVNFLSPVNPIEKLEGAMEAGREIRFYNSEVHRAAFVLPTFVRRELESHNTCAEKDKSETKPVAXKPKKMKIMPNSAIPTAS

SEQ ID NO: 15135 - protein, 339 aa, Arabidopsis thaliana
MGEAVEVMFGNGFPEIHKATSPTQTLHSNQQDCHWYEETIDDDLKWSFALNSVLHQGTSEYQNIALLDTKRFGKVLVIDGKMQSAERDEFIYHECLIHPALLFHPNPKTVFIMGGGEGSAAREILKHTTIEKVVMCDIDQEVVDFCRRFLTVNSDAFCNKKLELVIKDAKAELEKREEKFDIIVGDLADPVEGGPCYQLYTKSFYQNILKPKLSPNGIFVTQAGPAGIFTHKEVFTSIYNTMKQVFKYVKAYTAHVPSFADTWGWVMASDHEFDVEVDEMDRRIEERVNGELMYLNAPSFVSAATLNKTISLALEKETEVYSEENARFIHGHGVAYRHI

SEQ ID NO: 15136 - protein, 167 aa, Oryza sativa
MAGETGEGGGSHSQPEKQPGQAAAAASMAEAEVEELPKAIVRRLVKEKLAQVAAGGAEVIVNKDAMSAFAESARIFIHYLSATANDMCKESKRQTINADDVLKALDEMEFPEFVEPLNTSLQEFRNKNAARRSETTQKKAEKRRKIDKESLPQEQNDAADHGKTDED

SEQ ID NO: 15137 - protein, 168 aa, Setaria italica
  misc_feature (159)..(159): Xaa can be any naturally occurring amino acid
MAAASSTTSVHDFTVKDASGKDVDLSTYKGKVLLIVNVASQCGLTNSNYTELAQLYEKYKDQGFEILAFPCNQFGGQEPGTNEEIVQFACTRFKAEYPIFDKVDVNGNNAAPIYKFLKSSKGGLFGDSIKWNFSKFLVDKEGRVVDRYAPTTSPLSIEXDIKKLLGSS

SEQ ID NO: 15138 - protein, 417 aa, Oryza sativa Japonica Group
MSSGGGRPPAAQHIVRSVRQRFVPLPPPLARAPFAAAPGDYHRFAAASRGGEIEEGIVIRRTPLKRKTPCGESEAAESSERMMTSPGFTEGVGSPLMTPVSGKTSRTTKSMAKFNKAGPQTPISNAGSPGNPSTPASSRYDNSLGLLTRKFINLLKQTQDGILDLNDAAKILDVRKRRIYDITNVLEGTGLIEKKLKNRIRWRGSDDSGTNLDSDISCLKTEVENLYIQEQALDRSISEIREKMEELTEDESNHRWLFVTEDDIKGLPCFQNEALIAIKGPRGTTVEVPDPDEAGDYLQRRYRILLRSTMGPIDIYLVSQYKKMEELGETATPPRHASVVEPPSIATEAGHSSKQTMPLNVQQDIQETPELNASRAFGRMKKITPSDVDTDADYWLLTDDDISITHMWTTACILDEI

SEQ ID NO: 15139 - protein, 439 aa, Pyrococcus abyssi GE5
MNVSEVKSGATRSPKFVQLIFVDINGMPKGMEIPASRLQEAIEDGISFDGSSVPGFQGIEDSDLIFKADPDTYVEVPWDNVARVYGYIYKDGKPYGADPRGVLKRVIEKLAEMGIKAYIGPEPEFYLFKKNGSWELEIPDVGGYFDILTLDKAKDIKREIAEYMPSFGLVPEVLHHEVGKAQHEIDFRYDEALKTADNIISFKYIVKAVAEVHGLYATFMPKPIYGMPGNGMHLHISLWKEGENIFKGEEGLSETALHFIGGLLKHAKALTAITNPTVNSYKRLVPGYEAPVYISWGYKNRSALIRVPAFWGNGARIEYRCPDPSANPYFAFAAILMAGLDGIKHKVEPFAYVEENVYEMDEGKRKELGIDTLPGSLGEALDELEKDKVVREALGEAYKNFIEYKRKEWESYLEYLEAKHLPKDTKRVTEWELERYFFI

SEQ ID NO: 15140 - protein, 82 aa, Saccharomyces cerevisiae
MVNNSQHPYIKDGWFREINDKSFPGQAFTMTVDSILYEARSEFQDILIFRNKVYGTVLVLDGIVQCTEFDEFAYQEMITHIA

SEQ ID NO: 15141 - protein, 339 aa, Arabidopsis thaliana
MGEAVEVMFGNGFPEIHKATSPTQTLHSNQQDCHWYEETIDDDLKWSFALNSVLHQGTSEYQDIALLDTKRFGKVLVIDGKMQSAERDEFIYHECLIHPALLFHPNPKTVFIMGGGEGSAAREILKHTTIEKVVMCDIDQEVVDFCRRFLTVNSDAFCNKKLELVIKDAKAELEKREEKFDIIVGDLADPVEGGPCYQLYTKSFYQNILKPKLSPNGIFVTQAGPAGIFTHKEVFTSIYSTMKQVFKYVKAYTAHVPSFADTWGWVMASDHEFDVEVDEMDRRIEERVNGELMYLNAPSFVSAATLNKTISLALEKETEVYSEENARFIHGHGVAYRHI

SEQ ID NO: 15142 - protein, 560 aa, Salicornia brachiata
MWSQLSSLFYSKMDMLSTSDHASVVSMNLFVALLCGCIVIGHLLEENRWMNESITALLIGLCTGVVILLISGGKSSHLLVFSEDLFFIYLLPPIIFNAGFQVKKKQFFRNFITIIMFGAIGTLVSFSVISLGAMTIFKKMDIGSLELGDYLAICAIFAATDSVCTLQVLNQDETPLLYSLVFGEGVVNDATSVVLFNAIQNFDLTNIDHRIAIQFSGNFLYLFFASTMLGAMTGLLSAYVIKKLYFGRHSTDREVALMMLMAYLSYMLAELFYLSGILTVFFCGIVMSHYTWHNVTESSRVTTKHAFATLPFVAEIFLFLYVGMDALDIEKWRFVSDSPGTSVAVSSILLGLLMVGRAAFVFPLSLLINFSKKSHSEKITFNQQIVIWWAGLMRGAVSMALAYNQFTRPGHTQLRGNAIMITSTITIVLFSTMVFGLLTKPLILFLLPHSKHFNSASTVSDLGSPKSLSLPLLDGGQDSEADMDNQDEAVNNRYEGIHNRTIARPGSLRMLLNAPTHTVHYYWRKFDDSFMRPVFGGRGFVPYVPGSPIEQNTDNLLDRT

SEQ ID NO: 15143 - protein, 339 aa, Arabidopsis thaliana
MGEAVEVMFGNGFPEILKATSPTQTLHSNQQDCHWYEETIDDDLKWSFALNSVLHQGTSEYQDIALLDTKRFGKVLVIDGKMQSAERDEFIYHECLIHPALLFHPNPKTVFIMGGGEGSAAREILKHTTIEKVVMCDIDQEVVDFCRRFLTVNSDAFCNKKLELVIKDAKAELEKREEKFDIIVGDLADPVEGGPCYQLYTKSFYQNILKPKLSPNGIFVTQAGPAGIFTHKEVFTSIYNTMKQVFKYVKAYTAHVPSLADTWGWVMASDHEFDVEVDEMDRRIEERVNGELMYLNAPSFVSAATLNKTISLALEKETEVYSEENARFIHGHGVAYRHI

SEQ ID NO: 15144 - protein, 546 aa, Arabidopsis thaliana; identical to SEQ ID NO: 12336

SEQ ID NO: 15145 - protein, 469 aa, Xanthomonas campestris pv. campestris str. ATCC 33913
MSVENVEKLIKDNKVEFVDLRFVDMRGVQQHITFPASIIEPALFEEGKMFDGSSIAGWKGINESDMVLLPDAGTAYLDPFFADPTIVLTCDILDPATMQSYERDPRGIAKRAEAYLKSSGTADQAFFGPEPEFFIFDSVRFANDMGHTFFQVGSEEAAWNTGAKYDGGNSGYRPGVKGGYFPVPPTDTLHDLRAEMIKTLEQVGIETEVHHHEVATAGQCEIGTKFSSLVQKADELLTMKYIIKNVAYRNGKTATFMPKPIVGDNGSGMHVHQSLTKGGVNLFSGDGYGGLSQMALWYIGGIFKHARAINAFANSGTNSYKRLVPGYEAPVMLAYSARNRSASCRIPWVTNPKARRIEMRFPDPLQSGYLTFTALMMAGLDGIKNQIDPGAPSDKDLYDLPPEEEKLIPQVCSSLDQALEALDKDREFLKAGGVMSDDFIDGYIALKMQEVTKFRAATHPLEYQLYYGN

SEQ ID NO: 15146 - protein, 128 aa, Yersinia enterocolitica
EDSTLIIRCDILEPGTLQGYDRDPRSISKRAEEFLKSSGIADTVLFGPEPEFFLFDDVRFGSSIRGSHVAIDDIEGAWNSSTKYEGGNKGHRPAVKGGYFPVPPVDSSQDLRSTMCLTMEEMGLVVEA

SEQ ID NO: 15147 - protein, 888 aa, Arabidopsis thaliana
MGFVYIVMTGYYKNVHKRKQNQVDDGPEAKRVKSSAKVIDYSNPFAVSNMLEALDSGKFGSVSKELEEIADMRMDLVKRSIWLYPSLAYTVFEAEKTMDNQQVVEGVINLDDDDDDDTDVEKKALCVVPSSSEIVLLDSDDEDNERQRPMYQFQSTLVQHQKNQGDVTPLIPQCSFEEVDLGRGKEMPSAIKAIVEGQTSRGKVLPIENGVVNEKGVYVGVEEDDSDNESEAADEDLGNIWNEMALSIECSKDVARETSHKEKADVVEDCEHSFILKDDMGYVCRVCGVIEKSILEIIDVQFTKAKRNTRTYASETRTKRFGESDNELKFSEEGLMIGGLAAHPTHAAEMKPHQIEGFQFLCSNLVADDPGGCIMAHAPGSGKTFMIISFMQSFLAKYPQAKPLVVLPKGILPTWKKEFVRWQVEDIPLLDFYSAKAENRAQQLSILKQWMEKKSILFLGYQQFSTIVCDDTTDSLSCQEILLKVPSILILDEGHTPRNEDTNLLQSLAQVQTPRKVVLSGTLYQNHVKEVFNILNLVRPKFLKLDTSKSAVKRILAYTPCDVRGRLTGSNSDMASMFNETVEHTLQKSEDFTVKIKVIQDLREMTKKVLHYYKGDFLDELPGLADFTVVLNLSPKQLNEVKKLRREKRKFKVSAVGSAIYLHPKLKVFSDKSDDVSDTTMDEMVEKLDLNEGVKAKFFLNLINLCDSAGEKLLVFSQYLIPLKFLERLAALAKGWKLGKEVFVLTGNTSSEQREWSMETFNSSPDAKIFFGSIKACGEGISLVGASRILILDVPLNPSVTRQAIGRAFRPGQKKMVHAYRLIAGSSPEEEDHNTCFKKEVISKMWFEWNEYCGYQNFEVETIDVDEAGDTFLESPALREDIRVLYKR

SEQ ID NO: 15148 - protein, 430 aa, Desulfotalea psychrophila LSv54
MLREERGMEDYLVTGIFFFMGLLATAVVSSVIFKRLSFPYTIGLVVVGGLLGFLAFRWQPLALLQNIDLSPGVILYLILPTLIFDAAINIDTHLLRRDFFIIFLLAVIGLLASAAMIGYSLAYFTPLSLGAALLFGALISATDPVAVMALFREVGAPPRLATLMDGESLLNDATAIVLFVIILGTMGFDIGPDFNMANHPLFSFVFVLAGGVLVGLVVGWIGVLLVLLDRSNFISELTISFVVAYISFLVADHLFDVSGVMSTLTAGITLKALGGKHLDVANLKMIKRFWNYFAFIANSMIFLLLGLTEEHVFYNMIHLHQHMFYLLFAIPAVLVARAIVVWSIVGIYNRFVAKENTVPGAYQAVLIWGGLRGAIPVALVLTIPAEMPFRPLLIDLTLGFVLFTLLVQGTTVKKMMKALGVTVREEVEEE

SEQ ID NO: 15149 - protein, 339 aa, Arabidopsis thaliana
MGEAVEVMFGNGFPEILKATSPTQTLHSNQQDCHWYEETIDDDLKWSFALNSVLHQGTSEYQDIALLDTKRFGKVLVIDGKMQSAERDEFIYHECLIHPALLFHPNPKTVFIMGGGEGSAAREILKHTTIEKVVMCDIDQEVVDFCRRFLTVNSDAFCNKKLELVIKDAKAELEKREEKFDIIVGDLADPVEGGPCYQLYTKSFYQNILKPKLSPNGIFVTQAGPAGIFTHKEVFTSIYNTMKQVFKYVKAYTAHVPSFADTWGWVMASDHEFDVEVDEMDRRIEERVNGELMYLNAPSFVSAATLNKTISLALEKETEVYSEENARFIHGHGVAYRHI

SEQ ID NO: 15150 - protein, 199 aa, Yersinia intermedia
SSIGGWKGINESDMVLMPDASTAVMDPFFEDSTLIIRCDILEPGTLQGYDRDPRSISKRAEEFLKSSGIADTVLFGPEPEFFLFDDVRFGSSIRGSHVSIDDIEGAWNSSTKYEGGNKGHRPAVKGGYFPVPPVDSSQDLRSTMCLTMEEMGLVVEAHHHEVATAGQNEVATRFNTMTKKADEIQIYKYVVHNVAHAFG

SEQ ID NO: 15151 - protein, 457 aa, Geobacter metallireducens GS-15
MVQTRTKITLGLMAVIACLAFGGATLWRLAATAPDREGVASLKLLAEVLRQVEENYVERVDRKKLLEGAVNGMLAALDPHSAYLPPEPFSEMKVEISGSFGGLGIEIALKEGKLTVISPIEDTPAWRAGIKAGDHIWKIDGTPTRDLTIVQAVKKMRGERGTKVTLTILRNGETEPREFPLVRDIIQTKSLKARSLEPGYGYVRISHFQERTGEDFANALRNLRAENGGTLKGLVLDLRNNPGGLLEVAVAVAGRFVGERLDNGLIVYTEGREEFAKRRFSATVGEKEPPYPLVVLINSGSASASEIVAGALQDYGRAVIMGTPSFGKGSVQTVIPMKDGAGLKLTTALYYTPKGRSIQARGIIPDVIVENAELKSVTKDRREDFHEKDLDNHLGGGKDAVPAKGPIEKNEESGKKGQPARHAVGPEDDAKKDFQLARALDLLKSWEVLQKVAGGIK

SEQ ID NO: 15152 - protein, 450 aa, marine gamma proteobacterium HTCC2143
MIMNITRLHAIAARLLITSALLACASLATSQDESVSAEEGRLPLDELRSFADVFNHIRLSYVDEIDDKTLLENAIRGMLSGLDPHSTYLDKKSFDDLQVSTTGEFGGLGLEVGMENGFVKVIAPIDDTPAQKAGIESGDLIIKLDGKPVKGMSLNDAVNEMRGKKDSEIELTIVREGLRQPFDVILKRDIIKVVSVRSKTLEDGYGYIRVAQFQSKTGSEFRKAISTLQETNEEIKGMVLDLRNNPGGILQASVEVVDALLEEGLIVYTEGRLENSHFEYSATPEDLSNGAPLVVLINGGSASASEIVAGALQDHRRAVIMGTDSFGKGSVQTVVPLSKDQAIKLTTARYYTPNGRSIQAQGIVPDITVERAKIEAIKASGGITEADLQGHLSSSNGNESDSKKRESKTKETLFNSDNQLYEALNLLKGLHILSLRDRKEQPVKLDTMAL

SEQ ID NO: 15153 - protein, 517 aa, Saccharomyces cerevisiae
MSTSADTDTIKKPILAVPEPALADTHSEEISRSGEEHESENNEHSDEEGDNYSEREQSVSTEPLDTLPLRKKLKNLSYITFFAIGIGLLWPWNCILSASQYFKHDIFKDTSIWAKIFTSSMMSFSTISSMLFNIYLAKRQYKYSRRVINGLVWEIIVFTVMCFFTILHFLLPKWFNFMFIMMLVVISSMGTAMTQNGIMAIANVFGSEYSQGVMVGQAVAGVLPSLVLFALAFIENSSVSTTGGILLYFFTTTLVVTICVVMFSVSKISRKVNENWNVEDGHITDVLLGSLRSNEEEIRIVGRIDQMEDEDHRRTNGTRDDNDEGEELQLKVPFEVLFAKLKYLVLSIFTTFVVTLVFPVFASATYVTGLPLSNAQYIPLIFTLWNLGDLYGRVIADWPMFRDQKFTPRKTFIYSLLRVAAIPLFLMFTAITSSSSGDEEHNGSVIVDLCYMLLQFLFGVTNGHVISMSFMKVPEQLDNDDEKEAAGGFTNIFVSTGLALGSIISYVFVFIIDFIIR

SEQ ID NO: 15154 - protein, 446 aa, Streptomyces toyocaensis
MIPLGLGEIAEIVGGKATGESVTVTAPAVLDSRQAEPGGLFVAFAGEHADGHDYAERAGRAGAVAVLGSRPTSLPTVVVEDVRTALQTLAAHVVARLRDGLTVVGVTGSQGKTGTKDLLAAVLSGAGPTVATTGSLNNELGVPLTMLRAQAATRFLVLEMGARHEGDIAELTGLVAPDIAVVLNVGVAHLGEFGSRAAIARAKGELVQGLVPGGTAVLNADDPRVASMSVLTDGPVLTFGRTDPADVQVLDVVLDRLGRPSCTLRTVDTSARLALPLVGAHQALNASAAAAAALAAGVPLDLATTALTTASLSPWRMELRDLACGATLLNDSYNANPDSTRAALDALSAIEGGRRIAVLGEMLELGDGSEAEHRAVGAYAAARADVVVAVGEAARPLADGAGERAVVLAGNDAAVDWLRDHLAAGDVVLVKASRGARLDEVAAGLA

SEQ ID NO: 15155 - protein, 779 aa, Desulfotalea psychrophila LSv54
MAFSKNILDSLPPLISKQIFEGFFGFEKENIRVDSRGKLALTPHPRELGEKTSHPYITTDFSESQIEIITPPLPSIAESLGFLETLHDLVSIELKDEYLWPQSAPPILPEREEDIPIAHFGGEFREQEEYRLQLAKIYGRKRQMFSGIHFNISLPERFLELLHEEGKQEQPFAEFREDIYMKTVRNFLRHRWFLICLLGASPVIHKSYRKHCIDMLSPFAKDAYHFPYATSIRNNICGYRNTQDFHLNYSTLTDYRESLQELVEKKVLRDIRENYAPIRIKTTTDPKRINHLEIRLLDLNPFFKTGVNPLHAEIIHIFLIYCLLCPEETSFTSKEQETANRNQEQAATEGLNPGAIICDADGNEQRLDKQLAHCLQEIQQTVSPHLPPEYRAGMEELERLVQNQASRPTDTLLKEIKQEGFTEWHMKQALKFLKKSHDEQFIFHGLRDMELSTQLLLRRAALRGVSFEIMDRQENFVCLEQAGKREYVMQASRTSLDNYISVLSMENKVITKKILDQAGINTPKGRSYSSPSEALADYPYYRGRAIVIKPKSTNFGIGITIIKENNRHDFFAQGIAQAFKHEATVLIENFSSGKEYRFFIVNDQVVGILHRVPANVTGDGTSSVQVLVTEKNKNPLRGRGYRTPLEKIKLEETEEMFLASQGYSFATVPAKDQRIYLRENSNISTGGDSIDFTDKVPQSYKDIAVRAAQALQVKITGLDMMIDSLEEDAAEDNFSIIELNFNPAIHIHCHPYIGKNRHLDDKILDALGFTGAEEAGEKA

SEQ ID NO: 15156 - protein, 197 aa, Yersinia intermedia
SSIGGWKGINESDMVLMPDASTAVMDPFFEDSTLIIRCDILEPGTLQGYDRDPRSISKRAEEFLKSSGIADTVLFGPEPEFFLFDDVRFGSSIRGSHVSIDDIEGAWNSSTKYEGGNKGHRPAVKGGYFPVPPVDSSQDLRSTMCLTMEEMGLVVEAHHHEVATAGQNEVATRFNTMTKKADEIQIYKYVVHNVAHA

SEQ ID NO: 15157 - protein, 300 aa, Saccharomyces cerevisiae
MVNNSQHPYIKDGWFREINDKSFPGQAFTMTVDSILYEARSEFQDILIFRNKVYGTVLVLDGIVQCTEFDEFAYQEMITHIAMFAHSNPKRVLIIGGGDGGVLREVAKHSCVEDITMVEIDSSVIELSRKFLPTLSNGAFDDERLDLKLCDGFKFLQDIGASDVHKKFDVIITDSSDPEGPAEAFFQERYFELLKDALNPNGVVIMQSSENFWLNLKYLHDLKNTAKKVFPNTEYCYTMVPTYTSGQLGLIVCSNNANIPLNIPQRKISEQEQGKLKYYNPQIHSSAFVLPTWADKVINE

SEQ ID NO: 15158 - protein, 146 aa, Yersinia kristensenii
NESDMVLMPDASTAVMDPFFEDSTLIIRCDILEPGTLQGYDRDPRSISKRAEEFLKSSGIADTVLFGPEPEFFLFDDVRFGSSIRGSHVAIDDIEGAWNSSTKYEGGNKGHRPAVKGGYFPVPPVDSSQDLRSTMCLTMEEMGLVV

SEQ ID NO: 15159 - protein, 128 aa, Yersinia enterocolitica
EDSTLIIRCDILEPGTLQGYDRDPRSISKRAEEFLKSSGIADTVLFGPEPEFFLFDDVRFGSSIRGSHVAIDDIEGAWNSSTKYEGGNKGHRPAVKGGYFPVPPVDSSQDLRSTMCLTMEEMGMVVEA

SEQ ID NO: 15160 - protein, 148 aa, Yersinia kristensenii
KGINESDMVLMPDASTAVMDPFFEDSTLIIRCDILEPGTLQGYDRDPRSISKRAEEFLKSSGIADTVLFGPEPEFFLFDDVRFGSSIRGSHVAIDDIEGAWNSSTKYEGGNKGHRPAVKGGYFPVPPVDSSQDLRSTMCLTMEEMGLV

SEQ ID NO: 15161 - protein, 379 aa, Bacillus licheniformis ATCC 14580
MIALHFGAGNIGRGFIGALLCKSGYDVVFADVNDAVINELNDKGRYTVEMADAGRKQETIGPVRAINSATQLDELYDLIAKADLVTTAVGPAVLKLIAEPIAEGLKRRMKINKQPLNIIACENMIGGSAHLREEIFARLTETERAAISDSVGFPNSAVDRIVPIQHHDDPLKVTVEPFFEWAVDQTEFAGKVPDIEGVTYVADLAPFIERKLFTVNTGHAMAAYAGYKKGLKTIKDAIHHPEVRQTVAGALEETGRYLVQTYDFTQEEHRAYMTKIIGRFENECLSDDVTRVARSPLRKLGRDDRLVGPARKLCDLGFEPVRLAEGIALALQFDCADDPEAVQLQSMIAEKGYAGVLRDVCGLEEDHSLFKLVISHLKA

SEQ ID NO: 15162 - protein, 68 aa, Phaseolus vulgaris
MTTSRRFADRKVEKFEKNITKRGFVPDTTSKKGKDYPVGPLLLGFFVFVVIGSSLFQIIRTATSGGMA

SEQ ID NO: 15163 - protein, 325 aa, Ensifer adhaerens
IGGWKAINESDMVLMPDPETAHMDPFFAQSTMVIICDILDPVSGEAYNRDPRGTAKKAEAYLKASGIGDTVFVGPEAEFFVFDDVKYKADPYNTGFKLDSSELPSNDDTDYETGNLGHRPRVKGGYFPVPPIDSCQDMRSEMLTVLSEMGVTVEKHHHEVAAAQHELGVKFDALVRNADKMQIYKYVVHQVANAYGKTATFMPKPIFGDNGSGMHVHLSIWKDGKPTFAGDEYAGLSESCLYFIGGIIKHAKSLNAFTNPSTNSYKRLVPGYEAPVLLAYSARNRSASCRIPFGTNPKAKRVEVRFPDPTANPYLAFAAMLMAGL

SEQ ID NO: 15164 - protein, 845 aa, Gibberella zeae PH-1
MVAPKRPNRSHTPKKGFSASQLPKKPAKANQSILSFFKKAEKTETSLFLGEAPATAETEDLYSADDADNSTRHNEADSPNKRRKLSQEPEQKIKPEASVKVEEVLVAKECPSPTKSDQEPQRKPTKPKIKTPFVDSDSEDESDDEAKAINNKSEKTGQCTELSPHKQVRTDGLTKDHEKKETDTRTPALKQEDSTYQHFDNLGDIPDEEFPDLNDLEGEEMRVMRLMREQARLEAEEAGISIEDLAEDPLDYDSMTESCPICNGSLEGISVDEATRHVNSCLDGHSIPLPKKEKTTPEKTSPAKPIPTPEVESKEVATRFARAAVPRPGQANPLEIIGPDSAPKTAFSKLMSSNAEDSAWQEAAAAENASRGKQAYERTCPFYKIMPGFSICVDAFRYGAVQGCKAYFLSHFHSDHYIGLTARWCHGSIYCSKVTGSLVKNQLRTAAKWVVELEFDKPYDIPGTEGATVTMIPANHCPGSSLFLFEKTMKQGANSRVQRILHCGDFRACPAHVKHPLLKPDIVDSISGKIKQQKIDICYLDTTYLNPKYSFPPQNDVIKACADLCGSMSPDPNCKDDIWEKAGGQGTLAVSKFFPNTKYDENDKLDTKKKPPQRLLVICGTYSIGKERICISIAKALKSKIFATPGKIKICKQLDDPELSALLTSDPLEAQVHMQMLMEIRAETLQEYLNSYKPHFSRIVGLRPSGWNFRPAGKSFGANTPPGSIHTQQILHDSNWRTRFGYKDFVPQRGSTKEAMCFGVPYSEHSSFRELAMFLMTLRIEKVVPTVNVGSEQSRKRMKGWIDRWLSERRRAGLVIPLIEGEDNGQVAEKELWDGKPGTAGKAFW

SEQ ID NO: 15165 - protein, 139 aa, Arabidopsis thaliana
MTDEDRLLPIANVGRLMKQILPSNAKISKEAKQTVQECATEFISFVTCEASEKCHRENRKTVNGDDIWWALSTLGLDNYADAVGRHLHKYREAERERTEHNKGSNDSGNEKETNTRSDVQNQSTKFIRVVEKGSSSSAR

SEQ ID NO: 15166 - protein, 727 aa, Debaryomyces hansenii CBS767
MTEVYVPLPQAAGYAVVVGLGVVFAAGMILTTFVLRRYNKEIITAEEFATAGRSVKKSLISAAVVSSWTWAATLLTSTTQTYNNGISGSFYYAAGATCQIVLFACLAIKAKERAPGAHTYLEIVKARYGSGAHGVMLFFGLATNVLVTAMLLSGGSAVVSDLTGMNTVAACLLLPLGVVVYTLFGGIKATFLTDYAHTVVIIVIIMVFSFSAFATSDKLGSPAVVWEAVTKLAETQPREGNAGGSYLTMHSRSGGIFFVINIVGNFGTVFLDNGYFNKAFAADPSATLPGYVLGGLAWFAIPMLTSTCLGLVGLSLENTEYWPTYPNKLTPEQVSAGLVLPNAAVALLGKGGAVCSLLLVFMAVTSAMSAELIAVSTIFTYDIFRTYVDPKASGKKLIFMSHMSVIAFAYVMAGFAIGLYYAGISMGYLYELMGIIIGGAVLPSTLTLLSRKQNKQAVIFTPILATGFAIFSWLLCTKMKFKTVTVDTTFEDDSMLTGNVVALLSPLVFIPIFTYAFKPQNFDWNILKEIKRVDEEEEIAEATEGKHTNSGDFENVHPAKSQISIVASELAELKTDQIEIESKMLNKSFKKAVIICISLTLSLVILWPMPMYGSSYVFSKKFFTGWVVVLIIWIFFSAFLVVVCPLWEGREGIYITMRGIYWDCTGQTYKLREWQNSNPEKLHSVNSQISAHVLNFNQIHIVDGKTLDDGYRTPRQIDDIIDDTKKE

SEQ ID NO: 15167 - protein, 317 aa, Mannheimia haemolytica
KLLADARIFVTFADINQTQIDQINQNKQYGVKIVGDDSRVEIVKNIAAINSKDENAVIEQVKNTDLITTAVGPNVLGFIAPLFAKALVARVESGNTQPLNIIACENMVRGTTFFKGKIFEHLTAEQQAEIEKVVGFVDSAVDRIVPPAEPNPADPLEVTVEEFSEWIVDQTQFKGDIPNIKGMELTDNLMAFVERKLFTLNTGHLICAYLGKQAGVKWIKEAIAIEEIKTQVKATMEESGAVLIKRYGFDPQAHSAYIEKILKRFANPYLNDDVNRVGREPIRKLSENDRLIKPLRGTLEYGLPYQNLVKGVVMALQ

SEQ ID NO: 15168 - protein, 382 aa, Streptococcus mutans
MKKAVHFGAGNIGRGFIGQILFENGFAIDFVDVNDKIINALNERHSYDIEIAEDGKRHITVSNVAGINNKENPQAVIDAVAETELITTAIGPNILPFIAQLIAKGIEKRRESQNQTPLDIIACENMIGGSAFLWQEVQKYLSADGLAFAKDYIGFPNAAVDRIVPAQVHKDPLFVVVEPFSEWVVETAAMKNPDLKLSSVHYEENLEPFIERKLFSVNSGHATTAYTGAYFGAKTVLEALKDQQVKEQVKAVLGEIRQLLMAKWQFKENDLKVYHDIIISRFENPYIVDDVTRVARTPIRKLGYDERFIRPIRELKDRGLSYEYLLQTVAYVFHYKDSNDEQSVQLKMLLQEKSLKAVVKEVTGLTDAALIEEIVTSVESLD

SEQ ID NO: 15169 - protein, 554 aa, Oryza sativa Japonica Group
MSSLDATTPRYDEFKRIYHLFLFHAHPFWLQLLYFLFISLLGFLMLKALPMKTSMVPRPMDLDLIFTSVSATTVSSMVAVEMESFSNSQLLLITLLMLLGGEVFTSILGLYFTNAKYSSKMIATLPDDDDHGGSGKPPPPTTSPSSTLVELELAPPMDVVVVNPTTTATTHDEVELGLGRRNKRGCTCTTTHTSSSSSASKTTTTRLLMFVVMGYHAVVHVAGYTAIVVYLSAVGGAGAVVAGKGISAHTFAIFTVVSTFANCGFVPTNEGMVSFRSFPGLLLLVMPHVLLGNTLFPVFLRLAIAALERVTGWPELGELLIRRRRGGGEGYHHLLPSSRTRFLALTVAVLVVAQLALFCAMEWGSDGLRGLTAGQKLVGALFMAVNSRHSGEMVLDLSTVSSAVVVLYVVMMYLPPYTTFVPVQDKHQQTGAQSGQEGSSSSSIWQKLLMSPLSCLAIFIVVICITERRQIADDPINYSVLNIVVEVISAYGNVGFSTGYSCARQVRPDGSCRDLWVGFSGKWSKQGKLTLMAVMFYGRLKKFSLHGGQAWKIE

SEQ ID NO: 15170 - protein, 445 aa, Pseudomonas syringae pv. phaseolicola 1448A
MLHLSRLTSLALAIAIVIGAPLAQAAEKTAPATPAAVSPAKPNANAKPPLPLDELRTFAEVMDRVKAAYVEPVDDKTLLENAIKGMLSNLDPHSAYLGPEDFQELQESTSGEFGGLGIEVGVEDGFVKVVSPIDDTPASKAGIEAGDLIVKINGTPTQGQNMQEAVDKMRGKIGEKITLTLVRDGGTPFDVTLARATIQVKSVKAQMLENGYGYIRITQFQVKTGDEVGKALAKFRKDNGKKMSGLILDLRNNPGGVLQSAVQVADHFLTKGLIVYTKGRIANSELRFSADPADASEGVPLVVLINGGSASASEIVAGALQDQKRGILMGTDTFGKGSVQTVLPLNNDRALKITTALYYTPNGRSIQAQGINPDIVVRRAKVTSEADGENYKEADLMGHLGNGNGGADKPTVKGGAAAKARPQDDDFQLSQALSLLKGLSITRGN

SEQ ID NO: 15171 - protein, 325 aa, Sinorhizobium terangae
ISGWKAINESDMVLMPDPETAHMDPFFAQSTMVILCDILDPVSGEAYNRDPRGTAKKAEAYLKASGIGDTVFVGPEAEFFVFDDVKYKADPYNTGFKLDSSELPSNDDTDYETGNLGHRPRIKGGYFPVPPIDSCQDMRSEMLTVLAEMGVTVEKHHHEVAAAQHELGVKFDALVRNADKMQIYKYVVHQVANAYGKTATFMPKPVFGDNGSGMHVHLSIWKDGKPTFAGDEYAGLSETCLYFIGGIIKHAKALNAFTNPSTNSYKRLVPGYEAPVLLAYSARNRSASCRIPFGSNPKAKRVEVRFPDPSANPYLAFAAMLMAGL

SEQ ID NO: 15172 - protein, 341 aa, Mannheimia haemolytica
KLLADARIFVTFADINQTQIDQINQNKQYGVKIVGDDSRVEIVKNIAAINSKDENAVIEQVKNTDLITTAVGPNVLGFIAPLFAKALVARVESGNTQPLNIIACENMVRGTTFFKGKIFEHLTAEQQAEIEKVVGFVDSAVDRIVPPAEQQAEIEKVVGFVDSAVDRIVPPAEPNPADPLEVTVEEFSEWIVDQTQFKGDIPNIKGMELTDNLMAFVERKLFTLNTGHLICAYLGKQAGVKWIKEAIAIEEIKTQVKATMEESGAVLIKRYGFDPQAHSAYIEKILKRFANPYLNDDVNRVGREPIRKLSENDRLIKPLRGTLEYGLPYQNLVKGVVMALQ

SEQ ID NO: 15173 - protein, 320 aa, Acidovorax sp. JS42
MSGAPTAQATRYVAERLNADFGFYLSDRRLLAERQSAWQHIEVFDNPQFGRVMRIDGCFMTSERDEFFYHEPMVHLPAIAHPGVRRALVVGGGDGGAAEELLKLPGIEQVVLAELDGEVIAMARDWLGQIHRGAFDDPRLEVRLGDARAFIGQTEERFDQIVLDLTDPFGPAVELYTVEFYAACRRALNPGGVLSLHLGSPVHLPESLGRIAASVRAVFPIFRPYLQYVPLYGTLWCMGMASDSTDPARLSADEVDARIAARGLGDLQLYNGAVHHALLAQPNFVRALLDRPALPLHSGDVLEEVRDPAELPEVVVSAAA

SEQ ID NO: 15174 - protein, 1032 aa, Streptococcus pyogenes M49 591
MMARLIPGRVRNEGIKLYEQGLVSFQDDNKGILQIEVETYQVQYGADDEDITCQCDTFHMKHYCKHIAAVEYFLKNDQKGKLFLKQLTNQTKIKETTKKMTSFGSLFLDSLAMNEDDSVKYRLSALGSRSPFSSDYWWSLKINRLPDDRSYVIRDIKGFLQLIKKEGFYQIGKNYFEQLSWLQFDPSSQDLIEFLWRLASGTDKGDNENIFPNHARHLRLPSGFFEEGIHYLTSLYDFTFEGPSQTYHHLFVRSLEAEAGLYEFKVEVHRKSIELQIAEKNVQYLFDNDYLLYQDTFYHLTLKQRKMVQAIRSLPIEADLAKHIHFDLDDHAKLAASLSDFKQIGLVEAPKSFAIRDFEVTFQFDLLNRDEISCQLMFDYGNYQVSDKASLEALPFASHLKKEEKINRSLLAFGFSPQFYSKKRLTSAKELYTFFEETVPCFERLGNVALSTAIQALQVKEMPKIAIIRNQGLLDISFDFSTIIENDIDQAVTALFQNNPYFVSQTGQLVVFDDETQKVSKSLQELRARQLKNGHLQLDGIRALQVSKLFEGMTSVHFSKELEELAYHLQHPETFSIKPLPVKAQMRDYQRNGVQWLSMLNHYGFGGILADDMGLGKTLQTLAFLASHLKSDSKVLILSPSSLIYNWFDECQKFTPQLDVVVSYGLKQIRDQIIEEGHQITITSYSSFRQDFETYQAFHYDYLILDEAQVIKNAQTKISHCLRAFNTANCFALSGTPIENKMLEIWSIFQIVLPGLLPTKKEFLKLTAEQVSRYIKPFVMRRKKEDVLPELPDLIETNYSNEMTDEQKAIYLAQLRQMQDQIRNSSDVDISRQKIEILSGITRLRQICDTPSLFMDYQGESGKLDSLRILLTQIKENGHRALIFSQFRGMLDLAKQEMTALGLTSYQMTGSTPANERQEMTRAFNNGSKDAFLISLKAGGVGINLTGADTVILIDLWWNPAVEMQAISRAYRIGQKENVEVYRLITRGTIEEKILELQESKRNLVTTVLDGNESRASMSIEEIKEILGLNTH

SEQ ID NO: 15175 - protein, 164 aa, Nocardia farcinica IFM 10152
MAEMSIRDIPLRTLSGADTTLAELVGDKAVLLVNVASKCGLTPQYSGLVELHRSYGERGFSVVGVPCNQFMGQEPGTAEEIEQFCSTTYGVDFPLLEKTEVNGENRHPLYAELTQVADAEGTAGDIQWNFEKFLIDRDGKVAGRFRPRTEPQDPALVAALEGVL

SEQ ID NO: 15176 - protein, 523 aa, Microcystis aeruginosa PCC 7806
MSLESATDEVIKQNLEQFLIVLSVSLSVATVSRIFSWFRQIPYTLLLVIVGLGLAFIDIRLVNLSPELILEIFLPPLLFEAAWNTRWRDLKDNWIPVSLFAIVGVIISIFGVGFTLDELTNLPLFTALLVGASLSSTDPVAVVALFRELGASKKLTVLLEGESLFNDGVAVVAFALLVEIPLGASGLSLETTISRIAAFIGIGVAVGCLVGFGISYLTQRLDLPLVEQSLTLVSAYGAYLLTEEFGGSGVIGVVTTGIILGNFGSRISMSPRTRLLVTEFWEFLAFFVNSIVFLLIGDQIRLSSLADNLNLIFITIAAVVAARFLATFALGTVSNALMETKINWREKTVLWWGGLRGSVSIALALSVPVIFPNRQDIIDIVFGVVLFTLLVQGLTIQTFLSRLDLIGDQPIRENYAELLARRVALKRVLDYLSKLDKSPDVAPEFFSYEQHLVKEKLKTVESEIQSLNDSYPQLQLLTMEQLRETLLDIEADTYAEFIRAGRLTSNLSPVLQEILAESKISEQ

SEQ ID NO: 15177 - protein, 519 aa, Corynebacterium efficiens YS-314
MSGLEQPAELSRVWRWLLLVSVAICAASGLVYELALVSLSASLNGGGIVETSLIVAGYVAALGVGAILVKPFLRWPAQTFLAVETLLGLIGGLSALVLYMTFAVVGQNLWMLVLATALIGILVGAELPLLMTMIQRGRLADARTTGSLVATLNAADYLGALLGGLAWPFILLPWLGMMRGAAAAGMINLLAALFVGCVLLRHLLPRAQFIRAVVALLVAIAVLGTVLVRSDGIVATARQQLYRDPVIYAHQSDYQDIVVTQRGADRRLYLNGGLQYSTRDEHRYTESLVYPGLSDSARTALIIGGGDGLAARELLRFPDMRITQVELDPEVIEVANTILLPDNGGAMQDPRVTVITDDAFTWLRAGGDGGQRYDAIFVDLPDPNNDTMARLYSQEFYTLALARLNDGGRMVVQSSSAYTTPDVFWRIASTMSAAGCGAVIPYHVHVPTFGDWGFQLCGPEGTELGLRGDTPSLRFLTDEVLAAAGVFGADNQPRELEPSTLDHPRVVEDLRRGYRQAGE

SEQ ID NO: 15178 - protein, 499 aa, Moorella thermoacetica ATCC 39073
MTLAELVAPLKIIARGGNQQVPLTGLHYDSRRIQSGFLFVAIKGFKTDGHLYIDAALERGAVAVVLAQERTLPPGVAWVRVDDTRLALGQLAARFYDYPSRKLRLIGVTGTNGKTTTTHLIQAILEAGGRPAGLVGTIGNRLGDRVLPAEHTTPESLDLQHLLYQMVSLQARAVVMEVSSHALALHRVAGTEFDVAVFTNLTQDHLDFHHNMEDYFNCKARLFQGLDQGVKAGPKYAVINGDDPYGSRLAALTPVPVVTYGCTPGCQVRARDIHLETGGSTSLVTWPGGEAAMELRLTGRYNIYNALAALAVALQEGIDPQVAIRALGRFKGVPGRLERVDQGQPFTVVVDYAHTPDGLENVLRAARQVTRGRLLVVFGCGGDRDRGKRPLMGRAAARLSDYSIITSDNPRSEDPEAIIADILPGVREVPGASYQVLVDRRRAIAAALALARPGDMVVIAGKGHETYQIVKDKTLPFDDRQVAREELAALGYTGEGPAC

SEQ ID NO: 15179 - protein, 661 aa, Schizosaccharomyces pombe
MTETVLNQGYGYGIVIGLGFAFAIVMILVTYVLKRYVGEVQDSEHFTTASRSVKTGLISSAVVSSWTWPGTLLTSAGMAYEYGVCGSMWYSFAFTVQITFFTVIALQVKRVAPGAHTIVEIVKARFGQASHAVFLFYALGTNIIVSAMLLLGGSQAISAITGMHVVAAGFLLPLGVWLYTVSGGLKSTFLSDWTHTVIVYIVILITLFVAYTSSVHIGSIDKMYDLLTEVSKTNPSTGYKGSYLTVTNRDAVFVGWNIVIGGFATVFCDPSYGQKAIAAKPISAMKGYFAGGLAWLIVPWAMGSAAALSCLALTNNPVSVTYPDPVSSKQVSEGMPLLYGMTALMGKNGAAAGVLILFMASTSATSAELVAFSSVMTYDVYRNYFRPNASGKELVRVTHVFVTIFAVCMGALAVLFNYIGITISWIITFIGIALGPAVFGITLTLFWKKMNKYGMIIGCPMGSITGVVCWVGSCYKFSNGVVNKTTLNTPYANAVGNFTGLFSGLIYIVLISYFFPNKSDDLNNLNEKFVLGDDATAEEIVDAETEKKQLDRSLRIGIFVSWIIFFILVIIVPLPMYGSKYIFSKLFFRGWIIVIIIWTLIAALYITFYPLYESRDTIVYLCKLAIGKAKAPEPMNYVDAVEVEIESLSDDDKEKKANDFL

SEQ ID NO: 15180 - protein, 197 aa, Oryza sativa Japonica Group
THAFARVQLHVGDAVDFLRNAPEGKYDAIIVDSSDPIGPAQELVEKPFFQTIARALKPAGVLCNQAESMWLHTHLIQDMLSICRETFKGAVHYAWTSVPTYPSGVIGFLLCAKEGPAVNFLSPVNPIEKLEGAMEAGREIRFYNSEVHRAAFVLPTFVRRELESHNTCAEKDKSETKPVAKPKKMKIMPNSAIPTAS

SEQ ID NO: 15181 - protein, 252 aa, Physcomitrella patens subsp. patens
MFDKHFEYLREIGRGSFSTVYEARDRKGGALCAVKMSKREFFSRVDRDRYMREIQSVSCLPEHPNVVNYFRGWQQDSHFYIQMELCEAGNLRMLLDALKEPLDEHQVWEYIGQLASALSHIHKHGVLHLDIKPENIFIDGQGNLKLGDFGLAVPCNMWDWEEGDGGYLAPELLQEEEPSPMADIYSFGAMVYEWVTGLQLPRSRPAWEDITRMPSWRSEALCKLVRAMLNPDPLKRPSAEQIISYRKNQPAV

SEQ ID NO: 15182 - protein, 278 aa, Clostridium perfringens ATCC 13124
MNNLKSSSKKNLIIIGGAEDKKGEKIILNFVADKFKESEGIMLIATIATESPNIVIEQYKNIFSSMGIREIKELRVIEREEAFDENNISLVNEASVIFFTGGDQLRITSLIGGTPLYDTLQKRSNEGCYFVGTSAGASVMSDVMIVGGEEEESPKKSTLNMSAGLGLIKNTLIDQHFAQRGRIGRLLSGVCQNPEVLGIGIDEDTAIVINDDELTVIGSGAVYFVDGRNIEYTNVSEKKQDEVFSIFNIKLHVLTAGKKMNLSTRVPFEEERNKNEDK

SEQ ID NO: 15183 - protein, 339 aa, Arabidopsis halleri subsp. gemmifera
MGEAVEIMFGNGFPEIHKDTSPIQTLHSNQQDCHWYEETIDDDLKWSFALNSVLHQGTSEYQDIALLDTKRFGKVLVIDGKMQSAERDEFIYHECLIHPALLFHPNPKTVFIMGGGEGSAAREILKHTTIEKVVMCDIDQEVVDFCRRFLTVNSDAFCNKKLELVIKDAKAELEKREEKFDIIVGDLADPVEGGPCYQLYTKSFYQNILKPKLSPNGIFVTQAGPAGIFTHKEVFTSIYNTMKQVFKYVKAYTAHVPSFADTWGWVMASDHEFDVEVDEMDRRIEERVKGELMYLNAPSFVSAATLNKTISLALEKETEVYSEENARFIHGHGVAYRHI

SEQ ID NO: 15184 - protein, 235 aa, Zea mays
MSAAWEGGKEKGAATPAPGGACELCGAMARVYCGADEATLCWGCDAQVHGANFLVARHARALLCRGCARPTSWRAAGPRLGPSASLCDRCVRRGSGAVGVGGDVEMGGTGDGRGDEEEEEDDDEEDDDVVVEDDDDEEEGEGENQVVPWTEEAEATPPPVASSTSSSSREAPANGASGGECAKENMPCSTSQTGLLCHNSSSARHGGRSGVALEGRNGGRFLAFRPQEEITLRLH

SEQ ID NO: 15185 - protein, 816 aa, Arabidopsis thaliana
MFTAWNLRSRSRSITQEELAKRPDPFCLPNLLDGLEDGLYGRLADDVKRLCKLRQEYLNGSISLEDIEARQDNKRAKSSHNLIIDSDDELPQESVTQINPLEKRLKKLKEVIVVKNGDSSGSDSSPQGYDEEDSSRNSTDIDNQSLYVDAEEEEELWRKMAFAQESIKVTVEDSQSNDHKQIEDCDHSFICKDDIGEVCRVCGLIKKPIESMIEVVFNKQKRSRRTYMREKENGETSRDFSGIQSSHTNILGEKMFIHPWHDQEMRPHQTEGFRFLCNNLAADEPGGCILAHAPGSGKTFLLISFLQSFMAMDPQARPLVVLPKGIIESWKREFTLWEVEKIPLLDFYSVKAESRKQQLKVLGQWIKERSILFLGYQQFTRIICDDNFEAASEDCKLILLEKPTLLILDEGHTSRNKETYMLSSLARVKTRRKVVLTGTLFQNNVEEVFNILDLVRPKFLKRPGTREIVSRIMSKAEIPRGKQVNQSSSSIEGTFFAAVELTLQRSTNFSAKASLIKDLREMTRNILHYHKADFSGLLPGLSEFTVMLNLSSIQRDEVKGLRKMELFKQISLGAALYIHPKLKSFLEENPSNGEKGFSDNNTTVMKLDKMLKKINVRDGVKMKFFLNLLALCESTGEKLLVFSQYIVPIKTLERLMSSMKGWRLGKEMFTITGDSSNEQREWSMERFNNSLEAKVFFGSIKACGEGISLVGASRVLILDVHLNPSVTQQAVARAYRPGQKRKVYAYKLVAADSPEEENYETCTRKEMMSKMWFEWNVGSGREDFGFRAIDADHSGDAFLETTKMKEDIKCLYTKVN

SEQ ID NO: 15186 - protein, 198 aa, Yersinia kristensenii
SIGGWKGINESDMVLMPDASTAVMDPFFEDSTLIIRCDILEPGTLQGYDRDPRSISKRAEEFLKSSGIADTVLFGPEPEFFLFDDVRFGSSIRGSHVAIDDIEGAWNSSTKYEGGNKGHRPAVKGGYFPVPPVDSSQDLRSTMCLTMEEMGLVVEAHHHEVATAGQNEVATRFNTMTKKADEIQIYKYVVHNVAHAFG

SEQ ID NO: 15187 - protein, 427 aa, Fusobacterium nucleatum subsp. nucleatum ATCC 25586
MIAISSLSFTEDDRTGFLSNMRELKEISDIMDVIQDSYVENANAQKYKEEKNKNSARKNTGVTKKSLMQGALRGMMESLDDPHSVYFTKEEMRSFQEDIKGKYVGVGMVIQKKVGEPLTVVSPIEDGPAYKVGIKPKDKVIEIDGESTYNLTSEEASKRLKGKANTIVKVKVFREVNKMTKVFELKRETIELKYVKSKMLDDGIGYLRLTQFGDNVYPDMKKALEDLQAKGMKGLIFDLRSNPGGELGQSIKIASMFIEKGKIVSTRQKKGEESVYTREGKYFGNFPMVVLINGGSASASEIVSGALKDHKRATLIGEKTFGKGSVQTLLPLPDGDGIKITIAKYYTPNGISIDGTGIEPDTKIEDKDYYLISDGAITNIDENQQKENKKEIIKEVKGEKVAKEVDTHKDIQLEAAIKAIKGMTNKK

SEQ ID NO: 15188 - protein, 641 aa, Bordetella holmesii
MSKIIGIDLGTTNSCVAVMDGGQVKIIENAEGARTTPSIVAYMEDGEILVGAPAKRQAVTNPTNTLYAVKRLIGRKFDEKAVQKDIHLMPYSIVKADNGDAWVEVRGKKQAPPQVSAEVLRKMKKTAEDYLGEPVTEAVITVPAYFNDSQRQATKDAGRIAGLEVKRIINEPTAAALAFGLDKAEKGDRKIAVYDLGGGTFDISIIEIADVDGEMQFEVLSTNGDTFLGGEDFDQRIIDYIIGEFKKEQGVDLSKDVLALQRLKEAAEKAKIELSSSQQTEINLPYITADASGPKHLNLKITRAKLEALVEELIERTIEPCRVAIKDAGVKVSDIDDVILVGGMTRMPKVQEKVKEFFGRDPRKDVNPDEAVAAGAAIQGSVLSGDRKDVLLLDVTPLSLGIETLGGVMTKMIQKNTTIPTRFSQTFSTADDNQPAVTIKVFQGEREIAAGNKGLGEFNLEGIPPAPRGMPQIEVTFDIDANGILHVSAKDKGTGKENKITIKANSGLSEDEIQRMVKDAEANAEEDHRLAELAQARNQADALVHATRKSLTEYGEKLEAAEKESIEAAIKDLENILKTGDKAEIDAKVEALSTASQKLGEKMYADMQAQQQAQQQQAADNAKPVDDNVVDADFKEVKRDQ

SEQ ID NO: 15189 - protein, 495 aa, Triticum aestivum
  misc_feature (469)..(469): Xaa can be any naturally occurring amino acid
  misc_feature (486)..(487): Xaa can be any naturally occurring amino acid
KNEANPAVFDLPSEPYNPAGEDEPVEEDEPMGEDEPMEEEHIQEQESDGLEDFWNEYSVALESSKLDTLEEAANEKEVGEKEVDNACSHDIRIHEDLGHVCRVCGLIVRRADMIFDYQWKKPSRSRSYFSETRSKDSDDIVIGDVRVTEELMALDVAIHPRHAKQMRPHQLAGFHFLVKNLVSEKPGGCILAHAPGSGKTFMLISFIQSFLAKYPSSRPLVILPKGILGTWKREFQRWQVEDIPLYDLYSVKAENRAEQLEILKSWQAKLSILFLGYKQFSQIVCSDGGGNVAAACRDMLLKVPSLLIMDEGHTPRNRETDVLESLSRVLTPRKVVLSGTLFQNHVSEVFNILNLVRPKFLKSDSSRPIVARIMSQVAISGRRISKGAADNAFTESVEETLLHDGDFTRKAHVIRSLRELTKDVLHYYKGDILDDLPGLVDFSVFLKLSPKQKEIVHKLEAYEKFKRSXAVGTALYMHPCLSGMSXXDAADRAIN

SEQ ID NO: 15190 - protein, 181 aa, Vibrio campbellii AND4
MKEITRSTLFATLLSINSLALASSCPDILQGKQRLLNSTEVISLCDAFKGKTLLVVNTASQCGFTPQFNQLELLYQTYKNQNFTVLGFPSNDFRQDRGSEEKTAKICYLDYGVTFPMMARTSVIGENANPVFAEISKQAGIIPKWNFYKFLINSQGEIVATFPSSTSPTSTTLTNMIEKQL

SEQ ID NO: 15191 - protein, 202 aa, Yersinia kristensenii
SSIGGWKGINESDMVLMPDASTAVMDPFFEDSTLIIRCDILEPGTLQGYDRDPRSISKRAEEFLKSSGIADTVLFGPEPEFFLFDDVRFGSSIRGSHVAIDDIEGAWNSSTKYEGGNKGHRPAVKGGYFPVPPVDSSQDLRSTMCLTMEEMGLVVEAHHHEVATAGQNEVATRFNTMTKKADEIQIYKYVVHNVAHAFGKTA

SEQ ID NO: 15192 - protein, 473 aa, Ashbya gossypii ATCC 10895
MPCNPRKEESVACPICFKDLSVLHLYEREAHCDICLGRATGGTSGAARKRSIPLPDVKKVRFRDTTLVVDGFMYMDDPTVDAYFLSHFHADHYQGLCPSWKQGPLYCSAITARLAMHKFKIPQELITVLYPGVPHKISPILRCIPLDANHCPGSLILLFEEFDDQGHVRQSILHTGDFRATPSMATELSQLTGSRPIDTVYLDTTYLHPYYHFPLQESVIATTADFAAKLSDVGLRAYFADKQKSILTFTKRRESHKHIIKFRYLYLIGSYSIGKERLAVAISERLRTKLYVRSDTVKRKLIDRYKEWFPDGLITHVASESCVHLVPFEVISSKDSISNYMKVLPPIYEDVIAFSPTGWAYANRLRYIPEQAIRERFACPDKRYKFVTDLLHDATVDSFTTDSLKTQYNQSKRYQLFRIPYSEHSSFKDLSIFATTIQMNAIRSTVNLASLEMHRMWFDTWSRIRNEKYLRKL

SEQ ID NO: 15193 - protein, 196 aa, Yersinia kristensenii
SIGGWKGINESDMVLMPDASTAVMDPFFEDSTLIIRCDILEPGTLQGYDRDPRSISKRAEEFLKSSGIADTVLFGPEPEFFLFDDVRFGSSIRGSHVAIDDIEGAWNSSTKYEGGNKGHRPAVKGGYFPVPPVDSSQDLRSTMCLTMEEMGLVVEAHHHEVATAGQNEVATRFNTMTKKADEIQIYKYVVHNVAHA

SEQ ID NO: 15194 - protein, 202 aa, Neurospora crassa; identical to SEQ ID NO: 886

SEQ ID NO: 15195 - protein, 530 aa, Physcomitrella patens subsp. patens
MNLNLECPVCQICIGGLSTAQREEHTNACLDKCKEEELGEVSEFAEAAMGQAAGRPDMAPVVTWLTNLNLAKYVDIFVKEEIDWDTLKWLTEEDLNSLGISALGPRRKILSAINELRNVPSTSQHMTAIKEGQKLSDSALPRRVPAPDNHTLAGPKASGNASTTEMPWRNTNPRRAISAVRNSRAIGTSGIPTWMCIPGTSFRVDAFKHTTGNCSNWFLTHFHTDHYQGLTRGFRHGKIFCSSITARLISLRIGVPLDRIQALPLNETVLIDGVRVTFIDANHCPGSVMILFEPPNGEVVLHTGDFRYYSDMASNDVLRKCRITTLILDTTYCDPQHDFPKQDSVIQFVIDAIQAEAFNPKTLFLIGTYTIGKEKLFLEVGKALQKYVYVGSAKQRLLDCMDLTEEDKRWLTTKDQESHIHVVPLWSVASFKRMGSISRHYHGRYDSIVAFSPTGCSFGKDKKRVQGRPGRRYQQGSIIRYEVPYSEHSSFTELKEFVRFIGSENIIPSVISSTGPTADAMVATLLNEES

SEQ ID NO: 15196 - protein, 189 aa, Yersinia kristensenii
ESDMVLMPDASTAVMDPFFEDSTLIIRCDILEPGTLQGYDRDPRSISKRAEEFLKSSGIADTVLFGPEPEFFLFDDVRFGSSIRGSHVAIDDIEGAWNSSTKYEGGNKGHRPAVKGGYFPVPPVDSSQDLRSTMCLTMEEMGLVVEAHHHEVATAGQNEVATRFNTMTKKADEIQIYKYVVHNVAHAFG

SEQ ID NO: 15197 - protein, 671 aa, Debaryomyces hansenii CBS767
MSSIVLTAAKVLLKRAAKGNEDLDDDIPDVTQPDDSLEDSNPVTEEIFSSWALFILLFLLCAALWSSYFLQQRRIKAIHETVLSIFYGMIVGLIIRVSPGHYIQDAVKFNSGYFFNILLPPIILNSGYELHQVNFFRNFGSILTFAIPGTFISALVLGTILYVWTALGLDGIHLEFVDALAVGATLSATDPVTILSIFNAYKVDPKLYTIIFGESLLNDAISIVMFETCQKFHGKTLYFSSFFEGIGLFLMSFTISTIIGILVGVFVALILKHSHIRRYPQIETCLVLLFAYESYFFSNGAHMSGIVSLLFCGITLKHYAYFNMSRRTQIATKYIFQLLAQLSENFIFIYLGLSLFTEVELVFKPLLIIISFILICVARWLAVFPLSRLLNFLYKARFKEFTSRSALSGGISSQSLPDEISHSYQMMIFWAGLRGAVGVALAMGIQGEAKWTLMATVLVVVVLTVILFGGTTASMLELFGIRVGCVDEHDDSDDEFDIEAPRLPLTSPSLNSTPSMLGSRRFGNSTTSIDTGSRNMNTPGKNIYKDDVRSRNDSSVSLSSFKPTVGTNTPHPLGISSHNSSSADLVNDEDELNASDVDDLLLNNHMASNSNINTNDPNNSGVLGALLSAEEHVKWFTKFDEQVLKPVLLDTLPHQNRKNHKDDNHPGHGPN

SEQ ID NO: 15198 - protein, 317 aa, Mannheimia haemolytica
KLLADARIFVTFADINQTQIDQINQNKQYGVKIVGDDSRVEIVKNIAAINSKDENAVIEQVKNTDLITTAVGPNVLGFIAPLFAKALVARVESGNTQPLNIIACENMVRGTTFFKGKIFEHLTAEQQAEIEKVVGFVDSAVDRIVPPAEPNPADPLEVTVEGFSEWIVDQTQFKGDIPNIKGMELTDNLMAFVERKLFTLNTGHLICAYLGKQAGVKWIKEAIAIEEIKTQVKATMEESGAVLIKRYGFDPQAHSAYIEKILKRFANPYLNDDVNRVGREPIRKLSENDRLIKPLRGTLEYGLPYQNLVKGVVMALQ

SEQ ID NO: 15199 - protein, 88 aa, Brassica napus
YITPLKLILLLIQQINYSYGSAFGNVGFTTGYSCKRCLDINNGSCKDTSYGFVGRWSPNGKFILIIVMFYGRFKQFTAKSGRPWILYP

SEQ ID NO: 15200 - protein, 317 aa, Mannheimia haemolytica
KLLADARIFVTFADINQTQIDQINQNKQYGVKIVGDDSRVEIVKNIAAINSKDENAVIEQVKNTDLITTAVGPNVLGFIAPLFAKALVARVESGNTQPLNIIACENMVRGTTFFKGKIFEHLTAEQEAEIEKVVGFVDSAVDRIVPPAEPNPADPLEVTVEEFSEWIVDQTQFKGDIPNIKGMELTDNPMAFVERKLFTLNTGHLICAYLGKQAGVKWIKEAIAIEEIKTQVKATMEESGAVLIKRYGFDPQAHSAYIEKILKRFANPYLNDDVNRVGREPIRKLSENDRLIKPLRGTLEYGLPYQNLVKGVVMALQ

SEQ ID NO: 15201 - protein, 468 aa, Neptuniibacter caesariensis
MSEKTLNLIKESNAKWIDLRFTDSHGKEQHVTIPVSDMGDDFFEEGKMFDGSSISGWKGINDSDMILMPDDSASLLDPFSEATTVIVRCNIVEPATGQGYERDPRSVAKRAEEYLKSTGIADTAMFGPEPEFFVFDEVKWHADISGCGYTIASEEASWASSHKIEGGNTGHRPRVKGGYFPVPPIDSLHDLRGAMCDAMEAMDLEIEVHHHEVATAGQCEIGVGANTLTAKADEVQVLKYCVHNVAHAYGKTATFMPKPLVGDNGSGMHVHMSLSKDGVNLFAGDAYAGMSETALYYIGGIIKHAKALNALTNSSTNAYKRLVPGFEAPVMLAYSARNRSASIRIPYVTSPKARRVEARFPDPSANPYLCFSALMMAGLDGIKNKIHPGDAADKDLYDLPAEEAAEIPQVASSLEEALNALEEDREFLTQGGVFTDDMLDAFIELKREEVEKVNMTTHPVEFDLYYSV

SEQ ID NO: 15202 - protein, 325 aa, Bradyrhizobium elkanii
IAGWKAINESDMCLMPDPVTATIDPFFAETTMVITCDVLEPTTGEPYNRDPRGIAKKAEAMVKSMGVGDTVFVGPEAEFFVFDDVRYSAEPYNTGFRLDSSELPINSATEYEGGNLGHRIRTKAGYFPVPPQDSVQDMRSEMLGAMAKMGVKVEKHHHEVASAQHELGMKFDTLTLMADQMQVYKYCIHQVAHIYGKTATFMPKPVYGDNGSGMHVHQSIWKDGKPTFAGNKYADLSETCLHYIGGIIKHAKAINAFTNPSTNSYKRLVPGYEAPVLLAYSARNRSASCRIPYTANPKAKRVEVRFPDPMANPYLGFAAMLMAGL

SEQ ID NO: 15203 - protein, 527 aa, Burkholderia cenocepacia J2315
MSPVSAFKLVLLSFLAIVALECIAKRLRLPPAAALLIGGIGIAFIPGLPPINLDPELVLLVFLPPLLMDGAYFSVWEEFKRNVGGILMLAIGAVVFTTFAVGFAVHWVVPALPWAACFALGAIVSPPDAVAAKAVLERVALPRRLMVLLEGESLLNDAAGLVLFRFAVAAALTGAFSLEHAVVRFAELGLGGVVVGFVVGKLVVWFLKLLDDDYLVITVAVIAGWISYIAGEMVEVSGVIATVTTGMIVGWHQHEVFSAAVRTRGTAFWQVIVFLLEAMVFVLIGLSLRGAIHRLGGFEQVLGTMVPPVLAVLAAVIVSRFVWIYAVEALKWPVRGVVRRGEAPDWKAATIMSWAGMRGVVTLAIALSLPEALPGRDVILVASFAVILVTVLLQGTTIGPLIRLLRLPQRDERAAHHLTEPQTWAYVEAAQLAAIQPLVRDENGVVIHPRLLEQYTYRAELTERSKNEPAYPAEVRMAHYDVVLAAIRAGRAELLRLHRSGRIHDEMLHALERDLDLQEVSAQHARG

SEQ ID NO: 15204 - protein, 325 aa, Mesorhizobium loti
IAGWKAINESDMVLMPDPETVHMDPFFAQSTMVILCDILDPVSGESYNRDPRGTAKKAEAYMKAEGIGDTIFVGPEAEFFVFDDVKYKADPYNTGFKLDSTELPSNDDTDYETGNLGHRPRVKGGYFPVPPIDSAQDMRSEMLTVLAEMGVRVEKHHHEVAAAQHELGIKFDALVRNADKMLIYKYVVHQVANAYGKTATFMPKPIFGDNGSGMHVHMSIWKNGKPTFAGNEYAGLSESCLFYIGGIIKHAKAINAFTNPLTNSYKRLVPGYEAPVLLAYSARNRSASCRIPFGSSPKAKRVEIRFPDPGANPYLGFAALLMAGL

SEQ ID NO: 15205 - protein, 542 aa, Zea mays
YMIRRRLLLTGTPIQNSLQELWSLLNFILPNIFNSSQNFEEWFNAPFACDVSLNDEEQLLIIHRLHQVLRPFLLRRKKDEVEKYLPVKTQVILKCDMSAWQKAYYEQVTSREKVALGYGIRKKALQNLSMQLRKCCNHPYLFVEHYNMYQREEIVRASGKFELLDRLLPKLQRAGHRVLLFSQMTKLLDILEVYLQMYNFKYMRLDGSTKTEERGRLLADFNKKNSEYFMFLLSTRAGGLGLNLQTADTVIIFDSDWNPQMDQQAEDRAHRIGQKNEVRVFVLVSVGSIEEEILDRAKQKMGIDAKVIQAGLFNTTSTAQDRRALLQEILRRGTSSLGTDIPSEREINRLAARNDEEFRLFEKMDEERRLRENYKSRLMDGNEVPNWVFANDNETLRKKTVADEFRNIIVGSKRRRKEVVYSDSFGDQWMKSDEGFEEIAKMTPRVKRTAYSPDIQVEYNERRKRPKSVENSADGASNPTRTPDKGRAGVSSYSKDETEDDGEDEVITSGLQKGNSFTWKTLGRKRSSHLSSSSDSKGRPPF

SEQ ID NO: 15206 - protein, 317 aa, Mannheimia haemolytica
KLLADARIFVTFADINQTQIDQINQNKQYGVKIVGDDSRVEIVKNIAAINSKDENAVIEQVKNTDLITTAVGPNVLGFIAPLFAKALVARVESGNTQPLNIIACENMVRGTTFFKGKIFEHLTAEQQAEIEKVVGFVDSAVDRIVPPAEPNPADPLEVTVEEFSEWIVDQTQFKGDIPNIKGMELTDNLMAFVERKLFTLNTGHLICAYLGKQAGVKWIKEAIAIEEIKTQVKATMEESGAVLIKRYGFGPQAHSAYIEKILKRFANPYLNDDVNRVGREPIRKLSENDRLIKPLRGTLEYGLPYQNLVKGVVMALQ

SEQ ID NO: 15207 - protein, 323 aa, Mesorhizobium mediterraneum
GWKAINESDMVLMPDTETVHMDPFFAQSTMVILCDILDPISGESYNRDPRGTAKKAEAYMKAEGIGDQIFVGPEAEFFVFDDVKYKADPYNTGFKLDSTELPSNDDTDYETGNLGHRPRIKGGYFPVPPIDSAQDMRSEMLTVLAEMGVRVEKHHHEVAAAQHELGIKFDTLVRNADKMLIYKYVVHQVANAYGKTATFMPKPVFGDNGSGMHVHQSIWKGGKPTFAGNEYAGLSESCLFYIGGIIKHAKAINAFTNPLTNSYKRLVPGYEAPVLLAYSARNRSASCRIPFGSSPKAKRVEVRFPDPGANPYLAFAAMLMAGL

SEQ ID NO: 15208 - protein, 317 aa, Mannheimia glucosida
KLLADAGIFVTFADINQTQIDQINQNKQYGVEIVGDDSRVEIVKNIAAINSKDENAVIEQVKTTDLITTAVGPNVLGFIAPLFAKALVARVESGNIQPLNIIACENMVRGTSFFKAKIFENLTACEQEKIEQVVGFVDSAVDRIVPPAEPNPADPLEVTVEEFSEWIVDQTQFKGDIPNIKGMELTDNLMAFVERKLFTLNTGHLICAYLGKQAGVKWIKEAIAIEEIKAQVKATMEESGAVLIKRYGFDPQAHSAYIEKILKRFANPYLNDDVNRVGREPIRKLSENDRLIKPLRGTLEYGLPYQNLVKGVVMALQ

SEQ ID NO: 15209 - protein, 317 aa, Glycine max
  misc_feature (100)..(100): Xaa can be any naturally occurring amino acid
  misc_feature (289)..(289): Xaa can be any naturally occurring amino acid
MSPLQKQYYKWILERNFHNLNKGVRGNQVSLLNIVVELKKCCNHPFLFESADHGYGGDSGSSDNSKLERIVFSSGKLVILDKLLVKLHETKHRVLIFSQXVMQMVRMLDILGEYMSLRGFQFQRLDGSTKAELRQQAMDHFNAPGSDDFCFLLSTRAGGLGINLATADTVIIFDSDWNPQNDLQAMSRAHRIGQQEVVNIYRFVTSKSVEEDILERAKKKMVLDHLVIQKLNAEGRLEKKEAKKGGSYFDKNELSAILRFGAEELFKEERNDEESKKRLLSMDIDEILXRAEKVEEKETDGEQGNELLGAFKLPIFA

SEQ ID NO: 15210 - protein, 325 aa, Bradyrhizobium japonicum
IAGWKAINESDMCLMPDPVTATIDPFFAETTMVITCDVLEPTTGEPYNRDPRGIAKKAEAMVKSMGVGDSVFVGPEAEFFVFDDVRFSSSPYNTGFRLDSSELPTNTDTEYEGGNLGHRIRTKAGYFPVPPQDSVQDMRSEMLGAMAKMGVKVEKHHHEVASAQHELGMKFDTLTLMADHLQIYKYCIHQVAHIYGKTATFMPKPVYGDNGSGMHVHQSIWKDGKPVFAGNKYADLSETCLHYIGGIIKHAKAINAFTNPSTNSYKRLVPGYEAPVLLAYSARNRSASCRIPYTASPKAKRVEVRFPDPLANPYLGFAAMLMAGL

SEQ ID NO: 15211 - protein, 302 aa, Triticum aestivum
  misc_feature (43)..(43): Xaa can be any naturally occurring amino acid
  misc_feature (53)..(53): Xaa can be any naturally occurring amino acid
NVKLPFHVLSSSEIQWNQDKTIHKLVSKDHGLGQKLAMKKLSXKSKMMLKLGXWYEGSSIIGLSYSVCRNLAKGEGKDGEMQRNLLLEKPGLLVLDEGHTPRNKKSLIWKVLAEVSTEKRIILSGTPFQNNFLELYNILCLVKPKFAKDFACTRLSKKGVASTSQSRAAPYVEEDEGKEFWSSLRISNITDEHITEIREKLGPFVHIHNGDILQKSLPGLRESVVILNPLPRQKEIIAMMEESAGKGFLDAEYKISLASIHPFLVTSTKLSDTEASVVDKMKSVRLNPCEGVKTWFVFEIIR

SEQ ID NO: 15212 - protein, 786 aa, Gibberella zeae PH-1
MSSKRQLAHHDDSSNSVAKRQHLELFMSTTSPNSQSNAPSPICFGTLCEVRAKSAGSLDAESTPKSNGSHRLVIRDPDFFLFGIHVHDSIQGFTVPDSNTFVMIDIITAKKLEALKEQAGVFTKAVVESKAVKGLSRKSAKSPFEISVNIYGYELDARDIGQQLSKVGAFLQHPFYLEEGVEYLNPQFFHPQDGPRYMTHLVGMDEPKFQAKVFSDVVEGVLSSLDNGLPNLGINDPEIILTDDLITPLQETNKTSHQKTALSFILRRETPEYCQQVGRELLFHTRVPSHKAIPSLSLGGILADVMGLGKTLTILVSIYHSRCSAENFQNTNIDVDMDQPTYPRTSATHFRDGSLRVNTFHGESRSTQSTSLMNYDIVLTTFATLVSDCKRHKVLQSVEWFRVVLDEAHWIRNPSSKQFKAADSLATERRWCLSGTPIQNCINDLVSLLRFFKFEPFSNMDVFRQYILEPLRTENVLGSTNPLQMLLQSVCLRRTEKYLNLPAAHYELITLSLHHDEQNLYSDVFRKYRSELDDLVSSLTKMDKKKATLRFSMISELRRLCNHGTLLEPPNTLDDATLNVSCDYCNAAEKDNMAKLNGDSMCPECQRSLSPSTPSHSNSRSQSVQLSSLEEPARIHLGLSTKLQSVADNICLRSKSTDRVSLVFSYWTTTLNLLQTMLEDRGIVLRRIDGSLGNGERLRVLNEFKNDPAISVLLITMQTGAVGLTLTVATQVHIIEPQWNPSVEEQAIARALRMGQSNIVKVFRYIMKNTVEEMEAQEMEYLVLWR

SEQ ID NO: 15213 - protein, 439 aa, Nicotiana tabacum
MQQPHHQQRELPFTSSKPPLGDYHRFSTDPLQQPEAILVKSTPLKRKSETTNYKQGVGAQITDSGYADVSSPMQTPISGKVGKAQKVPRTSKARSASQAATSNLGSPSGNNATPVGPCRYDSSLGLLTKKFINLIKHAEDGILDLNKAADTLEVQKRRIYDITNVLEGIGLIEKKLKNRIQWKGLDVSRPGEVDDSVTSLQAEVENMTIEERRLNEQTREMQERLTDLCEDENNQRWLLVTEDDIKSLPCLQNETLIAIKAPHGTTLEVPDPDEAVDYPQRRYRIVLRSTMGPIDVYLVSQFEEKFEEINAVEAPSAMPSTSGFNENDTATLPTEENGGVDGRIDEKENQSVCADVGTSQDFASGIMKIVSDVDNEEDYWLLSDADVSITDIWRADSVLDWNELNVIHEDYSIANVSTPRAQTPPSSTTELPSANTTGS

SEQ ID NO: 15214 - protein, 415 aa, Oryza sativa; identical to SEQ ID NO: 13637

SEQ ID NO: 15215 - protein, 1211 aa, Physcomitrella patens subsp. patens
MADWESRAKRGMKSASQQSNAELLRAIAARRQAQLLRNNKAPSPPPGMNADEVPTEKAEHVHAEVRLAASKILPESSEASGASSDDDGSFDSTSLPGADMEKFYHSHRLQFRKRLPGEGGRCKESTPKDKSEGSSMDDLRTVLDQMSIKDKNGAQSSDRPGILEKQSERKPRDLILNIRKRLVKKSTIVDSDNESESESFDGVDPVSSPSIDYNSADDGDVDSPVVSKVKSKIKPAGVAPRRYPSVDTRPSSSPNADVEHVRAPGFRSVAKGFTETTLNTVDSPPPSAAVGNLINESDVPEKQQELVLSDGKHRFCLRPKTANMLYPHQRSGIEWLWSLHMKGMGGILGDDMGLGKTMQSYQHKPSRFYHHKGVTGHPVDVVVAHSNHDNAHRPIRCTGLVAAFLAGLFCTQNIKCALIVAPKTLIAHWVKELKVVGLSRKTYDYSGTSVKAREYALQNVLQMGGVLLTTYDMVRCNFKALRGDFDGRDGYGDTSDDIITWDYMILDEGHLVKNPNTQRAKSLREIPAAHRIVISGTPIQNHLQEMWALFDFCCPDLLGDRKEYAFTLNLFYFDDGRLKNMFKDKYERQILAGTDKNASDRQKRIGIQVAEELRQKFGPFFLRRLKSEVFPDSEDKKERKLSRKNDLIVWLPLSEGQEKLYRAFLNSNTAEETLSTGTKVLSALTVMKKICDHPMLLTKRAANDIAEGMEGYLDAEDIQAAEAMTHSLAGMVQDDEDMSATSCKIDFLMALLDNLVAEGHRTLIFAQTRKMLNIIQDEILERGWIFRRIDGTIKAADRELCVQEFQSDDEIPLFLLTSQVGGLGLTLTGADRVVIVDPAWNPSTDNQSVDRAYRIGQKNDVVIYRLMTCGTIEEKIYRKQVFKGHLMKVATEKKNQMRYFSQGELGEMFKVPEVGFRVSETQLQLHKEHSSQHKIDEGLQKHIEFLDGLGIAGVSHHDLLFTKEAEPLPPPGSEDQDLNATWEPRNPSYVGHRYKAASKPEKYSWEASQAVGRGILATATAGLQSQGVDNSNALKVEFLRGKLERLSRTLDDKAMIARLPDHGVGLEKKLKETQKELREAELIAGSKENIGAHLPSRSAAQVPGADLSADETYAVTNIAEGQSAQRPKPLGFNNNQLTVPTLVSKKNSCFQETVPATQTASVPGVQRGVHLPSWSLLSDSPTSSRGSPAPTSREDVDDMAEALSSLRLRLH

SEQ ID NO: 15216 - protein, 362 aa, Glycine max
MEDGAGRGLECPKTMDGKASNGNGLEKEIPSCCLKAKASIPESEAKCHSTVVSGWFSASQTCSGKSGKAVYFNNPMWPGEAHSIKVEKILYKEKSEYQEVLVFESSTYGKVLVLDGIVQLTEKDECAYQEMIAHLPLCSIHSPKNVLVVGGGDGGVLREVARHSSVEHIDICEIDKMVIDVSRKFFPQLAVGFEDSRVHLHVGDAVDFLKSAPEGKYDAIIVDSSDPVGPAQELVEKPFFDTIARALRPGGVLCNMAESMWLHTHLIQDMISICRETFKGSVCYAWASVPTYPSGMIGFLLCATEGPPVDFVNPINPIEKLEGANEHKRELQFYNSEMHSAAFALPAFLKREVSLLRDLSLQ

SEQ ID NO: 15217 - protein, 1164 aa, Arabidopsis thaliana
MEEDEDQFLLSSLGVTSANPEDLEQKILDEATKKPDNDEGGSVEEKSTQLEGTNLLSSSQNELLNKLRAVKFEIDAVASTVENVDEIAAEKGLKKDDESDLQGLHSGSALQHALATDRLRSLKKRKIQLEKELTGLHGQSASSSADHGNLLRDLVKEKPSLKRKLKEIRKPSRRDGKKVKVVSFREDTDFDAVFDGASAGFVETERDELVRKGILTPFHKLDGFERRLQQPGPSNSRNLPEGDDENEDSSIIDRAVQSMSLAAKARPTTKLLDAEDLPKLEPPTAPFRRLRKLYKTPNSPDNEAKKRKAGKKSKKTRPLPEKKWRKRISREDSSLQGSDDNERSSVQLEGGLNIPECIFRKLFDYQRVGVQWLWELHCQRAGGIIGDEMGLGKTIQVLSFLGSLHFSKMYKPSIIICPVTLLRQWRREAQKWYPDFHVEILHDSAQDSGHGKGQGKASESDYDSESSVDSDHEPKSKNTKKWDSLLNRVLNSESGLLITTYEQLRLQGEKLLNIEWGYAVLDEGHRIRNPNSDITLVCKQLQTVHRIIMTGAPIQNKLTELWSLFDFVFPGKLGVLPVFEAEFSVPITVGGYANASPLQVSTAYRCAVVLRDLIMPYLLRRMKADVNAHLTKKTEHVLFCSLTVEQRSTYRAFLASSEVEQIFDGNRNSLYGIDVMRKICNHPDLLEREHSHQNPDYGNPERSGKMKVVAEVLKVWKQQGHRVLLFSQTQQMLDILESFLVANEYSYRRMDGLTPVKQRMALIDEFNNSEDMFVFVLTTKVGGLGTNLTGANRVIIFDPDWNPSNDMQARERAWRIGQKKDVTVYRLITRGTIEEKVYHRQIYKHFLTNKILKNPQQRRFFKARDMKDLFILKDDGDSNASTETSNIFSQLAEEINIVGVQSDKKPESDTQLALHKTAEGSSEQTDVEMTDKTGEAMDEETNILKSLFDAHGIHSAVNHDAIMNANDEEEKMRLEHQASQVAQRAAEALRQSRMLRSRESISVPTWTGRSGCAGAPSSVRRRFGSTVNSRLTQTGDKPSAIKNGISAGLSSGKAPSSAELLNRIRGSREQAIGVGLEQPQSSFPSSSGSSSRVGSLQPEVLIRKICSFVQQKGGSADTTSIVNHFRDIVSFNDKQLFKNLLKEIATLEKDQNRSFWVLKSEYKD

SEQ ID NO: 15218 - protein, 490 aa, Bacillus sp. SG-1
MDNDQQQTNNESKENNSSGFIKIRKFQFVMLIFFLVFATAGITTFALAFGDEKAVNVGVPERSEFQKLFEAYDALNNEYYKDLEQDDLVNGAINGMLESLEDPYSDYMNEEEAKRFEESITSSFEGIGAEIQEKDGHIMIVSPIKGSPAEKAGLRPNDKILEVDGESIQGLSVTDAVLKIRGEKGTKVTLTIQRPGADETTEVTITRDEIPLETVYSEMLDNGIAKVQITSFSDDTYTELTKALDEMQAEGMKGLIIDVRQNPGGLLDQAIKISSLFVPEGDVLLQVEDNEGNKEKIVAEGGQKVDVPVTVLIDKGSASASEILAAAVSESAEIPLIGVNSFGKGTVQTSESFTDGSNMKFTTAKWLTPDGTWIHEKGIKPDYDVSLPAYAELPYINPDKELKESDLSDQVKAAEEMLKAGGYNPGKADGFYDEQTTEAVRAFQEEEGLEVTGNLNSESILKLMENMRTLIETNDTQVNKAVEVLTDELQ

SEQ ID NO: 15219 - protein, 524 aa, Bacillus subtilis
MEHLDLHHIFELGFFVVMIAAGITAIAKKCRQPYPIALVIVGTIIGLVHIPLFEPLKEFITEGEVFNFVIITLFLPALLGEAALKLPFSHLRENKRPVLALFGGTLISFLIVGFSSMWLMHLAIPAAFVFAALMSATDPVSVLSIFKSVGAPKKLSIVVEGESLFNDGLAVVLFNISAFYLMTYLDLGIQGAGLGLWEFVKVISLGLIIGGVLGYVFSQLTKYFDDYPLEIIFSIILFYSSFLLAEMAGASGVIAVVVAALIFGNYGAKIGMSPTTKLNINNFWDVAALLANSLVFLMVGLEITRIDLTDKWGLAIMAIVIVLIARSAAVYISLAFIKKFPVTWKHTINWGGLKGSLSIALVLSLPRDFPGREDILVFAFSVVLFSLVVQGLTIKPLLERLGVNQKEEGNQEYEELLAKGHRLETAIKEVQQVKHNLLIHEAVSSELTDQYKKEVSQLHQQTNKLFETYPELKNKQQTILKKHSLYAQYQAIENLSREDIISNEVAELEQARIIDEIVRLQNDH

SEQ ID NO: 15220 - protein, 197 aa, Yersinia kristensenii
SSIGGWKGINESDMVLMPDASTAVMDPFFEDSTLIIRCDILEPGTLQGYDRDPRSISKRAEEFLKSSGIADTVLFGPEPEFFLFDDVRFGSSIRGSHVAIDDIEGAWNSSTKYEGGNKGHRPAVKGGYFPVPPVDSSQDLRSTMCLTMEEMGLVVEAHHHEVATAGQNEVATRFNTMTKKADEIQIYKYVVHNVAHA

SEQ ID NO: 15221 - protein, 244 aa, Zantedeschia aethiopica
MASSAAFTAAPSPVRPLHGLADGGRRALRPALASATFSIRAPSGLSEFSSSLRRRFSLSSSTIRVSESKPRRTSGVVYATAATEKSIHDFTVKDIDGKDVSLSKFKGKVLLIVNVASRCGLTTSNYMELSHIYEKYKTQGFEILAFPCNQFGSQEPGTNSEIKQFACTRFKAEFPIFDKVDVNGPKTAPVYQFLKSSAGGFLGDLIKWNFEKFLVDKNGKVVERYPPTTSPFQIEKDIRKLVAA

SEQ ID NO: 15222 - protein, 159 aa, Yersinia mollaretii
SDMVLMPDASTAVMDPFFEDATLIIRCDILEPGTLQGYDRDPRSISKRAEEFLKSSGIADTVLFGPEPEFFLFDDVRFGSSIRGSHVAIDDIEGAWNSSTKYEGGNKGHRPAVKGGYFPVPPVDSSQDLRSTMCLTMEEMGLVVEAHHHEVATAGQNEV

SEQ ID NO: 15223 - protein, 97 aa, Zea mays
ETWHETLHSGFGQYFSVDNLLYRDKTAHQDLVIFENAAFGRVMALDGVVQTTERDEFIYHEMMTHVPILAHGNARRVLIIGGGDGAMLREVARHQSV

SEQ ID NO: 15224 - protein, 481 aa, Helicobacter pylori
MIVRTQNSESKIKEFFEFCKENEVEFVDFRFSDIKGTWNHIAYSFGALTHGMFKEGIPFDASCFKGWQGIEHSDMILTPDLVRYFIDPFSADVSVVVFCDVYDVYKNQPYEKCPRSIAKKALQHLKDSGLGDVAYFGAESEFFIFDSIKIKDASNSQYYEVDSEEGEWNRDRSFENGVNFGHRPGKQGGYMPVPPTDTMMDIRTEIVKVLNQVGLETFVAHHEVAQAQGEVGVKFGDLVEAADNVQKLKYVVKMVAHLNGKTATFMPKPLYGDNGSGMHTHVSVWKNNENLFSGETYKGLSGLALHFLGGVLRHARGLAAFTNASTNSYKRLIPGYEAPSILTYSANNRSASVRIPYGISKNSARFEFRFPDSSSNPYLAFGAILMAGIDGIKNKMDPGEAMDINLFKLTLDEIIEQGIIQMPHTLRRSLEEMLADKQYLKQGQVFSEQFIHAYQSLKFHSEVFPWESKPHPFEFITTYSC

SEQ ID NO: 15225 - protein, 151 aa, Yersinia mollaretii
LMPDASTAVMDPFFEDATLIIRCDILEPGTLQGYDRDPRSISKRAEEFLKSSGIADTVLFGPEPEFFLFDDVRFGSSIRGSHVAIDDIEGAWNSSTKYEGGNKGHRPAVKGGYFPVPPVDSSQDLRSTMCLTMEEMGLVVEAHHHEVATAG

SEQ ID NO: 15226 - protein, 317 aa, Mannheimia glucosida
KLLADAGIFVTFADINQTQIEQINQNKQYGVKIVGDDSRVEIVKNIAAINSKDENAVIEQVKTTDLITTAVGPNVLGFIAPLFAKALVARVESGNTQPLNIIACENMVRGTSFFKAKIFENLTACEQEKIEQVVGFVDSAVDRIVPPAEPNPADPLEVTVEEFSEWIVDQTQFKGDIPNIKGMELTDNLMAFVERKLFTLNTGHLICAYLGKQAGVKWIKEAIAMEEIKAQVKATMEESGAVLIKRYGFDPQAHSSYIEKILKRFANPYLNDDVNRVGREPIRKLSENDRLIKPLRGTLEYGLPYQNLVKGVVMVLQ

SEQ ID NO: 15227 - protein, 196 aa, Yersinia mollaretii
SIGGWKGINESDMVLMPDASTAVMDPFFEDATLIIRCDILEPGTLQGYDRDPRSISKRAEEFLKSSGIADTVLFGPEPEFFLFDDVRFGSSIRGSHVAIDDIEGAWNSSTKYEGGNKGHRPAVKGGYFPVPPVDSSQDLRSTMCLTMEEMGLVVEAHHHEVATAGQNEVATRFNTMTKKADEIQIYKYVVHNVAHA

SEQ ID NO: 15228 - protein, 148 aa, Vicia faba
MEFTLRQEALVNSSWEAFNQNLPLFSVLFYTFILEKAPIAKNMFSVLKDANEIPLANPSINAHTEMVFEMVRDAAAQLQTTGQVVLGDTTLGVVHTQKRVDGLHFMVVKEALLKTIKEAVGDKWSEELSNAWEIAYDGLAVAIMKEMS

SEQ ID NO: 15229 - protein, 317 aa, Mannheimia glucosida
KLLADAGIFVTFADINQTQIDQINQNKQYGVKIVGDDSRVEIVKNIAAINSKDENAVIEQVKTTDLITTAVGPNVLGFIAPLFAKALVARVESGNTQPLNIIACENMVRGTSFFKAKIFENLTACEQEKIEQLVGFVDSAVDRIVPPAEPNPADPLEVTVEEFSEWIVDQTQFKGDIPNIKGMELTDNLMAFVERKLFTLNTGHLICAYLGKQAGVKWIKEAIAIEEIKAQVKATMEESGAVLIKRYGFDPQAHSAYIEKILKRFANPYLNDDVNRVGREPIRKLSENDRLSKPLRGTLEYGLPYQNLVKGVVMALQ

SEQ ID NO: 15230 - protein, 539 aa, Klebsiella pneumoniae subsp. pneumoniae MGH 78578
MTLVVSLSGVVTRVLPFQVPLPLMQIAIGALLAWPTFGLHVEFDPELFLVLFIPPLLFADGWKTPTREFIEHGREILGLALALVVVTVVGIGFLIYWIVPGIPLIPAFALAAVLSPTDAVALSGIVGEGRIPKKIMGILQGEALMNDASGLVSLKFAVAVAMGTMVFTVGGATVEFLKVAIGGVLAGFVVSWSYGRSMRFLSRWGGDEPATQIVLLFLLPFASYLIAEHIGVSGILAAVAAGMTITRSGVMRTAPLAMRLRANSTWAMLEFVFNGMVFLLLGLQLPDILSSSLVAAEADPNVETWMLFTDIILIYAALMLVRFGWLWSMRKLSQRFLKKKPMEFGSWTTRELLISSVAGVRGAITLAGVLSIPLLLPDGNVFPARYELIFLAAGVILFSLFVGVIALPILLRHIESSDNVQQRKEERLARAATADVAIVAIQKMEERLAADTKENIDTQLLTEVSSRVIGNLRRRADGRNDVETSMLEESLERRFRLAALRSERGELYHLRATRQISNETLQKLLHDLDLLEALLIEDQ

SEQ ID NO: 15231 - protein, 636 aa, Anabaena variabilis ATCC 29413
MVQETSTDLVRINARKTDVFDIFNCRYYVGSNPYLDTGALVFDFAVVENRKPLPIEDYITRVGDRYPHLREQNYESYAHLFAQTVSEVGKLDMNLHFHRWSVKPHSKYTKIAVQALHERTIRSVVYLVWDWFEAINQDDDFFWDDQLVTLQNRFRQSVYGGPTVYALLRTAYEKGIPTFYLWDEGLMQYGWGKKHIRGVATTFNCDSHIDSDFTTRKDDCKAFLHTLGFPVPQGEIVYSQKEARQVAKDIGYPVAVKPVVGHKGIGVTADIKDVDELEVAYDRALEAIPENEPARIIVEKSIKGKDFRLLCVNGRFVAATERHPASVVGDGDSTIWELIQKENRKAARLDSPTSPMSKIIVDDAMEHYLEEQRLSLKTVLDKGETVHLRKVANLSAGGMSINATHTIHDDNIILAQDIAQYFRLTCLGIDVITEDLSESWKAGNFAIIEINAAPGVMMHLNPAVGESVDVPSHILETFFKSGLDARIPIMTFNKISVEELQTTIDHILLQHPEWTIGAVCRDAVFVNRSQKVLRDDYNSNIQSLLRHPKLDLLIAEYPEDTLEEDGMFYQGSNLVVLDNPSETEMMLARDVFDGSTVVIKKEKDVSIRRKGLIEDYTLGEDEPFTRVYLKEIGSIL

SEQ ID NO: 15232 - protein, 216 aa, Phaseolus coccineus; identical to SEQ ID NO: 925

SEQ ID NO: 15233 - protein, 317 aa, Mannheimia glucosida
KLLADAGIFVTFADINQTQIDQINQNKQYGVKIVGDDSRVEIVKNIAAINSKDENAVIEQVKTTDLITTAVGPNVLGFIAPLFAKALVARVESGNTQPLNIIACENMVRGTSFFKAKIFENLTACEQEKIEQVVGFVDSAVDRIVPPAEPNPADPLEVTVEEFSEWIVDQTQFKGDIPNIKGMELTDNLMAFVERKLFTLNTGHLICAYLGKQAGVKWIKEAIAIEEIKAQVKATMEESGAVLIKRYGFDPQAHSAYIEKILKRFANPYLNDDVNRVGREPIRKLSENDRLIKPLRGTLEYGLPYQNLVKGVVMALQ

SEQ ID NO: 15234 - protein, 1724 aa, Arabidopsis thaliana
MAFFRNYSNDTVSHNVLDENEERQNAATFQSSPLNEDVDGTYSERGFDMNMDVQYQSDPEPGCSIRQPNETAVDNVADPVDSHYQSSTKRLGVTGRWGSTFWKDCQPMGQREGSDPAKDSQSGYKEAYHSEDNHSNDRSEKLDSENENDNENEEEDNEMNKHQSGQADVPADEMLSDEYYEQDEDNQSDHVHYKGYSNPTNSRSLPKAGSAVHSNSRTSRAIHKNIHYSDSNHDHNGDADMDYEEEEDEDDPEDADFEPYDAADDGGASKKHGQGWDVSDEDPESDEEIDLSDYEDDYGTKKPKVRQQSKGFRKSSAGLERKSFHVSSRQKRKTSYQDDDSEEDSENDNDEGFRSLARRGTTLRQNNGRSTNTIGQSSEVRSSTRSVRKVSYVESEDSEDIDDGKNRKNQKDDIEEEDADVIEKVLWHQLKGMGEDVQTNNKSTVPVLVSQLFDTEPDWNEMEFLIKWKGQSHLHCQWKTLSDLQNLSGFKKVLNYTKKVTEEIRYRTALSREEIEVNDVSKEMDLDIIKQNSQVERIIADRISKDGLGDVVPEYLVKWQGLSYAEATWEKDVDIAFAQVAIDEYKAREVSIAVQGKMVEQQRTKGKASLRKLDEQPEWLIGGTLRDYQLEGLNFLVNSWLNDTNVILADEMGLGKTVQSVSMLGFLQNTQQIPGPFLVVVPLSTLANWAKEFRKWLPGMNIIVYVGTRASREVCQQYEFYNEKKVGRPIKFNALLTTYEVVLKDKAVLSKIKWIYLMVDEAHRLKNSEAQLYTALLEFSTKNKLLITGTPLQNSVEELWALLHFLDPGKFKNKDEFVENYKNLSSFNESELANLHLELRPHILRRVIKDVEKSLPPKIERILRVEMSPLQKQYYKWILERNFHDLNKGVRGNQVSLLNIVVELKKCCNHPFLFESADHGYGGDINDNSKLDKIILSSGKLVILDKLLVRLRETKHRVLIFSQMVRMLDILAEYLSLRGFQFQRLDGSTKAELRQQAMDHFNAPASDDFCFLLSTRAGGLGINLATADTVVIFDSDWNPQNDLQAMSRAHRIGQQEVVNIYRFVTSKSVEEEILERAKRKMVLDHLVIQKLNAEGRLEKRETKKGSNFDKNELSAILRFGAEELFKEDKNDEESKKRLLSMDIDEILERAEQVEEKHTDETEHELLGAFKVANFCNAEDDGSFWSRWIKPDSVVTAEEALAPRAARNTKSYVDPSHPDRTSKRKKKGSEPPEHTERSQKRRKTEYFVPSTPLLEGTSAQVRGWSYGNLPKRDAQRFYRTVMKFGNHNQMACIAEEVGGVVEAAPEEAQVELFDALIDGCKESVETGNFEPKGPVLDFFGVPVKANELLKRVQGLQLLSKRISRYNDPISQFRVLSYLKPSNWSKGCGWNQIDDARLLLGILYHGFGNWEKIRLDESLGLTKKIAPVELQHHETFLPRAPNLKERATALLEMELAAAGGKNTNAKASRKNSKKVKDNLINQFKAPARDRRGKSGPANVSLLSTKDGPRKTQKAEPLVKEEGEMSDDGEVYEQFKEQKWMEWCEDVLADEIKTLGRLQRLQTTSADLPKEKVLFKIRRYLEILGRRIDAIVLEHEEDLYKQDRMTMRLWNYVSTFSNLSGDRLNQIYSKLKQEKEEEEGVGPSHLNGSRNFQRQQKFKTAGNSQGSQQVHKGIDTAKFEAWKRRRRTENDVQTERPTITNSNSLGILGPGPLDRSHRARQTGFPPR

SEQ ID NO: 15235 - protein, 925 aa, Bacillus pumilus SAFR-032
MTRHKQIVIHAEQTEDFSFTISAQAEDGHPVPLNEMKRQLFQWHESSFYGTFLEDVSFIGTPAFLLSPWMTVELLGKNSFNTFSHVTLTEETEPLMKTASTIYEFIEDEDFIPDYEAWTKGVLRFKDKEGLLDGYTAEWFSFAVQDYIQYDDALQHKWNRMTEQSPALSSFQGHFLDEQDFLETIGWIDDDTPFTVGLRLNEPDFDGDDWKIELFLRDKKNSDLHFFEGIRSLKRSWHPYQDKISRELERFGQIVPWLSFTSGTTLMSEDEAWLFLSEASETLVNMGIEILLPSWWQIVKESTMMLKARISSTPRGESHVGMDALMDFNWRFATNGIELTEDEFNELVQSKRRLVNIRGQWIKIDPTFIQQMKKWMERAENEGLHMSDILSRELADQEASSESIPELLDSSAFAHIQFELSSQLRGLVHQLNDTHELPSYEMSDSFKGTLRPYQQHGVNWLLFLRSHGFGACLADDMGLGKTIQMIAYFTYLKEQESNAAPSLIIAPTSVLGNWQRELETFAPHLNVALHYGPSRPQGEHFTKAYESTDIVLTSYGLSHSDRDELTSAKWDTICLDEAQNIKNAHTKQSRAIRQLKGQHHIALSGTPMENRLTELWSIFDFVNKGYLGSLTSFHKKFVLPIEKDREEKRIEQLQQLIKPFLLRRTKQDEEVALNLPEKLEEKEFIPLSAEQASLYEQLVKDTFEHMASLTGMQRKAIILSMLGRLKQICDHPALYLKESGTDVKLLKRSLKMDKLAELLKAIHEQGESCLIFTQYIGMGNMIKQLAEKMFGEPVQFLNGSLSKQERDKMVDRFQKKEFNILILSLKAGGTGLNLTAANHVIHYDRWWNPAVENQATDRAYRIGQKRFVHVHKMITTGTIEEKIDQMLETKQTLNDQIIQSESWITELSTNELEDLFTLSAAAQSS

SEQ ID NO: 15236 - protein, 690 aa, Bifidobacterium longum DJO10A
MAVFELILCIIAAVVVSSFASRFVPKVSTPLVQIVLGVLVTYLPFFPDATLDPELFMVLFIAPLLYLEAHEIDKSALLKTLDLSLSLAIGLAIVTMAAVGFTLHAVWPSITLASALALGAALGPTDAVAVSSLGKEASLTQRQRSVLKGESLFNDASGIVGFQFALAAAFTGEFAVGQAAGEFVISFFGGTLFGLVIAAAANWLFETVRSLGWETTTTRILMELFLPFLLYLGAEEFNVSGILSVVAAGLFIRFDRTGVGPNVARTNIVSTSVWGVLSFSLNGAVFILLGMQLPRAMMASWSDPYISNTVLIGIILLVTLVVIALRFFWIAAMLRVARDTITGQRRKMTPERWRSAAVMTFGGPKGTITLSLMFTIPYYIAGGAPFPMRDELIFIASGVIIATLLLANFLLPLLAPNRGKDPSAEIIPVTIDVLRATVEELTGRITPENRRAILMVIDQYTKRIGRLQQRIGDTDPQGFEQLQIEALHWEKEFVRDRLADTKAHPAADTATQELNVETCERMLDQIMNTLRHTSTDPTSGHAVSQIRGRLRMFQRQMSNYAKRTVSKIRHTTPLVSEDQIFARTRELQVEAIHHVIGRLIDEMGQDTYNTEHCSALLLDYRRAEASLQARPTMSGTTETITQVEDVKRESYGIELGMIQDMYEAGDINRAQARSLRRNIYVMQVDADSGI

SEQ ID NO: 15237 - protein, 288 aa, Anabaena variabilis ATCC 29413
MTASENKRQLVIIGGAEDKDGDSQILREFVRRSGGTKAHIVIMTAATELPRDVGENYIRVFERLGAEKVRIIDTETREDASSSTALEAIAKATGIFFTGGDQARITSIIKDTEIDAAIHKRFSEGIVVGGTSAGAAVMPDKMIVEGDSETNPRLEIVEMGPGLGFLPGVVIDQHFSERGRLGRLITALIREPAVLGFGIDENTAMVVTDSQIEIIGQGSVTIVDESESTYNNMDEILRDEALAICGAKLHILPHGYKFDLKTRKPILTNGAAADASVPVGSATISAAV

SEQ ID NO: 15238 - protein, 293 aa, Arabidopsis thaliana
TRPWFSEISPMWPGEAHSLKVEKILFQGKSDYQDVIVFQSATYGKVLVLDGVIQLTERDECAYQEMITHLPLCSISNPKKVLVIGGGDGGVLREVARHSSVEQIDICEIDKMVVDVAKQYFPNVAVGYEDPRVNLIIGDGVAFLKNAAEGTYDAVIVDSSDPIGPAKELFEKPFFESVNRALRPGGVVCTQAESLWLHMDIIEDIVSNCRDIFKGSVNYAWTSVPTYPSGVIGFMLCSSEGPQVDFKKPVSLIDTDESSIKSHCPLKYYNAEIHSAAFCLPSFAKKVIDSKAN

SEQ ID NO: 15239 - protein, 245 aa, Corynocarpus laevigata; identical to SEQ ID NO: 8365

SEQ ID NO: 15240 - protein, 317 aa, Mannheimia glucosida
KLLADAGIFVTFVDINQTQIDQINQNKQYGVKIVGDDSRVEIVKNIAAINSKDENAVIEQVKTTDLITTAVGPNVLGFIAPLFAKALVARVESGNTQLLNIIACENMVRGTSFFKAKIFENLTACEQEKIEQLVGFVDSAVDRIVPPAEPNPADPLEVTVEEFSEWIVDQTQFKGDIPNIKGMELTDNLMAFVERKLFTLNTGHLICAYLGKQASVKWIKEAIAIEEIKAQVKATMEESGAVLIKRYGFDPQAHSAYIEKILKRFANPYLNDDVNRVGREPIRKLSENDRLIKPLRGTLEYGLPYQNLVKGVVMALQ

SEQ ID NO: 15241 - protein, 159 aa, Clostridium perfringens SM101
MEIYDISVKDINGENVSLEIYRGKVLLIVNTASKCGFTKQFDGLEELYEKYKDEGFEVLGFPCNQFKEQDPGSNSEIMNFCKLNFGVTFPMFEKIDVNGENESLLYSYLKEQKSGMFGSKIKWNFTKFLVDREGNVIKRFSPQTTPKSIEKDIEELLAK

SEQ ID NO: 15242 - protein, 317 aa, Bibersteinia trehalosi
KLLADAGIHVIFADINQAQIDQINQNQQYGVKIVGDDSRVEIVRNIEAINSKDEQAVMEKVKSVELITTAVGPNVLGFIAPLFAKALAARVESGNTQPLNIIACENMVRGTSFFKRKIFENLTAEQQAEVEKYVGFVDSTVDRIVPPAESNPNDPLEVTVEEFSEWIVDQTQFKGEIPVIKGMELTDNLMAFVERKLFTLNTGHLICAYLGKQAGVQWIKQAIAIEEIKAQVKATMEESGAVLIKRYAFDAQAHAAYIEKILKRFANPYLNDDVNRVGREPIRKLSENDRLIKPLRGTLEYGLPHTNLVKGAVMALH

SEQ ID NO: 15243 - protein, 214 aa, Escherichia albertii
GRGFIGKLLADAGIQLTFADVNQVVLDALNARHSYQVHVVGETEQVDTVSGVNAVSSIGDDVVDLIAQVDLVTTAVGPVVLERIAPAIAKGLVKRKEQGNESPLNIIACENMVRGTTQLKGHVMNALPEDAKAWVEAHVGFVDSAVDRIVPPSASATNDPLEVTVETFSEWIVDKTQFKGALPNIPGMELTDNLMAFVERKLFTLNTGHAITAY

SEQ ID NO: 15244 - protein, 523 aa, Mycobacterium avium subsp. paratuberculosis K-10
MSTVEVSAPEAAPPSPGRWRALLLAAVAACAACGIIYELALLTLSASLDGGGIVATSLIVAGYIAALGVGALLAKPLLARAALGFITVEALLGVVGGLSAAALYVVFAFLDGSVGSTWVLAVSTALIGGLVGAEVPLLMTLLQRGRTAGPADAGRTLANLDAADYLGALLGGLVWPFLLLPHLGMIRGAAATGMINLAAAAVVAIFLLRQVVSARQLALALCALAAALALLAGLLLRSADVETTSRQRLYADPIIAYRHTPYQEIVVTRRGDDTRLYLDGGLQFSTRDEYRYTESLVYPALGNGARSVLVLGGGDGLAARELLRQPGISRIVQVELDPAVIEIARSTLRAANGGSLDNPRVRVLTGDAMAWLRGPNPDRFDAVIVDLPDPDTPVLGRLYSTEFYALAAHALAPGGLLVVQAGSPFSTPTAYWRTVSTIRAAGYAVTPYHVHVPTFGDWGFVLAQRGDTPPAPKVPPDAPPLRFLDQRVLQAAVVFSGDVGPRPLEPSTLDNPRIVGDMRHGYD

SEQ ID NO: 15245 - protein, 95 aa, Physcomitrella patens subsp. patens
MGYDDLLDLYSPCKTRARRGYATHPRSIAERNRRSRISERMKKLQDLVPNMDKQTNTADMLDEAVEYVKHLQTQVKDLSETIVRLKNSIRAQTAS

SEQ ID NO: 15246 - protein, 337 aa, Triticum aestivum
TALWASPCSVLLLTMLFMAVTSAGSAELVAVSSLFTYDIYRTYVNPGASGKQILLVSRAVILAFGCSMGVLAVVLNLVGVSLGWMYLAMGVLVGSAVIPIALLLLWSKANAFGAMLGTISGCVLGVIVWLTVAKVQYGRVNLDTTGRNAPMLAGNLVSILLGGAVHGVCSLVSPQNYDWESSRRITTVESVAAEDDDELQEAKLVHAKRWIVKWGLVFTVVIVVLWPALSVPAGRFSLGYFTLWAAIAIAWGTVGSAVIILMPLVESWDTISMVCAGMLTNDIVYQRLDDVNLRLRAIMGAMPEAEKRYQQLQRKDEVEMHPAGTHPADDSDHLLEN

SEQ ID NO: 15247 - protein, 472 aa, Synechococcus sp. RS9916
MGKTAQDVLNTIKNEGIELIDLKFTDLHGKWQHLTVCTDLLDEDAFTDGLAFDGSSIRGWKAINASDMAMVPDPKSAWIDPFYRHKTLSMICSIMDPRTGEPYERCPRALAQKALNYLSSTGLADTAFFGPEPEFFLFDDVRYESSNGSSSYSVDSIEAPWNTNRVEEGGNLANKIQLKEGYFPVSPNDTSQDIRSEMLLTMGSLGVPIEKQHHEVATAQHELGMKFAELIQAADNVMTYKYVVRNVAKKYGKTATFMPKPIFADNGSGMHVHQSLWKAGAPLFFGEGTYANLSQTARWYIGGILKHAPSFLAFTNPTTNSYKRLVPGFEAPVNLVYSEGNRSAAVRIPLTGPSPKAKRLEFRSGDALANPYLAFSAMMMAGIDGIKNQIDPGDGVDVDLFELPADELAKIATVPASLNGALEALREDHHYLLEGGVFTKDFIDNWIEIKYEEVQQLRQRPHPHEFTMYYDA

SEQ ID NO: 15248 - protein, 181 aa, Brassica napus
MAYSMLSSAAVVTSPAQATMVAPFTGLKSSSAFPVTRKANNDITSIVSNGGRVNSMQVWPPVGKKKFETLSYLPDLTEVELGKEVDYLLRNKWIPCVEFELEHGFVYREHGSTPGYYDGRYWTMWKLPLFGCTDSAQVLKEVQECKTEYPNAFIRIIGFDNNRQVQCISFIAYKPPSFTGA

SEQ ID NO: 15249 - protein, 439 aa, Azotobacter vinelandii
MPYLPRPLSLALVAALALGAPLLRAEEAPAPAAETRGKPLLPLEELRTFAEVMDRIKAAYVEPVDDKTLLENAIKGMISNLDPHSAYLEPEEFLDLQESTSGEFGGLGVEVGMEDDQLKVVAPIDDTPAAKAGIEAGDLIVRIDGQPTKGMSMLEAVDKMRGKPGSKIELTLVREGGRPFDVSLTRAVIKVKSVKSQSLESGYGYLRITQFQVNSGEEVGKALARLKQENGGQKLKGLVLDLRNNPGGVLQSAVEVTDHFLTKGLIVYTKGRIANSELRFSADPADASEGVPMVTLINGGSASAAEIVAGALQDHKRAVLMGTDSFGKGSVQTVLPLNNDRALKLTTALYFTPNGRSIQAQGIVPDIVVERAKLTQDAQQEHLREADLAGHLGNGNGGPDKPSGKAGQEGKARPQDDDYQLSQALNLLKGLNLTRGLQR

SEQ ID NO: 15250 - protein, 1414 aa, Ashbya gossypii ATCC 10895
MSLEALLNKEEKGSGAAREAFMRRMNERFNSVCHKDAREQQYQDWKYLSYQEFELVNEWSAASRELTVNQCGQLLSNVKSAQAEWLAYEEFVAGRARLVAEVEAKREREQEEQEERQPARAKAKERARARGTAKRAVGRKATKAPAAPAEQEGGVPAARAAAKAPVRAEGAAEPPLKRELSGAKLEDEGEGEDDDEEEDEDDEDGEDEDEDEDEEEEEEEELEELEDIQLLDDDNDKDFSPEGGRSKSSIKLNTKLDINSDIALIQRELLKMAQKHKSAKAKKRKFTSCVVQRYDSDHTRLEVKVTLKQLHIKRLKRLLNEAKRKRAAEEALAANEQQGNLAKRRKTAQKQKPAANGAPAASSSEDVTVTEAATPVPAKVNGEAPSNESPVAAIPDINPTTGLPTYGMKMTAKEARAIQRHYDTTYITVWKDMARKDSAKLSRLVQQIQSIRSANFKKTSSLVAREARKWQSRNFRQVKDFQTRARRGVREMSSFWKKNEREERELKKRAEREAIEQAKKEEEERESKRQARKLNFLLTQTELFSHFIGSKIKTNELEGNMADSNLATAPDVSAIDLSKPPTRKNEVHTIDFDNEDDEELHRKAAQNASNALKETREKAKAFDGMSGDDEELNFQNPTSLGEITIEQPKILACTLKEYQLKGLNWLANLYDQGINGILADEMGLGKTVQSISVLAHLAERYNIWGPFIVVTPASTLHNWVNEIQKFVPDFKILPYWGNGNDRKILRRFWDRKHLRYSKDAPFHVMITSYQMIVSDAAYLQKMKWQYMILDEAQAIKSSQSSRWKNLLSFHCRNRLLLTGTPIQNSMQELWALLHFIMPSLFDSHDEFNDWFSKDIESHAQSNTQLNQQQLRRLHMILKPFMLRRIKKNVQSELGDKIEIDVMCDLTHRQAKLYQVLKSQVSASYDAIENAASNSSGDDSGNMSLSDSKIMNTVMEFRKVCNHPDLFERADVSSPFSFTSFGQTGSIMREGDVIDVQYSSKNPVSFHLPRLIYDDLILPNYNHDSDMRTKILNHMMSIFAPANSPDLCATLSKVAGVEPNSILRLSQEHIVKRAIDLSAHSPNVTRSGIFSVVYEDDKSSLSSLDKTLLINDKSDYLHTIARTTQNGVLASLLNIQGNFYENEYMNVLRPAYRPAAAAPPISIHVMGSSNFSIKRDNALFEPYITRSLGIIPPELQTRLTEKENNIFTALPISELYPAPLNKSFSSYISMPSMDRFITESAKLKKLDELLVRLKAGEHRVLIYFQMTRMMDLIEEYLTYRQYKHIRLDGSSKLEDRRDLVHDWQTKSDIFIFLLSTRAGGLGINLTSADTVIFYDSDWNPTIDSQAMDRAHRLGQTKQVTVYRLLIKGTIEERMRDRAKQKEHVQQVVMEGKTKENNVQTITANGKTLENLPLPL

SEQ ID NO: 15251 - protein, 811 aa, Oryza sativa Japonica Group
MSEVRSVPGMKVEASPAAAAAATVDSPTSVLEDDEKISECKNGDVLDTTEAIKQEEDHLDVLIEEKVDGFVDASSSLNVEPAANNSDLSPLTVPVKEEGQLLEPVKEEKADDFVDAVPSLPIDLEAKNGDASLITDAMKEEEEKLHDARVKAEEEEVARKREEAARLAFDPNARFNKLDELLSQTQLYSEFLLEKMETIADVEGVQTHAEEEPVEEKKNGRGRKRKATSAPKYNDKKAKKAVAVMLTRSHEDCSPEDCTLTEEERWEKEQARLVPLMTGGKLKSYQIKGVKWLISLWQNGLNGILADQMGLGKTIQTIGFLAHLKGKGLDGPYLIIAPLSTLSNWVNEISRFVPSMTGLIYHGDKAARAEIRRKFMPKTTGPDFPLIVTSYEMAMSDAKHLAHYKWKYVIVDEGHRLKNSKCLLLRELKRLPMDNKLLLTGTPLQNNLAELWSLLNFILPDIFSSHQEFESWFDFSAKGGEEEQEDSEEKRKVDVVSKLHAILRPFLLRRMKEDVEHMLPRKKEIIIYANMTDHQKQIQNHLVEQTFDQYLHEKSEIGLYPPVEKLLEQCGKFQLLNRLLSLLLARKHKVLIFSQWTKVLDIIEYYLETKGLQVCRIDGSVKLEERRRQIAEFNDLNSSMNIFILSTRAGGLGINLTSADTCILYDSDWNPQMDLQAMDRCHRIGQTRPVHVYRLATSHSVEGRIIKKAFGKLRLEHVVIGKGQFEQDRAKPNALDEAELLALLRDEQGDEDRMIQTDISDEDLLKVMDRSDLTGPPANADAAPLVPLKGPGWEVVVPTKSGGGMLTSLTS

SEQ ID NO: 15252 - protein, 860 aa, Arabidopsis thaliana
  misc_feature (595)..(595): Xaa can be any naturally occurring amino acid
MEEEDEEILSSSDCDDSSDSYKDDSQDSEGENDNPECEDLAVVSLSSDADRKSKNVKDLLSNVTTIMVHSVLVKFLRPHQREGVQFMFDCVSGLHGSANINGCILADDMGLGKTLQSITLLYTLLCQGFDGTPMVKKAIIVTPTSLVSNWEAEIKKWVGDRIQLIALCESTRDDVLSGIDSFTRPRSALQVLIISYETFRMHSSKFCQSESCDLLICDEAHRLKNDQTLTNRALASLTCKRRVLLSGTPMQNDLEEFFAMVNFTNPGSLGDAAHFRHYYEAPIICGREPTATEEEKNLAADRSAELSSKVNQFILRRTNALLSNHLPPKIIEVVCCKMTTLQSTLYNHFISSKNLKRALADNAKQTKVLAYITALKKLCNHPKLIYDTIKSGNPGTVGFENCLEFFPAEMFSGRSGAWTGGDGAWVELSGKMHVLSRLLANLRRKTDDRIVLVSNYTQTLDLFAQLCRERRYPFLRLDGSTTISKRQKLVNRLNDPTKDEFAFLLSSKAGGCGLNLIGANRLVLFDPDWNPANDKQAAARVWRDGQKKRVYVYRFLSTGTIEEKVYQRQMSKEGLQKVIQHEQTDNSTRQVLAGXGNLLSTEDLRDLFSFHGDVRYVFLLKSGNVLCPLRTSFLYPLLGTDFVPQDDTHSNGLSQSLFSGNVARSEIHEKMSCSRCQNDASGTENIEEGNENNVDDNACQIDQEDIGGFAKDAGCFNLLKNSERQVGTPLEEDLGSWGHHFTSKSVPDAILQASAGDEVTFVFTNQVDGKLVPIESNVSPKTVESEEHNRNQPVNKRAFNKPQQRPREPLQPLSLNETTKRVKLSTYKRLHGNSNIDDAQIKMSLQRPNLVSVNHDDDFV

SEQ ID NO: 15253 - protein, 574 aa, Oryza sativa Japonica Group; identical to SEQ ID NO: 12188

SEQ ID NO: 15254 - protein, 590 aa, Oryza sativa Japonica Group
MEASAMEEALSKKTTSKGGLRTIPFIISNEVFEKVATFGLHANMILYLTERYHMTAATGTVVLYFWNALSNFLPIFGAVLSDSCLGRFRVIALGSVVSLAGMCLLWLTAILPADRRTPECEARRDDCQLVPWQLPLLFASFVLMSVGSGGIRPCALAFGADQLDRRDNSARNVRTLQTFFNWYYTVLGLSIVLASTVIVYIQQAKGWVIGFAVPVVLMLTALTLLLLGSPFYLKAEADRSVLVGLVQVLVASYRKRRGPLPPETADASRFHNRAGYKPRTPSNRLRWLNRACALGDNPDKEVNPDDGSARDPWTLCTVQQVEDVKAAVRVLPIWSTGFMPGVIIGQQMFPVLQAKTMERRVGGLEIPAASFGVFSILTLTVWVAVYDRALVRPLSRLTGHARGVTLRQRMGIGLALFAVAMAVAARTEAARRAEALAEGLRDYGPQSGRAVRMSAMRLVPQHCITGLAEALNLIGQIEFYYSEFPKTMSSIGVSLLALGMGFGSVAGSAIVGAINAGTRSGGGRDSWLSSNLNRGHYDYYYLVLAALCVANLAYFVWCGWAYGEEGQNRVTAEEEAVEDTKTKEEQQQKL

SEQ ID NO: 15255 - protein, 532 aa, Coxiella burnetii RSA 493
MTAFEIIPFILFLVVIGTAIAERINVPYPLVLVVTGLIVGFIPGIPNWHPPSDLVLPLFLPPILFAAARLISWEDIQNNKSEISSLSILLVIASTIVIGVILAWIVPGMPLSASLVLGAIISPTDAIASTSILNRMRIPKHIIRSLEVESLFNDAVSIVLYNMGLMFVFMGAINLLHAGESMLIVGLGGIAVGLMFSYFTSLIVKEFLTESENELPIIMSVILAYVSYLFADRIGVSGVLAVVAAGLFHKRTEKTIKARTRLSEKSVWDTLIFFLNGLIFIVIGMQFPNFLGKVNYLPIGQLILFSTITVLSLILLRFIWVLATNLLVNSLSRLRKHPTKRYVFSWREVLISSWSGMRGLVSLALALALPIMLPDTTPFPYRDLIIFLTIIAILFTLLVQGLTLPYLVKLLKSEKSDAAFIKESSKIYRRLTKEAIQHIDQLDAGEHICSENAKKLVNNYYANRLLQFKVTYETECDTHEVGHEAEALLSKILNYERNRLHEMRSHGEVSEEVYIRILSKIDRDEVGFASYK

SEQ ID NO: 15256 - protein, 159 aa, Yersinia mollaretii
VLMPDASTAVMDPFFEDATLIIRCDILEPGTLQGYDRDPRSISKRAEEFLKSSGIADTVLFGPEPEFFLFDDVRFGSSIRGSHVAIDDIEGAWNSSTKYEGGNKGHRPAVKGGYFPVPPVDSSQDLRSTMCLTMEEMGLVVEAHHHEVATAGQNEVATR

SEQ ID NO: 15257 - protein, 181 aa, Zea mays
MASSMLSSATVVSSPAQAAMVAPFTGLKSSAAFPVTRKTDTDITSMASNGGRVNCMKVWPPVGKKKFETLSYLPDLTDVELSKEVDYLLRNKWIPCVEFELEHGFVYREHGNTPGYYDGRYWTMWKLPLFGCTDSAQVLKEVQECKKEYPNAFIRIIGFDNNRQVQCISFIAYKPPSFTGA

SEQ ID NO: 15258 - protein, 485 aa, Fusobacterium nucleatum subsp. nucleatum ATCC 25586
MNIFSGIEYKVLKDVNLDRKYDGIEYDSRKIKENYIFVAFEGANVDGHNYIDSAVKNGATCIIVSKKVEMKHNVSYILIDDIRHKLGYIASNFYEWPQRKLKIIGVTGTNGKTSSTYMIEKLMGDIPITRIGTIEYKIGDKVFEAVNTTPESLDLIKIFDKTLKKKIEYVIMEVSSHSLEIGRVEVLDFDYALFTNLTQDHLDYHLTMENYFQAKRKLFLKLKDINNSVINVDDEYGKRLYDEFIVDNPEIISYGIENGDLEGDYSDDGYIDVKYKNQIEKVKFSLLGDFNLYNTLGAIGIALKIGISMEEILKRVSNIKAAPGRFEALDCGQDYKVIVDYAHTPDALVNVIVAARNIKNGSRIITIFGCGGDRDRTKRPIMAKVAEDLSDVVILTSDNPRTESPEQIFDDVKKGFIKSDDYFFEPDREKAIKLAINMAEKNDIILITGKGHETYHIIGTKKWHFDDKEIARREIVRRKMVENVN

SEQ ID NO: 15259 - protein, 433 aa, Neptuniibacter caesariensis
MKSVFQSGMWKNIALGVALSSALSVPVMAEESQTEEATPSVKSLPLDELRLFTEVFQRIKSAYVEPVDDAVLLEDALRGMIAGLDPHSAYLEPSEFENLQAHTSGEFGGLGIEVGLEDGFVRVITPIDDTPAQRAGVKAGDLITKLDEHPVQGMGLNEAVELMRGKPGSKIILTIVREGEEKPLEIEVVRDVIQVASVKSRMLDENYGYLRVSQFQVDSGKEVNKHLKRLLENDLRGVVLDLRNNPGGVLQAAVDISDAFINEGLIVYTKGRLQESEQRFSATNTTLVPDLPMVVLINGGSASASEIVAGALQDQKRAIIMGQESFGKGSVQTVLPLTKERALKLTTARYYTPNGRSIQAQGIKPDIEVRDAEITLRDDGQEFLKEKDLSGHLDNGAGKTKSSSDRKSNLAERDYQLYEALNLLKALVIVKKG

SEQ ID NO: 15260 - protein, 122 aa, Yersinia mollaretii
WKGINESDMVLMPDASTAVMDPFFEDATLIIRCDILEPGTLQGYDRDPRSISKRAEEFLKSSGIADTVLFGPEPEFFLFDDVRFGSSIRGSHVAIDDIEGAWNSSTKYEGGNKGHRPAVKGG

SEQ ID NO: 15261 - protein, 84 aa, Triticum aestivum
  misc_feature (80)..(80): Xaa can be any naturally occurring amino acid
MAASSLWDELVVAASTGGSSGTVVSICVFTAVLCLCLVAGHLLEENKWVNESITALIIGCIVGALIFLLSKGRNSHILRXDEQL

SEQ ID NO: 15262 - protein, 520 aa, Arabidopsis thaliana; identical to SEQ ID NO: 10828

SEQ ID NO: 15263 - protein, 199 aa, Yersinia mollaretii
SSIGGWKGINESDMVLMPDASTAVMDPFFEDATLIIRCDILEPGTLQGYDRDPRSISKRAEEFLKSSGIADTVLFGPEPEFFLFDDVRFGSSIRGSHVAIDDIEGAWNSSTKYEGGNKGHRPAVKGGYFPVPPVDSSQDLRSTMCLTMEEMGLVVEAHHHEVATAGQNEVATRFNTMTKKADEIQIYKYVVHNVAHAFG

SEQ ID NO: 15264 - protein, 245 aa, Corynocarpus laevigata; identical to SEQ ID NO: 8374

SEQ ID NO: 15265 - protein, 208 aa, Ralstonia metallidurans CH34
MSRQRTLESVQRTALAGALTLAAAVAVMLPPPAHAAEKAVPAAAQPAGNCPASLNFRFPRLQDESPQNLCQYAGKVVLVVNTASYCGFTPQYEGLEALYAKYRERGLVVLGFPSNDFSQEPGSSKDIADFCYNTYGVKFPMLGKSHVRGSDANPMYALLAQETGTAPKWNFYKYLIDRKGQVIGSYNSMVKPDDKQFVSKIEELLNAR

SEQ ID NO: 15266 - protein, 160 aa, Yersinia mollaretii
LMPDASTAVMDPFFEDATLIIRCDILEPGTLQGYDRDPRSISKRAEEFLKSSGIADTVLFGPEPEFFLFDDVRFGSSIRGSHVAIDDIEGAWNSSTKYEGGNKGHRPAVKGGYFPVPPVDSSQDLRSTMCLTMEEMGLVVEAHHHEVATAGQNEVATRFT

SEQ ID NO: 15267 - protein, 374 aa, Crossosoma bigelovii; identical to SEQ ID NO: 8375

SEQ ID NO: 15268 - protein, 199 aa, Yersinia rohdei
SSIGGWKGINESDMVLMPDASTAVMDPFFEDSTLIIRCDILEPGTMQGYDRDPRSISKRAEDFLRSSGIADTVLFGPEPEFFLFDDVRFGSSIRGSHVSIDDIEGAWNSSTKYDGGNKGHRPAVKGGYFPVPPVDSSQDLRSTMCLTMEEMGLVVEAHHHEVATAGQNEVATRFNTMTKKADEIQIYKYVVHNVAHAFG

SEQ ID NO: 15269 - protein, 245 aa, Eucryphia billardieri; identical to SEQ ID NO: 8377

SEQ ID NO: 15270 - protein, 683 aa, Pasteurella multocida subsp. multocida str. Pm70
MKLSKTKSYLATFLLSTFLMSFNLVEAVQPKIKLSDIVTPQPTEENQLATKRATTRLTQSHYRKFQLNDAFSEKIFERYLKSLDFSRNTFLQSDIDEMRAKYADKFDDALNEGDLSIAFAMYDLMMKRRYDRYKYALSLLDKEPDLSGQDQIEIDREKSPWPKDNAELDKLWEQRVKNDIINQKLKDKKWSDIKKRLIKRYDLAIRRLTQTKADDILQVYLNAFAREVDPHTSYLAPRTAKSFNESMNLSLEGIGATLQQTEDDGTTIKSLVPGAPAERSKKLKAGDRIIGVGQASGEIEDVVGWRLEDIVDKIKGKKGTKVRLEIEPAKGGKSKIITLVRDKVRIEDQAAKLTISKVEGQIVASIKIPSFYIGLTQDVRKLLAEMKTKKAKALIIDLRDNGGGALTEAVGLSGLFISDGPIVQVRDAFQRIRVHEDPDSEQVYSGPLLVMINRFSASASEIFAAAMQDYNRGIIIGQNTFGKGTVQQSRSLNFAFDANQEPLGLIQYTIQKFYRIDGGSTQLKGVATDIDFPAAIDAKEYGEEREDNALPWDKIPAANYFEVAQARDAVAFLTPKHIERIAKDPEFVALNEELKIRDERNALKYLSLNYQKRKIENDKDDARRLKDLNARFKREGKKPLKDLDDLAKDYEAPDFYLKEAERMAADLVQFETEKMGMNQKSTN

SEQ ID NO: 15271 - protein, 103 aa, Salmonella enterica
FGDNGSGMHCHMSLAKNGTNLFSGDKYAGLSEQALYYIGGVIKHAKAINALANPTTNSYKRLVPGYEAPVMLAYSARNRSCLHPYSGGGVSESAPYRSSLPGP

SEQ ID NO: 15272 - protein, 636 aa, Muriella zofingiensis
MSSPAIGIDLGTTYSCVGLWQHDRVEIIANEQGNRTTPSYVAFTDTERLIGDAAKNQVAMNPINTVFDAKRLIGRKFSDPTIQHDISHWPFKVVAGPGDKPMIQVNYKGEDKTFAPEEISSMVLVKMKEIAQAYVGADKEVKKAVVTVPAYFNDSQRQATKDAGVIAGLEVMRIINEPTAAAIAYGLDKKGTTSGEQNVLIFDLGGGTFDVSLLTIEEGIFEVKSTAGDTHLGGEDFDNRLVNFFVQEFKRKYKKDISSNPRALRRLRTSCERSKRTLSSSTQASIEIDSAVRGHRLLLLPSPVPRFEELNMDLFRKCMEPVEKVLRHAKMDKGQVNEVVLVGGSTRIPKVQQLLQDFFNGKELCKSINPDEAVAYGAAVQAAILNGETHEKVQDLLLLDVIPLSLGLETAGGVMTTLISRNTTIPTKKEQVFSTYSDNQPGVLIQVYEGERSRTKDNNLLGNFELTGIPPAPRGVPQINVTFDVDANGILNVSCGGQDHLATRTRSLITNDKGRLSKDEIERMVQEAKKYKGEDNLRGTGGGRKGLKNYGTGWATPLRTPTWQDKLRAEDKEKMEKGVDKVVSGSTTTSWLRRRRSRIKGTELEGVCNPIITKLYQGGAVPSAAGGQGPTIEEVD

SEQ ID NO: 15273 - protein, 508 aa, Xanthomonas axonopodis pv. citri str. 306
MRVAVLSVALSLALFASPGWAQKAGPAAAQASADDPEANEAAVSKVPLDEIRRFVAVYNAVKQAYVDPVEDKKLMHAAVRGLLSDLDPHSTYFDKEDAEAFDEQATGAYDGIGVELLQQQDNTLKVIAPIDDTPAARAGIRAGDVIVAIDGKPIDASKAMEPLRGESGSKVVLTIMRDKMPKPFDVTLQRETIRVASVRSKLLEPGFGYIRISTFQADTGADFQKNLKQLQAGGKLRGLVLDLRSNPGGLLTSAVQVADDLLDKGNIVSTRGRISISDAKFDATPGDLLNGAPVVVLVDAGSASASEVLAGALRDNKRARIIGSRTFGKGSVQTVLPLDNGDSVKLTTARYYTPSGKSIQASGIVPDVLLTPEPQPGDADVPASLTDYSEATLPGHLRGDDEGEEGYSAGDVLPGDGPITEALAELKQPGAAAKAQAARKAKAQAAQKAKAANKTGAEPKPAAARPATTDKPRSAEPAGKAKPATTPPAPAEPVQPTTPTDKPAEPVN

SEQ ID NO: 15274 - protein, 212 aa, Escherichia albertii
RGFIGKLLADAGIQLTFADVNQVVLDALNARHSYQVHVVGETEQVDTVSGVNAVSSIGDDVVDLIAQVDLVTTAVGPVVLERIAPAIAKGLVKRKEQGNESPLNIIACENMVRGTTQLKGHVMNALPEDAKAWVEAHVGFVDSAVDRIVPPSASATNDPLEVTVETFSEWIVDKTQFKGALPNIPGMELTDNLMAFVERKLFTLNTGHAITA

SEQ ID NO: 15275 - protein, 382 aa, Mannheimia succiniciproducens MBEL55E
MKALHFGAGNIGRGFIGKLLADSGMQVIFADVNDSVIDLLKSRRSYGVKIVGDSINTVERVTQVTGVNSKDETAIITLFNEVDLVTTAVGPNVLKIVASTFAKALEARIAGGNTKPLNIIACENMVRGTSFLKEQVFTHLNPDYKDKVEQLIGFVDSAVDRIVPPVKPDAEDPLLVTVEEFSEWIVDQTQFKGAIPDIKGMELTDNLMAFVERKLFTLNTGHAVTSYYGKFKGYKFVKESIEDESVKAFVKSVMQESGAVLIKRYGFDPQAHAAYIEKILKRFANPYLVDDVDRVGREPLRKLSYNDRLIKPLRGTIEYGLPNDNLIRAIATALSYRNENDPQALELAKSLAEAGVTQTIKKYTELQDENVIARIAKAYETL

SEQ ID NO: 15276 - protein, 245 aa, Eucryphia billardieri; identical to SEQ ID NO: 8381

SEQ ID NO: 15277 - protein, 436 aa, Prochlorococcus marinus str. NATL2A
MLSSVKSLTKPLQRLFAVLISFGILFQVFTQPAFALNDGQLLVIEAWNQVNAGYLDPKKFDEIQWKKLRQKALEKPINNSQQAYSAIEAMLLPLGDPYTRLLRPVDYEAMKKSNIGSEINGVGLQLGARKEDGDIVVISPLEGSPASDAGITSGTIIKKVNGQSPKQLGLEATAAKLRGQTGTQVIVELEQPDNEIKEISLERRSVDLRPVRTKRIRNESHTFGYLRITQFSEGVPEQVKEALEELSGKDIDGLILDLRNNSGGLVSSGLAVADDFLSDMPIVETKKRDSINDPISSGLETIYDGPMVTLVNEGTASASEILAGALQDNKRSELIGNKTFGKGLIQSLTNLSDGSGLAVTVASYLTPSGRDIQNLGIDPDRLLEMPEPLNPGSDEDRWLLDAELIMQATLDKEEVSEKLSKETLVKEEQLISQEIE

SEQ ID NO: 15278 - protein, 109 aa, Zea mays; identical to SEQ ID NO: 13118

SEQ ID NO: 15279 - protein, 134 aa, Salmonella enterica
RPLCQNRCSAITVPVCTATCRWRKTAPTCVSGDKYAGLFEQALYYIGGVIKHAKAINALANPTTNSYKRLVPGYEAPVMLAYSARNRSASIRIPVVASPKARRIKVRFPDPAANPYLCFAALLMAGLDGIKNKI

SEQ ID NO: 15280 - protein, 245 aa, Aleurites moluccana; identical to SEQ ID NO: 8382

SEQ ID NO: 15281 - protein, 154 aa, Lupinus luteus
MGVLTDVQVALVKSSFEEFNANIPKNTHRFFTLVLEIAPGAKDLFSFLKGSSEVPQNNPDLQAHAGKVFKLTYEAAIQLQVNGAVASDATLKSLGSVHVSKGVVDAHFPVVKEAILKTIKEVVGDKWSEELNTAWTIAYDELAIIIKKEMKDAA

SEQ ID NO: 15282 - protein, 1168 aa, Arabidopsis thaliana; identical to SEQ ID NO: 8385

SEQ ID NO: 15283 - protein, 147 aa, Medicago sativa
MSFTDKQEALVNSSWEAFKQNLPRYSVFFYTVVLEKAPAAKGLFSFLKNSAEVQDSPQLQAHAEKVFGLVRDSAVQLRATGGVVLGDATLGAIHVRKGVVDPHFVVVKEALLKTIKEAAGDKWSEELNTAWEVAYDALATAIKKAMS

SEQ ID NO: 15284 - protein, 147 aa, Medicago truncatula
MSFTDKQEALVNSSYEAFKQNLSGYSVFFYTVILEKAPAAKGLFSFLKDSAGVQDSPQLQAHAEKVFGLVRDSASQLRATGGVVLGDAALGAIHIQKGVVDPHFVVVKEALLKTIKEAAGDKWSEELSTAWEVAYDALATEIKKAMS

SEQ ID NO: 15285 - protein, 473 aa, Prochlorococcus marinus str. NATL1A
MSKTSQDVLRQIKDEGIELIDLKFTDLHGKWQHLTVASDLIEESSFTEGLAFDGSSIRGWKAINESDMAMVPDPSTSWIDPFYHHKTLSLICSIQEPRSGEPYARCPRALAQKALDYLGSTSVADAAFFGPEPEFFIFDDVRYNSGEGSSFYSVDTIEAPWNSGRVEEGGNLGYKIQLKEGYFPVSPNDTAQDMRSEMLLLMGELGIPIEKHHHEVAGAGQHELGMKFAPLINAADNVMIYKYIVRNVAKKYGKTATFMPKPVFNDNGTGMHVHQSLWKGGQPLFYGEGTYANLSQTAKWYIGGILKHAPSFLAFTNPTTNSYKRLVPGFEAPVNLVYSQGNRSAAVRIPLTGPSPKAKRLEFRSGDALANPYIAFSAMMMAGIDGIKNQIDPGDGVDVDLFELPSEELSKIDTVPSSLNDALEALKNDSKYLTEGGVFTEDFINNWIELKYEEVQQLRQRPHPHEFTMYYDA

SEQ ID NO: 15286 - protein, 1168 aa, Arabidopsis thaliana; identical to SEQ ID NO: 8386

SEQ ID NO: 15287 - protein, 502 aa, Vibrio vulnificus CMCP6
MAERGSENKMRNTMNLTNLLAPWLDCPELADITVQSLELDSRQVKQGDTFVAIVGHVVDGRQYIEKAIEQGANAVIAQSCQQYPSGLVRYQQNVVIVYLEKLDEKLSQLAGRLYQHPEMSLIGVTGTNGKTTITQLIAQWLELAGQKAAVMGTTGNGFLNALQPAANTTGNAVEIQKTLADLQQQGAKATALEVSSHGLVQGRVKALQFAAGVFTNLSRDHLDYHGTMEAYAKAKMTLFTEHQCQHAIINLDDEVGAQWFQELQQGVGVSLFPQDASVKALWASSVAYAESGITIEFDGCFGQGRLHAPLIGEFNATNLLLALATLLALGVDKQALLDSAASLRPVLGRMELFQVNSKAKVVVDYAHTPDALEKALQALRVHCTGHLWAIFGCGGDRDKGKRPMMAEIAERLADHVVLTDDNPRSEDPTMIVQDMLAGLTRADSAVVEHDRFSALQYALDNAQADDIILLAGKGHEDYQVLKHQTVHYSDRESAQQLLGISS

SEQ ID NO: 15288 - protein, 453 aa, Thermobifida fusca YX
MNRQQEFVLRTLEERDIRFVRLWFTDVLGYLKSVAVAPAELEAAFTEGIGFDGSAIEGFARVYESDMLAQPDPTTFQVLPWRNEPHGAARMFCNILLPDGSPSYADPRNVLKRQLSRASDLGFTFYTHPEIEFYLLKKKPERGELPEPSDEGGYFDHTPHSLARDFRRNAIMMLEEMGISVEFSHHEGGPGQQEIDLRYADALTTADNIMTFRMVMKEVAIEQGVYATFMPKPFTEHPGSGMHTHMSLFEGDRNAFYEAGAEYQLSKIGRGFIAGLLRHAAEITAVCNQFVNSYKRLWGNAAASAGAGGEAPAYICWGHNNRSALVRVPMYKPRKSNSARIEFRALDSACNPYLAFTVILAAGLKGIEEGYELPPGASDDVWALTDAERRALGIMPLPQSLDEALRVMERSELVAEALGEHVFDFFLRNKKAEWEDYRRQVTPYELERYLPTL

SEQ ID NO: 15289 - protein, 184 aa, Physcomitrella patens subsp. patens
MASSIGAAPVSVAPETAHGAEKVYSKESVALVKQSWELLKVDAQANAVAFFKEVFEIAPAAKGFFSFMQDTSIPFEDNPKVKFHALQVFKLTGDAAAQLGEKGAYELLQSRLHSLAAKHLSKGVQDAHFEVVKEALLRTIAAGLPDLWSPALKQAWADAYDALATTLKNEMHAQAAAAAAKSHT

SEQ ID NO: 15290 - protein, 632 aa, Vibrio fischeri ES114
MGKIIGIDLGTTNSCVAVLDGDTPRILENAEGERTTASVIAYTDGETLVGQPAKRQAITNPQNTLFAIKRLIGRRFEDEEVQRDIEIMPYKIIKADNGDAWVEAKGQKMAAPQVSAEILKKMKKTAEDFLGEEVTGAVVTVPAYFNDAQRQATKDAGRIAGLDVKRIINEPTAAALAYGLDKKGGDRTIAVYDLGGGTFDISIIEIDNVDGEQTFEVLATNGDTHLGGEDFDNRLINFLVDEFKKEQGFDLKNDPLAMQRVKEAAEKAKIELSSAQQTDVNLPYVTADATGPKHMNIKVTRAKLESLVEDLVVRTLEPLKVALADADLTIDGITDVILVGGQTRMPMVQAKVAEFFGKEARRDVNPDEAVAMGAAVQGGVLAGDVKDVLLLDVTPLSFGIETMGGVMTKLIEKNTTIPTKADQTFSTAEDNQSAVTIHVLQGERKQASYNKSLGQFNLEGIQAAPRGMPQIEVTFDLDADGILNVSAKDKSTGKEQKITIQASGGLTDEEIEAMVQEAEANKDADKKFEELVTARNQADQMIHGTKKQIEEAGDDLPTDEKEKIEAAITALEGVKSGDDKEAIDAKTQELMQAAQKLMEIAQQKAQAQQGAQAGEQPKQEDDVVDAEFEEVK

SEQ ID NO: 15291 - protein, 146 aa, Medicago truncatula
MGFTEKQEALVNSSWELFKQNPGNSVLFYTIILEKAPAAKGMFSFLKDTAGVQDSPKLQSHAEKVFGMVRDSAVQLRATGGVVLGDATLGAIHIQKGVVDPHFVVVKEALLKTIKEVSGDKWSEELSTAWEVAYDALAAAIKKAMG

SEQ ID NO: 15292 - protein, 488 aa, Ustilago maydis 521
MIFTSASEPVRELPDDLDVYGCMYEYFPPSRPDLRNTGLPLLIDEETSQQFTFEQAKETTDHLSVALYEKCGIRPDTRASIYATNSVYFPMAVWAMHRLGATISPANPAFLAKELTFQLEASDSKLLFVSEDEVSLENGFAAAKQANIPRDRVVIIQEPATVLKYTESNYGRIQRKSHGAWTLAGLIEEGREAVKAKGHTILDSTRYKLKSGEGKTKIAFLSFSSGTTGLPKGVAIQHYAVTSNALQTMAHNKVGNTIGARGRFCPGKDVSLGVLPQSHIYGLSTVTHFPFFAGIANLVLRKFRGIEAMIQTIIKYKISLWWVVPPQVVLLCKDPCVGKYLDDLRKVGRFAMVGAAPLSDELSRQFTKRFPDLDWGQGSGMTETCSVTTMFPVGERAVMGSAGRLISNTEAKVVDSNGNELGYDELGELWLRGPQITLGYTNNEQATKDTYLPDGWLRSGDEVKISRQGDVFFIDRLKELIKMSRIAA

SEQ ID NO: 15293 - protein, 213 aa, Pinus krempfii
QAKAAGARIIVTQAAYVEKLADLQSHDVLVITIDDAPKEGCKHISVLTEADETQCPVVKIHPDDVVALPYSSGTTGLPKGVMLTHKGLVSSVAQQVDGENPNLYFHSEDVILCVLPLFHIYSLNSVLLCALRAGAATLIMQKFNLTTCLELIQKYKVTVAPIVPPIVLDITKSPIVSQYDVSSVRIIMSGAAPLGKELEDALRERFPKAIFGQ

SEQ ID NO: 15294 - protein, 190 aa, Glycine max
RGHERHEFPLRRDKGSLSENNVRGRIMLEKNGKTTNSFPGDVTTERIAALQEAYWSMASALSEADGIDYTDPEELELLVRTLIDLDAMDGKQSVSLLAECSSSPDVSTRRALANALAAAPSMWTLGNAGMGALQRLAEDSNPAIATAASKAIYELKKQWEIEEGDSWRFMMDENTMEEKGSIESDNEDTK

SEQ ID NO: 15295 - protein, 614 aa, Alkaliphilus metalliredigens QYMF
MGKVIGIDLGTTNSCVAVLEGGEPVVIPNSEGNRTTPSVVAFGKDGERIVGEPAKRQAVVNPEKTIISIKTHMGSDHKVAIDDKNYTPEDISAMILQKIKADAEAYLGEAVTDAVITVPAYFTDSQRQATKDAGKIAGLNVRRIINEPTAASLAYGLDKTDEHQKILVYDLGGGTFDVSILELGDGVFEVLATNGNNNLGGDDFDQALMDYIAEAFKKQEGIDLRKDKMSLQRLKEASEKAKQELSSTMTSSINLPFITATNEGPKHLNMDITRSKFDEITSHLVEKTMGPMRSALKDAGLSASDINKIILVGGSTRIPAVQQAVKKITNQDPHKGVNPDECVAVGAAIQAGVLTGEVKDVLLLDVTPLSLGIETLGGVFTRLIERNTTIPSKKSQTFSTAADNQPAVDIHVLQGEREMAAGNVSLGRFELSGIPPAHRGIPQIEVTFDIDANGIVNVSAKDLGTGKEQKITITASTKLSDEEIEKKIKEAEEHAEEDKMQKEKIEVRNQADSLVYQIEKTLKESEGKIDKEEEGKVTAELEKLKKAVESDIVEDMKKAIEDVNTVFHAISQKLYEQAAQAQEAEGQEQAGDDNIVDAEYEEVKDEETQGEDEK

SEQ ID NO: 15296 - protein, 197 aa, Yersinia rohdei
SSIGGWKGINESDMVLMPDASTAVMDPFFEDSTLIIRCDILEPGTMQGYDRDPRSISKRAEDFLRSSGIADTVLFGPEPEFFLFDDVRFGSSIRGSHVSIDDIEGAWNSSTKYDGGNKGHRPAVKGGYFPVPPVDSSQDLRSTMCLTMEEMGLVVEAHHHEVATAGQNEVATRFNTMTKKADEIQIYKYVVHNVAHA

SEQ ID NO: 15297 - protein, 721 aa, Oryza sativa; identical to SEQ ID NO: 12175

SEQ ID NO: 15298 - protein, 1130 aa, Solanum tuberosum; identical to SEQ ID NO: 8401

SEQ ID NO: 15299 - protein, 245 aa, Aleurites moluccana; identical to SEQ ID NO: 8400

SEQ ID NO: 15300 - protein, 134 aa, Zea mays
  misc_feature (65)..(65): Xaa can be any naturally occurring amino acid
MVRALDRYSSGKDVAYSCGYCGFALNLSSSTRNTANIGSKYGKHIRKGVVSFFAIDESRFTQADXPFVGFFRNRTRLLCRKCGGHTGHAYEDEGPADDLDMSSRGSSTSPRKKYVIKISALRPSSDDSGALLSP

SEQ ID NO: 15301 - protein, 386 aa, Thermoanaerobacter tengcongensis MB4
MLKALHFGAGNIGRGFIGYLLNKSGYEVTFVDISKEIVDNINKYKKYNVIILKEPVEKEEVKEVKALHLEEEDKVLDAFLEADMVTTSVGVSNLSSIGGRLKKYLKARKEKNEKPLDIMACENALFATDVLRERVVKEEDDDFITYLNLKVGFPNTAVDRIVPAVKIDKKLPVDVAVEEFFEWDIEKNKIKGNLQIEGVELVDDLKPYIERKLFLLNGAHATTAYLGYLRGYTYIHQAIKDDNIRAIVKGMQEEISTALSKKYDVDKESLMAYAEKVIKRFENPYLQDEVTRVGREPLRKLSSEDRLIAPLKLCSEVGITPNFILYGIAAGLLFDYKEDAQAVKMREYVEQFGIKKAVNVITGLEEESDLVEEIEKRYFELKGKLI

SEQ ID NO: 15302 - protein, 444 aa, Rubrobacter xylanophilus DSM 9941
MIEQRRPAVLPPELSDGSVTSVRVLYADLHGVARGKDVPIGEFERAVEHGLAFCSAIMGTDLRHTPVVGGEEGYPDLVAYPDLSTMTLVPWEPGVACCLADLRPVGDHAPPADPRGAVRRAVAAFEELGLSPVVGPELEFFLCERDPAGGVRRYVDNLSMVYTVGPQADPRGIVREIAEMLSGMGLGAFAANHEFMNSQYEINLHHADALAAADRAFRLKCAVKDVAAMRGLVATFMGKPFNDQGGSGFHIHFSLERGGENAFAGGEEGGVTGLLRHFVAGVLEHASGLMAFLNPTINAYRRLVPDSLAPTHANWGWDNRTAFVRIPPERGGATRVEVRVGDGSANPYLATAATLFAGLHGVRERLPLGPPVGGDAYALAGEKAGPPLPATLEEALDALEADEVLRGAMGEQIVGTFLALKRYEAERHRTWVSDWEISEYLHHL

SEQ ID NO: 15303 - protein, 165 aa, Yersinia rohdei
NESDMVLMPDASTAVMDPFFEDSTLIIRCDILEPGTMQGYDRDPRSISKRAEDFLRSSGIADTVLFGPEPEFFLFDDVRFGSSIRGSHVSIDDIEGAWNSSTKYDGGNKGHRPAVKGGYFPVPPVDSSQDLRSTMCLTMEEMGLVVEAHHHEVATAGQNEVATRF

SEQ ID NO: 15304 - protein, 245 aa, Goupia glabra; identical to SEQ ID NO: 8402

SEQ ID NO: 15305 - protein, 245 aa, Goupia glabra; identical to SEQ ID NO: 8404

SEQ ID NO: 15306 - protein, 207 aa, Escherichia albertii
LLADAGIQLTFADVNQVVLDALNARHSYQVHVVGETEQVDTVSGVNAVSSIGDDVVDLIAQVDLVTTAVGPVVLERIAPAIAKGLVKRKEQGNESPLNIIACENMVRGTTQLKGHVMNALPEDAKAWVEAHVGFVDSAVDRIVPPSASATNDPLEVTVETFSEWIVDKTQFKGALPNIPGMELTDNLMAFVERKLFTLNTGHAITAY

SEQ ID NO: 15307 - protein, 563 aa, Salmonella enterica subsp. arizonae serovar 62:z4,z23:--
MMPLSIIKNIANRERMEIFFTILIMTLVVSLSGVFTRVLPFQLPLPLMQIAAGALLAWPTFGLHVEFDPELFLVLFIPPLLFADGWKTPTREFLEHGREIFGLALALVLVTVVGIGFLIYWLVPGIPLIPAFALAAVLSPTDAVALSGIVGEGRIPKKIMGILQGEALMNDASGLVSLKFAVAVAMGTMVFTVGGATLEFFKVAIGGILAGFVVSWLYGRSLRFLSRWGGDEPATQIVLLFLLPFASYLIAEHVGLSGILAAVAAGMTITRSGVMRRAPLAMRLRANSTWAMLEFVFNGMVFLLLGLQLPGILESSLAAAEADPNVETWMLFTDIVLIYAALMLVRFGWLWTMKKFSLRFLKKKPMEFATWTSREILIASFAGVRGAITLAGVLSIPLLLPNGSGFPARYELVFLAAGVILFSLFVGVVMLPLLLQHLEVADHAQQLKEERIARAATAEAAIVTIQKMEERLAADTEENIDNQLLTEVSSRVIGNLRRRADGRNDVESSIQEENLERRFRLAALRSERAELYHLRATREISNETLQKLLHDLDLMEALLIENQ

SEQ ID NO: 15308 - protein, 530 aa, Microcoleus chthonoplastes PCC 7420
MAHQGVSTDNSNVEPVTQPPVSSLNRLQRRLLLAAAAVSSSCGLAVELLLGTLASYLVGNQALSFGVAIGGFLAAMGIGSYLSQFIASKSPPWLQQRQLLVAFVQVELLMAPLTALLPLGLFALFVVNGFLWLGLFLVTILLGILAGLEVPLLTRVLELEEGVREALAGVLALDYVGALLGSLLFPVLLLPLIGLFPAAFVLGALPAFMVFAIGQQFPRLRRWGYLGLSLGIILTLSAPAAIPISNRLENTLYQAPVITRIQSPYQRIVLTRRGQDLRLFLDGDLQLSTLDEYRYHEALVHPAMSASQNRRHVLVMGAGDGMALREVLKWRDVEQVVLIELDAEVVKLAQSHPQLVRLNEGALTDPRVQVINADAFVTAPALNDTFDVIIADFPDPDREVLAKLYAEGFYQRLLPRLAENGVFVTQASSPFFAPDVLSCIVATLSDVGLSTHPYVVDVPSFGPWGFVLASRQSIQADRLTLSVSTRYLTEPILHHLFELPGDVQLGNVEVNRLSHPVIVRYQSDPRWTAY

SEQ ID NO: 15309 - protein, 243 aa, Oryza sativa
  misc_feature (15)..(15): Xaa can be any naturally occurring amino acid
  misc_feature (33)..(33): Xaa can be any naturally occurring amino acid
  misc_feature (57)..(57): Xaa can be any naturally occurring amino acid
  misc_feature (71)..(71): Xaa can be any naturally occurring amino acid
  misc_feature (87)..(87): Xaa can be any naturally occurring amino acid
  misc_feature (114)..(114): Xaa can be any naturally occurring amino acid
  misc_feature (158)..(158): Xaa can be any naturally occurring amino acid
  misc_feature (169)..(169): Xaa can be any naturally occurring amino acid
  misc_feature (185)..(185): Xaa can be any naturally occurring amino acid
SEMDTDAEVEILDRXPRKVLSRKARAALEEEDXPAEDHDERVAKRAVKLVELGPRMXLRMTKVEEGMSDGXIMWHEHIHKSKAEVEXIEKRWQQRANEKEKRRKEQKANVEKKXKERAASGAHNKKEGDEADEMDVDGNNSDLFEDMLDEDEFDSEGXLEGDAEEAVNXAIEARMKEDGWEDDEXDTARGHDDFVTHFIKSRAASLFPCSGLAINIPPRFPVFKKKKKKKRPAEPPSFFPLWA

SEQ ID NO: 15310 - protein, 142 aa, Salmonella enterica
MPKPMFGDNGSGMHCHMSLAKNGTNLFSGDKYAGLSEQALYYIGGVIKHAKAINALANPTTNSYKRLVPGYEAPVMLAYSARNRSASIRIPVVASPKARRIEVRFPDPAANPYLCFAALLMAGLDGIKNKIHPGEAMDKNLY

SEQ ID NO: 15311 - protein, 245 aa, Afrostyrax sp. Cheek 5007; identical to SEQ ID NO: 8407

SEQ ID NO: 15312 - protein, 148 aa, Sesbania rostrata
MGFTEKQEALVNASYEAFKQNLPGNSVLFYSFILEKAPAAKGMFSFLKDSDGVPQNNPSLQAHAEKVFGLVRDSAAQLRATGVVVLADASLGSVHVQKGVLDPHFVVVKEALLKTLKEAAGATWSDEVSNAWEVAYDGLSAAIKKAMS

SEQ ID NO: 15313 - protein, 245 aa, Afrostyrax sp. Cheek 5007; identical to SEQ ID NO: 8408

SEQ ID NO: 15314 - protein, 474 aa, Thermobifida fusca YX
MFSNADEALAYIRTEGVQFVDVRFTDLFGGVHHVTLPAEKVDEDFLTNGQMFDGSSIRGFQAIHESDMLLLPDLSTAVLDPFREYKTLNITFFVHDPLTRESYSRDPRNVARKAEAYLKSTGIADTAYFGPEAEFYIFDDVQFATAPNTGFYAIDSVEGAWNTGSKREGGNLGYRPRYKGGYFPVEPSDHYSDLRSRMVRTMIEVGLPVELHHHEVGTAGQSEIGIKFGTLLQQADRVQLYKYIVKNVANAAGKTVTFMPKPLFGDNGSGMHCHQSLWKDGAPLFFDENGYAQLSDIARYYIGGLLKHAPSLLAFTNPTINSYHRLVPGYEAPINLVYSQRNRSACIRIPLTGSDPKAKRLEFRVPDPSANPYLAFSAMLMAGIDGIQNKIEPPEPLDKDLYELPPEEAAEIEKVPASLEEALDHLEEDHEYLVEGGVFTEDLIETYINYKRTVEIDSVRLRPHPREFELYYDV

SEQ ID NO: 15315 - protein, 677 aa, Magnaporthe grisea 70-15
MVKLIGAIGAWRPKLDFIALHYIWIIFCAILGFIVLYPHGNVPAIDALFFGASASTESGLNTIDLKELKMYQQLYLYVIPMITNLGFINPFVVAVRIYWFRKKLKQMRPSISRPDPEAVVLALRGHEDAKPRQEEPRPRSPSLDLAVEDEEDDEKKTRLDGKPIGPEAPDTTYFIPPPRERDSGQPFVVVDPRNDDEIRPAPAEHMDSEAGVRLRRPMTARDGPALTTARSLQHAASSVFVLGPNKAGRRNSVSSRAPATSNLPALSRQVTVGRNSKFYNLTPEDEEKLGGIEYRALKVLLKVTIAYFFGLHLLGIVCLVPWIHNAPAKYTDWLAQNGLDKTWWGFYSAQTMVDNLGFTLTPDSMVTFRDATWPMLIMTFLAFAGNTLYPVLLRLTIYVMSKVVPARSSTKEALQFLLDHPRRCYTLLFPSGPTWVLFVIIAALNLIDVVLIIVLDLDNPAINDLPMGPRVLSALFQAASSRHTGTSTLNLALINPAVQFSLLVMMYIAILPIAISIRASNTYEEKSLGMYKDQELPDESDASSYVVMHFRNQLSFDLWYIFLGTFCICVAESQKISDPAEPAFSVFSIFFECVSAYGTVGLSLGHPSVSASLSSQFGIFGKLVICAAMIRGRHRTLPYAIDRAIMLPGEGSDDGTGPQGDALLRGATARSEKEATD

SEQ ID NO: 15316 - protein, 146 aa, Medicago sativa
MGFTDKQEALVNSSWESFKQNPGNSVLFYTIILEKAPAAKGMFSFLKDSAGVQDSPKLQSHAEKVFGMVRDSAAQLRATGGVVLGDATLGAIHIQKGVVDPHFAVVKEALLKTIKEVSGDKWSEELNTAWEVAYDALATAIKKAMV

SEQ ID NO: 15317 - protein, 419 aa, Zea mays; identical to SEQ ID NO: 13609

SEQ ID NO: 15318 - protein, 491 aa, Bacillus cereus ATCC 14579
MKLHTLVSCLHDFPVVPKENPEITSIEADSRKVKEGSLFVCMKGYTVDSHDFAKQAAAQGAAAIVAERPIDVDVPVVLVKNTFRSLAVLADYFYGQPTHKLHLIGITGTNGKTTTSHIMDEIMRAHGHKTGLIGTINMKIGDETFEVKNTTPDALTLQQTFSKMVEQGVDSTVMEVSSHALDLGRVHGCDYDVAVFTNLTQDHLDYHKTMEEYKHAKGLLFAQLGNSYNHNREKYAVLNSDDNVTEEYMRSTAATVVTYGIDTTSDIMAKNIVMTSGGTTFTLVTPYESVNVTMKLIGKFNVYNVLAATAAGLVSGVKLETIIAVIKDLAGVPGRFEVVDGGQNYTVIVDYAHTPDSLENVLKTAKQFAKGDVYCIVGCGGDRDRTKRPIMASVATKYATHAIYTSDNPRSEDPAAILDDMVHGASGKNYEMIIDRKEAIHHAIAKAKADDIIIIAGKGHETYQIIGKEVHHFDDREVAKEAITGRLNNEE

SEQ ID NO: 15319 - protein, 148 aa, Sesbania rostrata
MGFTEKQEALVNASYEAFKQNLPGNSVLFYSFILEKAPAAKGMFSFLKDFDEVPQNNPSLQAHAEKVFGLVRDSAAQLRATGVVVLADASLGSVHVQKGVLDPHFVVVKEALLKTLKEAGGATWSDEVSNAWEVAYDELSAAIKKAMS

SEQ ID NO: 15320 - protein, 547 aa, Arabidopsis thaliana
MICDKCSLVRSFFVGRPRDITRVGIFPGKLFSMEVLASSSLSPISFTKPNKINPNFSIQVKLWVKQPPKISKASKFSYARSRSNISRSNAANPGVVFVCNRFLCVIERNDQRKLSGKVMMKSSVNFRQNLSVALVRIVSVLLVSSISVVTTDSPPSWGLTEENLLFLEAWRTIDRAYIDKTFNGQSWFRYRETALRNEPMNTREETYMAIKKMVATLDDPFTRFLEPGKFKSLRSGTQGAVTGVGLSIGYPTASDGPPAGLVVISAAPGGPANRAGILPGDVIQGIDNTTTETLTIYDAAQMLQGPEGSAVELAIRSGPETRLLTLTRERVSVNPVKSRLCELPGSGSNSPKIGYIKLTTFNQNASSAVREAIETLRGNNVNAFVLDLRDNSGGSFPEGIEIAKFWLDKGVIVYICDSRGVRDIYDTDGSNAIATSEPLAVLVNKGTASASEILAGALKDNKRALVYGEPTYGKGKIQSVFELSDGSGLAVTVARYETPAHTDIDKVGVTPDHPLPKSFPKDEEAFCGCLKDPTAACYLNQGLLFSR

SEQ ID NO: 15321 - protein, 255 aa, Oryza sativa
  misc_feature (11)..(11): Xaa can be any naturally occurring amino acid
MEAGYPGAAAXNGAAADGNGGAQQAAAAPAIREQDRLMPIANVIRIMRRVLPAHAKISDDAKETIQECVSEYISFITGEANERCQREQRKTITAEDVLWAMSRLGFDDYVEPLGVYLHRYREFEGESRGVGVGVGAARGDHHHGHVGGMLKSRAQGSMVTHHDMQMHAAMYGGGAVPPPPHPPPHHHAFHQLMPPHHGQYAPPYDMYGGEHGMAAYYGGMYAPGSGGDGSGSSGSGGAGTPQTVNFEHQHPFGYK

SEQ ID NO: 15322 - protein, 147 aa, Medicago sativa
MGFTADQEALVNSSWESFKQNLPGYSVFFYTTILEKAPAAKGMFSFLKDSAGVQDSPQLQAHAEKVFGMVRDSAVQLRATGEVVLGDATLGSIHIQKGVVDPHFVVVKEALLKTIKEAVGDKWSEELSTSWEVAYDGLASAIKKAMS

SEQ ID NO: 15323 - protein, 206 aa, Escherichia albertii
LLADAGIQLTFADVNQVVLDALNARHSYQVHVVGETEQVDTVSGVNAVSSIGDDVVDLIAQVDLVTTAVGPVVLERIAPAIAKGLVKRKEQGNESPLNIIACENMVRGTTQLKGHVMNALPEDAKAWVEAHVGFVDSAVDRIVPPSASATNDPLEVTVETFSEWIVDKTQFKGALPNIPGMELTDNLMAFVERKLFTLNTGHAITA

SEQ ID NO: 15324 - protein, 197 aa, Triticum aestivum
MALDLGALALKYTGLAVSDHDSIVAINIFIALLCGCIVFGHLLEGNRWVNESTTALVLGLITGGVILICTKGVNSRILIFSEDIFFIYLLPPIIFNAGFQVKKKQFFRNFATIILFGAAGTLISFVIITFGAMGLFSKLDVGPLELGDYLAIGGIFSGTDSVCTLQVLYQDEAPLLYSLVFGEGVVNDATSVVLFNA

SEQ ID NO: 15325 - protein, 769 aa, Ustilago maydis 521
MGVITHPNIRDGWFHETNSQWPGQAMSLEVQRILHHEKSLFQDVLVFESTTFGNVLVLDGVIQCTERDEFSYQEMIAHLPIASHPNPERVLVIGGGDGGVLREVVKHDSVKEAVLCDIDEAVPRVSKQYLPHMAEGLTHPKSTVIIGDGFAFLQDPKNKASFDVIITDSSDPVGPAEALFQQPYFALLKEALKPGGHISTQAECVWIHLNLIGELRRSTKELFPVADYAFTTIPTYPSGQIGFVVCSLDANRNVREPLREVPDCRYYNSQVHKAAFTVPEFARKVIEDGAPAPGRVIPTGEGIAKTQRAPKKILLLGSGYVAGPFAQYVTRFPEYSLTVASSKLEHSERLTQGLHNASAAAVDVNDAAALSALVKGHDIVISLIPYIYHAAVIKAACEHKVNVVTTSYVSDAIRALEPEIQKAGITVMNEIGLDPGLDHLYAVKAIDDVHAEGGKIKSFLSYCGGLPAPEAADNPLGYKFSWSSRGVLLALRNTAKFWQDGQELTVSGHELMAAAKSFYINPAFAFVAYPNRDSTPFKQWYNIPEAETVIRGTLRYQGFPEFILALVKLGFLDEESKPFLAYNTKATWAEVTANMVGASSTSETDLIAAVKAKVSFKSAQEEETIIRGLRWLDLFSTTAPVTVRGTAAQEAAQVAGNPLDSLCATLEDKCAYAPGERDMVMLQHKFEIETASGEHKTLTSTLLDYGIPHGVTSMAKLVGVPCAIATRLILEGHPALSKTGILAPYTKDICDPIRLELEKEGIALEERYV

SEQ ID NO: 15326 - protein, 1064 aa, Arabidopsis thaliana; identical to SEQ ID NO: 13968

SEQ ID NO: 15327 - protein, 402 aa, Bacillus cereus G9241
MPKHRKQSKIKIYRITSYKKDKRSELDSDKFELEQQEIENKQDKHGKQGKQDKHDKQDKQDKQDKQDEQDKQDKQDEQDEQDEQDKQDKQDKQVQTENVVIVPTDSHNLDIWDEISLKEIQAGEHTSLLNEKSNYQNINLVQVSDIRLYLDNQLQFSSVDEQIYHEALVHPIMAKVIDPKRVLILGGGDGLALREVLKYETVLHVDLVDLDEAMINMARNVPEIVSLNKNAFFDNRVNVHVCDAKEFLNSPSSLYDVIIIDFPDPATEVLSTLYTSELFARIATFLTEDGAFVCQSNSPADAPLVYWSIGNTIENAGLIVKSYHIIVPSFGTDWGFHIAANSSHILDQIEQLYVVPTPRTLPSLLFPLFQFKEEYLEQCNHALINSESNLILHQCYKQEMEF

SEQ ID NO: 15328 - protein, 534 aa, Physcomitrella patens subsp. patens
MTKTGLDGSEDHMVVVAISLFVTLLCACIVLGHLMEEFQYISESVTAIILGFCTGIIVLVASNGASSHVLQFNEELFFIYLLPPIIFNAGFQVKKKQFFRNFIAIMLYGVIGVFISFAIISAGCKFTFPKFGLDKLTIGDYLALGTIFSATDSVCVLQVLNQDDSPLLYSLVFGEGVVNDATSVVLFRAVQKLSFKDFTGMEVIRICGSFLQLFFSSTVLGVAIGLLSAYIIKTLYLARHSTDREIALMTIMAYLSYILAELFYLSGILTVFFCGIVMSHYTWHNVTESSRITTRHGFATMSFIAETFIFLYVGMDALDVDKWKMVQISSGDYFGLFFTIITLVLVGRAAFVFPLSALANYMRKSSDTKITFRQQIVIWWAGLMRGAVSIALAFNQFWRCKKVQNMRAAITATILWFLVQVFGTATKPLMRCVLPPTSKSEYLESEPHTPKDFSFSDFHVPLLLGSNQLSGSPRPVARRSSLVMLLSAPTNVIHDAWRAFDDAYMRPLFGGRGFVPYNSDPLTNAEDDVAYPCH

SEQ ID NO: 15329 - protein, 526 aa, Bdellovibrio bacteriovorus HD100
MERVGRAEVLSSPRFFIISLMVLVLGASLYLVRLSGKDVSKVKSGEDYWAETGLGPAALEDLLQDQTCGSSERYFLACANAILTVANRYNLSLNLQGELVPVHEALSADMSSEKKQLEPWKEYFTSQTAKATQISFLKAWEQLKSEYIKPKQSSMMVGLGLNGFISVFRDPHTYFMPVNQFQEVISRADSRSVTLGITLGSHKGQYVVRKLTEGSPAKLSGIQKGDVLISINDTSVKGLMQPRVSELLKGEVGDVVRIRVERDGEAMKFRLRRQEITVATVSTRVIEGIKPIAVIGINKFARGACEKVKESLEIVKRSHVRGLLLDLRDNPGGQMEEAACIASLFVGPENKIFEVRYLDPSKKAEVFYGGEEKHFDMPMAVLVNAASASASEIVAGALRDLNRAVLVGERTFGKGSFQEGEYWSQNKKIALFETKGFYYLPSGRSPQMKGLEPDVAVNFEEISVVREAEQFINPLRAPERQVRAMAQSMSSSECLDLEDGSPSDDLQLTKARQVLFCTKAVARAGL

SEQ ID NO: 15330 - protein, 513 aa, Lactobacillus sakei subsp. sakei 23K
MALTLDACTLILKEHHLLKSVALNGDSNLNMTGIAYDSRKVTADTLFFCKGNFRPVFLTNAKEAGAVTYVAEQPIVEGNGMNALIVTNVQKAMAVLSAAFYDYPQDDLFIVAYTGTKGKTTASYFTQSILQDATNKKTALFSTIDRVLGPKPEDRFKSDLTTPESLDLFHDMRQAVENGMTHLVMEVSSQAYKKNRVYGLTFDVGFFLNISPDHVGPNEHPNFEDYLHCKLQLLVNSRHCVINAQTQNFGDVYAAATTTTEPENIYLFADTSYQPAQPVNIDFRFENQAMTLAESRFKVTAVSKKAIQLGVSGDYQLRLIGDFNESNATAAIIGAALGGADLIAAQQGIRRLQIPGRMETLAVEGHGQVYVDYAHNYASMKALLSFLQKEYNQPKLLVVVGSPGDKGVSRRAGFAQVLNEYADRAILTTDDPGYEDPATIAAEILAGIDQDKVDTTVEIDRATAIKQAIEESQPGDIVVLAAKGADAYQKVRGVDTPYPTDMVIAKQVAQQLS

SEQ ID NO: 15331 - protein, 526 aa, Burkholderia mallei ATCC 23344
MSPVSAFKLVLLSFLAIVALELLAKRLRLPPAAALLVGGAGIAFLPGLPPVNLDPDLVLIVFLPPLLMDGAYFSVWEEFKRNVGGIMMLAIGAVAFTTLAVGVAVHLVAPGLPWAACFALGAIVSPPDAVAAKAVLERVALPRRLMVLLEGESLLNDAAGLVLFRFAVAAALTGAFSTGDAVVRFAQLGVGGVAVGFIVGWLIVRFLKLVEDDYLVITVAVLAAWISYIAGELFEVSGVIATVTTGMMLGWHQHEVFSASVRNRGTAFWQVIVFLLEALVFVLIGLSLRGVIERLGGLGEVFATMTPAVAAVVAAVVASRFVWVFAVELLKAPVARLRGRGPRGDWKAATVMGWAGMRGVVTLAIALSLPDAMPGRDLILVAAFAVILVTVLLQGTTIGPLIRLLKLRDPGPAAHHLTEPQTWARVEAAQLSAIQPLVHDAEGNVIHPRLLEQYTYRASVTARHQDEPAFPQRERDAHYDVVLAAIAAGRAELLRLHRGGQIHDEMLYLLERDLDLQEIAAQHAKG

SEQ ID NO: 15332 - protein, 888 aa, Arabidopsis thaliana; identical to SEQ ID NO: 15147

SEQ ID NO: 15333 - protein, 425 aa, Vibrio salmonicida LFI1238
MSVYNTLCFLAAGAMLIAFFNSKIGKMQTTIAITAGSIMLSLAIIIAGHNGWFHLREIATETLTEINFEDFLLKGILGFLLFAGGLGIKLPHMKDQKWEITVLALGATLFSTFFIGFALWFICGFIGINFDLIYCLLFGALISPTDPIAVLAIVKKMNAPQRISTQIEGESLFNDGFGLVIFVTLFTIAFGNETPTIGSVTSLFFQEAIGGIIYGFVLGLVFHYLISSTNDHSMELLLTIGIPTAGYALADVIHVSGPLSMVVAGIMIGNWTRFIGFSKESEEHLDHFWELVDEFLNGVLFLLIGMSMLLFKFHQEDWILMAISIPLVLTSRYLSVYVSYIGFKRFRTYNPLSVKILTWGGLRGGLALAMALAIPSGIMVIPDKNIDVREIILVMTYSVVVFSILVQGSTITNMIEKAKLLEKNK

SEQ ID NO: 15334 - protein, 668 aa, Glycine max
MIMARSFSRGSLLPLAIVSLVCLFVISIAKEEATKLGTVIGIDLGTTYSCVGVYKNGHVEIIANDQGNRITPSWVAFTDSERLIGEAAKNLAAVNPERTIFDVKRLIGRKFEDKEVQRDMKLVPYKIVNKDGKPYIQVKIKDGETKVFSPEEISAMILTKMKETAEAFLGKKINDAVVTVPAYFNDAQRQATKDAGVIAGLNVARIINEPTAAAIAYGLDKKGGEKNILVFDLGGGTFDVSILTIDNGVFEVLATNGDTHLGGEDFDQRIMEYFIKLIKKKHGKDISKDSRALGKLRREAERAKRALSSQHQVRVEIESLFDGVDFSEPLTRARFEELNNDLFRKTMGPVKKAMEDAGLQKSQIDEIVLVGGSTRIPKVQQLLKDYFDGKEPNKGVNPDEAVAYGAAVQGSILSGEGGEETKDILLLDVAPLTLGIETVGGVMTKLIPRNTVIPTKKSQVFTTYQDQQTTVSIQVFEGERSLTKDCRLLGKFELSGIPPAPRGTPQIEVTFEVDANGILNVKAEDKGTGKSEKITITNEKGRLSQEEIERMVREAEEFAEEDKKVKERIDARNSLETYVYNMKNQIGDKDKLADKLESDEKEKIETAVKEALEWLDDNQSVEKEEYEEKLKEVEAVCNPIISAVYQRSGGAPGGGASGEEDGDSHDEL

SEQ ID NO: 15335 - protein, 160 aa, Pseudomonas aeruginosa PAO1
MSAFHDLTLQGLDGQDLPLSPFKGKVLLVVNVASKCGLTPQYAGLENLYQTYRERGFAVLGVPCNQFAGQEPGSEADIQSFCSLNYGVSFPMSAKVEVNGSARHPLYRLLAGEGAEFPGDITWNFEKFLLGPDGRVLARFSPRTAPDDPALVQAIEKALG

SEQ ID NO: 15336 - protein, 90 aa, Glycine max
REQDRFMPIANVIRIMRKILPPHAKISDDAKETIQECVSEYISFITGEANERCQREQRKTITAEDVLWAMSKLGFDDYIEPLTMYLHRYR

SEQ ID NO: 15337 - protein, 758 aa, Arabidopsis thaliana
MTSIIGAALPYKSPEKAIASSSYSAENDSSPVDAVIFAGTSLVLGTACRYLFNGTRVPYTVVLLVIGIFLGSLEYGTKHNLGKLGHGIRIWNGINPDLLLAVFLPVLLFESSFSMDVHQIKRCMGQMVLLAGPGVLISTFCLGALIKLTFPYNWDWKTSLLLGGLLGATDPVAVVALLKELGASKKMTTLIDGESLMNDGVSVVVFQLFFKMVMGHNSDWGSIIKFLVQNSFGAVGIGLAFGIASVFWLKFIFNDTVAQITVTLSASYFAYYTAQEWAGVSGILTVMILGMFFAAFARTAFKGDSHQSLHHFWEMAAYIANTLVFMLSGVIIAESVLSGQTISYKGNSWSFLFLLYLYVQLSRCVVVGVLYPLLCRSGYGLDWKESIILTWSGLRGAVSLSLALSVKLSQSSGNSYLSSDTGTRFLFLTGGIVFLTLVVNGSTTQLLLHLLRMDTLTATKKRILEYTKFEMMKTALKAFENLGDDEELGSADWPTVIRHISSLKDLEGRQVNPHDGYEAGSLDPTNIMDIRIRFLNGVQAAYWEMLDDGRITQCTANVLMQSVDEALDLVSTSSLSDWRGLEPRVHFPNYYKFLQSKIIPHKLVTHLIVERLESACYISSAFLRAHRIARQQLHIFLGNSNIASTVINESEVEGEEAKQFLEDVRDSFPQVLSVLKTRQVTHYVLNHLNGYIKNLEKVGLLEGKEVSHLHDVVQSDLKKLLRHPPSLKLPNVDDLITSNPLLKDRSSFRSLAIGETDA

SEQ ID NO: 15338 - protein, 90 aa, Glycine max
REQDQYMPIANVIRIMRRILPAHAKISDDAKETIQECVSEYISFITAEANERCQREQRKTVTAEDVLWAMEKLGFDNYAHPLSLYLHRYR

SEQ ID NO: 15339 - protein, 589 aa, Ajellomyces capsulatus
MATISNETPLWRLQQTLNHILPQSVRKNEKHLAVVHGPTQPALWEMTLGELLEFQCLRYRDLEAVVVPWTAARWTYGQLENESSHLARGLLAKGIQRGDRIGVMAGNCEEYVSLFFAAARVGAILVVINNTYTDAELKYALSHTACKLLFIVPRIGRHDLKNALEDLHSPDISKRLPNLNETVMIQGSFKSFGTYKDVILAGNVVPLSAVQRRQDTLSPFDVCNLQFTSGSTGNPKASMLTHHNLINNSRFIGDRMDFTEYDILCCPPPLFHCFGLVLGLLACITHGAKVVYPAETFDPEAVLRAISDERCTALHGVPTMFEAILALSRPDSFDCSQLRTGIIAGAPVPRPLMKRLWNELNMTEFTSSYGLTEASPTCFNAFTSDSIATRLTTVGKVLPHASAKIINPETGETVKIGERGELCMSGYQIHKGYWGNLEKTAEALIEDEDGTIWLRTGDEAVFNSDGYCTITGRFKDIIIRGGENIYPLEIEERLTAHPAISRAAVVGLPNKHYGEIVGAFLVLEPGHTCPPDDEIKNWTRQTLGRHKAPKHVFVFGLDPRLPLDMPQTGSGKIQKQVLRDLGKRLVGEE

SEQ ID NO: 15340 - protein, 526 aa, Burkholderia thailandensis E264
MSPVSAFKLVLLSFLAIVALELLAKRLKLPPAAALLVGGAGIAFLPGLPPINLDPDLVLIVFLPPLLMDGAYFSVWEEFKRNVGGIMMLAIGAVAFTTLAVGVAVHLVAPGLPWAACFALGAIVSPPDAVAAKAVLERVALPRRLMVLLEGESLLNDAAGLVLFRFAVAAALTGAFSAGDALVRFAELGFGGVAVGFVVGWLIVRFLKLIEDDYLVITVAVLAAWISYIAGEMFEVSGVIATVTTGMMLGWHQHEVFSASVRNRGTAFWQVIVFLLEALVFVLIGLSLRGVIERLGGLGEVFATMTPAVVAVLVAVVASRFVWVFAVELLKAPVARVRGRGLRGDWKAATVMSWAGMRGVVTLAIALSLPDAMPGRDLILVAAFAVILVTVLLQGTTIGPLIRLLKLRDPGRAAHHLTEPQTWARVEAAQLAAIQPLVHDAEGNVIHPRLLEQYTYRANVTARHQNEPAFPQSEREAHYDVVLAAIAAGRAELLRLHRGGQIHDEMLYLLERDLDLQEIAAQHAKG

SEQ ID NO: 15341 - protein, 90 aa, Vernonia galamensis; identical to SEQ ID NO: 1008

SEQ ID NO: 15342 - protein, 858 aa, Gluconobacter oxydans 621H
MMVTGLAAVLLALAFLLTLVSIIQPLAKRLEISEAVLLALTGIGLGLVASLIVRSSATDLLDGAAEALIYFPVNSEAFLLIFLPILVFQGAMAIDVRRLAHETATVLLLAVVAVIVSTATIGFALYPFAQQSLVVCLLLGSIVATTDPSAVAGIFREIGAASRLTRLVEGEALLNDAAAISIFSILLAAVTSHHQIHLADALMDFLTAFIGAIVVGVCLARLTLLLIAGLGGSAASEVTLTLALPYAVYILCDEMLGFSGVVATAAAGLTVSAYGPSTFRPQVWRFLNEMWEQLVFWAGSLVFLLAAMLVPRLLIGMTKWDFVLILIASVAGLIARSAVIFGMLPLLAITKLSPPVPNPFKATMAWGGIRGAITLALALAVTENQSVSSPVAHFVGIIATGFVLITLLVNGTTLRALVLFFKLDQLSPIDQAIRQQIVGIGLGEVAERTRELSEELGFSEQTRAGVISRLERRAEKERAANNFESALSDRNRVDIALITIANQERSLLLDLFRIQGLSRRVMETLLRTTESMADGARLEGRYGYVRALKRRLQPSLRFRIAQELHSRLHIDEPLTNCMMERFEMLIIAHLVSLSLQRFIRQRMEPTLGPRITEIVSEVLGRQRKLLDDALETLRLHYSGYSEALESRILRQIALRLEDEEYDALEADNLISEELHRELHREIERQRARLDAPLRFNLKSGIEQRLRAFPAFNGVPDSVLQKLSRKVSMHFVSPGEILFKRGQRVRVVYAQVAGLAEVNLAERDLLFGSGDLIGAASVIRNETMPGTVRSLQFSHLLAIPRPVFEKLLKEYPIVQRLIIQRSQKRADGLLTPVTVRTLDGDVVSTASAPEMRRLVAPPS

SEQ ID NO: 15343 - protein, 198 aa, Yersinia ruckeri
GSSIGGWKGINESDMVLMPDASTAVMDPFFADSTLIIRCDILEPGTMQGYDRDPRSISKRAEDFLKSSGIADTVLFGPEPEFFLFDDIRFGSSIRGSHVAIDDIEGAWNSSTKYEGGNKGHRPAVKGGYFPVPPVDSAQDLRSAMCLTMEDMGLVVEAHHHEVATAGQNEVATRFNTMTKKADEIQIYKYVVHNVAHA

SEQ ID NO: 15344 - protein, 221 aa, Larix potaninii var. chinensis
KAAGARIIVTQAAYVDKLADLQSDDMIVIAIDGAPKEGCQHISILTEADETQCPSVEIHPDDVVALPYSSGTTGLPKGVMLTHKSLVSSVAQQVDGENPNLYFHSEDVILCVLPLFHIYSLNSVLLCAPRAGAATLIMQKFNLTTLLELIQRYKVTVAPIVPPIVLEISKNPIVSQYDVSSVRIIMSGAAPLGKELEDALRERFPKAIFGQGYGMTEAGPV

SEQ ID NO: 15345 - protein, 90 aa, Argemone mexicana; identical to SEQ ID NO: 1010
  misc_feature (75)..(75): Xaa can be any naturally occurring amino acid

SEQ ID NO: 15346 - protein, 198 aa, Yersinia ruckeri
SSIGGWKGINESDMVLMPDASTAVMDPFFADSTLIIRCDILEPGTMQGYDRDPRSISKRAEDFLKSSGIADTVLFGPEPEFFLFDDIRFGSSIRGSHVAIDDIEGAWNSSTKYEGGNKGHRPAVKGGYFPVPPVDSAQDLRSAMCLTMEDMGLVVEAHHHEVATAGQNEVATRFNTMTKKADEIQIYKYVVHNVAHAY

SEQ ID NO: 15347 - protein, 1075 aa, Nostoc sp. PCC 7120
MAILHGSWILNEQESCLFIWGETWRSPQVDFNFAEISLNPLALSALELSEWLQSQHQAIAKLLPQQLEKRTSKAASSVKINLLTHSQIIALPTEISQPRKKETILISPVHSAALASESDSEVYLQTWRVEGFCLPPSAAIKLLTSLPLNITSGENAFLGGDLRFWSQIARWSLDLISRSKFLPIIQRQPNNSVSAKWQVLLDSAVDGTRLEKFAAKMPLVCRTYQEIGSGESPIYIDFPSQPQDLILGFLNSAIDTQLREMVGNQPVVETRLMASLPSAVRQWLQALIAASNSIDADAVGLERLEAALKAWTMPLQYQLASKNQFRTCFELRSPEPDETEWTLAYFLQAADDPEFLVDAATIWQNPVEQLIYQQRTIEEPQETFLRGLGLASRLYPVIAPTLDTESPQFCHLKPMQAYEFIKAVAWRFEDSGLGVILPPSLANREGWANRLGLKISAETPKKKPGRLGLQSLLNFQWHLAIGGQTISKAEFDRLVALKSPLVEINGEWVELRPQDIKTAEAFFTARKDQMALSLEDALRLSSGDTQVIEKLPVVSFEASGALQELIGALTNNQAVAPLPTPKNFQGQLRPYQERGAAWLAFLERWGLGACLADDMGLGKTIQFIAFLLHLKEQDVLEKPTLLVCPTSVLGNWEREVRKFAPTLKVLQYHGDKRPKGKAFQEAVKKHDLVITSYSLIHRDIKSLQGIPWQIIVLDEAQNVKNAEAKQSQAVRQLETTFRIALTGTPVENRLQELWSILDFLNPGYLGNKQFFQRRFAMPIEKYGDAASLNQLRALVQPFILRRLKTDRDIIQDLPDKQEMTVFCGLTGEQAALYQKAVETSLAEIESAEGLQRRGMILALLIKLKQICNHPAQYLKINTLEQHSSGKLQRLEEMLEEVLAESNTYGVAGAGRALIFTQFAEWGKLLKPHLEKQLGREIFFLYGGTSKKQREEMIDRFQHDPQGPPIMILSLKAGGVGLNLTRANHVFHFDRWWNPAVENQATDRVFRIGQTRNVQVHKFVCNGTLEEKIHDMIESKKQLAEQVVGAGEEWLTELDTDQLRNLLILDRSTVIDEEAD

SEQ ID NO: 15348 - protein, 90 aa, Triticum aestivum
REQDRLMPIANVIRIMRRALPAHAKISDDAKEAIQECVSEFISFVTGEANERCRMQHRKTVNAEDIVWALNRLGFDDYVVPLSVFLHRMR

SEQ ID NO: 15349 - protein, 155 aa, Yersinia ruckeri
AVMDPFFADSTLIIRCDILEPGTMQGYDRDPRSISKRAEDFLKSSGIADTVLFGPEPEFFLFDDIRFGSSIRGSHVAIDDIEGAWNSSTKYEGGNKGHRPAVKGGYFPVPPVDSAQDLRSAMCLTMEDMGLVVEAHHHEVATAGQNEVATRFNTM

SEQ ID NO: 15350 - protein, 245 aa, Reinwardtia trigyna; identical to SEQ ID NO: 8423

SEQ ID NO: 15351 - protein, 221 aa, Larix potaninii var. chinensis
KAAGARIIVTQAAYVDKLADLQSDDMIVIAIDGAPKEGCQHISILTEADETQCPSVEIHPDDVVALPYSSGTTGLPKGVMLTHKSLVSSVAQQVDGENPNLYFHSEDVILCVLPLFHIYSLNSVLLCALRAGAATLIMQKFNLTTLLELIQRYKVTVAPIVPPIVLEISKNPIVSQYDVSSVRIIMSGAAPLGKELEDALRERFPKAIFGQGYGMTEAGPV

SEQ ID NO: 15352 - protein, 195 aa, Yersinia ruckeri
SIGGWKGINESDMVLMPDASTAVMDPFFADSTLIIRCDILEPGTMQGYDRDPRSISKRAEDFLKSSGIADTVLFGPEPEFFLFDDIRFGSSIRGSHVAIDDIEGAWNSSTKYEGGNKGHRPAVKGGYFPVPPVDSAQDLRSAMCLTMEDMGLVVEAHHHEVATAGQNEVATRFNTMTKKADEIQIYKYVVHNVAH

SEQ ID NO: 15353 - protein, 93 aa, Brassica napus
  misc_feature (65)..(65): Xaa can be any naturally occurring amino acid
  misc_feature (74)..(74): Xaa can be any naturally occurring amino acid
  misc_feature (81)..(82): Xaa can be any naturally occurring amino acid
  misc_feature (86)..(86): Xaa can be any naturally occurring amino acid
  misc_feature (88)..(88): Xaa can be any naturally occurring amino acid
MASSMLSSAAVVTSPAQATMVAPFTGLKSSAAFPVTRKANNDITSIASNGGRVSCMKVWPPVGKXKKFETLSYXLPDLTEXXWRKXGXYLFPQ

SEQ ID NO: 15354 - protein, 84 aa, Oryza sativa
  misc_feature (15)..(15): Xaa can be any naturally occurring amino acid
PPVFKGPVNIVLDTXPPTPRGVMGFSLSPPGGPPVYFPPPFFTLEDKGFPPKSKGPLKFSNSGIPPASFCFPSFAKKVFGSKAT

SEQ ID NO: 15355 - protein, 196 aa, Yersinia pseudotuberculosis
SIGGWKGINESDMVLMPDASTAVMDPFFADSTLIIRCDILEPGTMQGYDRDPRSISKRAEDFLKSSGIADTVLFGPEPEFFLFDDIRFGSSINGSHVSIDDVEGAWNSSTKYEGGNKGHRPAVKGGYFPVPPVDSAQDLRSAMCLTMEEMGLVVEAHHHEVATAGQNEVATRFNTMTKKADEIQIYKYVVHNVAHA

SEQ ID NO: 15356 - protein, 96 aa, Brassica napus
MAGNYPSFQNPIPRFQNYNFASTSSHHHQHHDGLVVEQEENMVIKEQDRLLPIANIGRIMKNILPPNAKISKEAKETMQECVSEFISFVTGEASDK

SEQ ID NO: 15357 - protein, 365 aa, Averrhoa carambola; identical to SEQ ID NO: 8425

SEQ ID NO: 15358 - protein, 377 aa, Dehalococcoides ethenogenes 195
MTLRIKVLLGTILAMVGLLVSFGVGYLSGGIAALNSDENLSSIVNAWQIITTEYVEPDSIDQAALAEAAIKGMMDELDDPHSVYLNAEDYQSSLEYDDGKYVGIGATVQIEDEAIVLVPYDGSPAALAGIQAGDILLEVDGQSVAGFSLADLSPLVRGEKGTSLTLLVERSSSDQPLLFEVTRDEILISSVTSEMMGDIAYIRISRFSERTDEELEQVLKNLGSAEGIVLDLRGNPGGLVSSVINVTSRFVSSGVVLTTVDNEGNSSEYSVVPKTVTTSLPMVVLVDQYSASGSEALSGALQDYGRATIAGKTTYGKGSVNRTFNVTPDTGIYLTIGRWYTPNGRMIEGQGITPDIELELTGDEAVSWALGFLHGDT

SEQ ID NO: 15359 - protein, 560 aa, Salicornia bigelovii
MLSQSSSLFYSKMDMLSTSDHASVVSMNLFVALLCGCIVIGHLLEENRWMNESITALLIGLCTGVVILLISGGKSSHLLVFSEDLFFIYLLPPIIFNAGFQVKKKQFFRNFITIIMFGAIGTLGSFSVVSLGAMTIFKKMDIGSLELGDYLAIGAIFAATDSVCTLQVLNQDETPLLYSLVFGEGVVNDATSVVLFNAIQNFDLTNIDHRIAIQFSGNFLYLFFASTMLGAMTGLLSAYVIKKLYFGRHSTDREVALMMLMAYLSYMLAELFYLSGILTVFFCGIVMSHYTWHNVTESSRVTTKHAFATLSFVAEIFLFLYVGMDALDIEKWRFVSDSPGTSVAVSSILLGLLMVGRAAFVFPLSLLINFSKKSHSEKITFNQQIVIWWAGLMRGAVSMALAYNQFTRSGHTQLRGNAIMITSTITIVLFSTMVFGLLTKPLILFLLPHSKHFNSASTVSDLGSPKSLSLPLLDGGQDSEADMDNQDEAVNNRYEGTHNRTIARPGSLRMLLNAPTHTVHYYWRKFDDSFMRPVFGGRGFVPYVPGSPIEQNTDNLLDRT

SEQ ID NO: 15360 - protein, 410 aa, Glycine max
MSIVYSHAVKYSQGETRMNPEMDSNIGQHCHQQNSGLMRYRSAPSSLLTSLANNNNINNNTTTNGCVNGKAFRSVHNHHQQQRYPPSTSSEMETMLAKLISSNNSEPLQVKEEAVASVSQPPQQHNGYSYGSSPQMMYQTQQIQGLPMPNGSLGNAFDGSFSAVNSLASQNSTQPRLGASTNCNNLIRQKSSPAGFFSNYSVDNAMRDVASFRGCDVSNGQAITSSSGLHGGTLNLSSRPSSCSTRMPQIAENGNEGVEGNYVESRNLRNDNINSTKCEISFSTSKAMDIQDEDFGYQKVGLTHHLSLPGSSSRMATMEKLYQIQGSVPCKIRAKRGFATHPRSIAERERRTRISARIKKLQDLFPKSDKQTSTADMLDLAVEYIKDLQKQVKILRDTRAKCTCTSNQKH

SEQ ID NO: 15361 - protein, 365 aa, Averrhoa carambola; identical to SEQ ID NO: 8426

SEQ ID NO: 15362 - protein, 540 aa, Synechocystis sp. PCC 6803
MIKLPVLLADINIQSLPTEPELILNNLAITTLVENLIILLLVATLVALVARWLKIPYVIGLVLAGLAIPRGLSVGLNPELILNFFLPILIFEAAINTDISRLRSTIKPITVLAGPGVVISAAITAVLLKIGLGLAWVTAAGVSVILTITDTVSVIAAFRSVPVPRRLATIVEGESMLNDGVAMVLLSVITTIHIQGGFSAGEGIRQIFVAFVGGGLVGLGLGYLCVGLFRQLNDDLSDILLTVSVSLGTFQIGQMLGVSSAIAVVVAGLVIGNLALKQTSASIKVTLLSFWEYAGFGVNTLIFLLVGIEVYPSILLSTIPAALIAIVAYQIGRVFSIYPLLYLLSFFDRPLPLRWQHVLIAGNVKGSLSMALALALPLTLPGRDQVVTLVFSTVMVSLIGQGLSLPWVVKKLQLSKPSPLAQKIAMLQLNLVTAKAAQGELKYLLEAGSLPKFLYEELFADYQARIANSEQELREFYNQRNLIFSEGEVEKKYIDGLYRRLYIAEKSAINDALAKGILADDISDEYLQVLNEKLLALQDD

SEQ ID NO: 15363 - protein, 492 aa, Bacillus cereus ATCC 10987
MKLKELANLLLIKETIGNMDVEITGLEMDSRKITDGDLFICVSGIDGFLEDRHQFVEDAVKNGAVALIVERDVNIEMPKIIVKDARYAMAVIASHFYGYPSNKMKLIGITGTNGKTTTSYLLEKILSDYGYHTGLMGNNGVKVDSKWYPTDINTQEPPTLQRNLQMMKNQNADYCVMEVTSQGLHMERVKGCNFKIAVFTNLTQDHLDYHGTFHEYKHVKGLLFSRLGNDLSTTDKKIAVLNADDPSVEYFKKITSAEVITYGIHNRADVQAKNITLSPKGIRFLVSSFNGEIEVNLNLVGRFNVYNALAAITVAMVEGIPLTNICDSLSNLKSIEGRMEIIDENQDFLVIVDYAHTPDALENVLSTISEFSKGKVITVFGCGGDRDTKKRSIMGGIAGSYSDFVFITSDNPRSEDPQAIMKDIEKGFSQNNNLNYKVEVDRELAITHAINMASSNDIVLIAGKGHETYQILKDSTIHFDDKEKARQAIINK

SEQ ID NO: 15364 - protein, 210 aa, Orchis italica
MGRGNTEIKRIENSTNRQVTFSKRRSGIIKKAREISVLCDAQVSLVIFSSLGKLSEYCSPSTTLSKMLERYQQNSGKKLWDATHENLSAEIDRIKKENDNMQIELRHLKGEDLNSLNPKELIPIEEGLQNGLTSVREKQMDFLKMLRKNERMLEEENKRLKYLLQHQQLAIEGSMRELEISYHQKDPEYADQMPMTFRVQPFQPNLHGNN

SEQ ID NO: 15365 - protein, 434 aa, Shewanella sp. MR-7
MTSYQILCILCALALVTSVASSRLHKLQETVAITALALGMSLLLLLGGKALGGHVYGYFVAGLEKLDFQALLLNGMLGFLLFAGALQIRLKILRHQKWEILILAFVSTLLSTFIVGGLLYYIAPMLGLPLALSHCLLFGALISPTDPIAVLAILKKMGAPEDIAIQVEGESLFNDGIGLVIFVAISHLAFSTEPLTFSQISLLFIQEALGGVVYGAVLGVLLHHFFRYCEEETQLMLVTLLIPTAGYVIAEVLGVSGPLAMVSAGIIIGNYSVPKYFVRHERVKLYTFWSLIESFFNALLFLLLGLLLLLVTFKTPLWWFMLVAIPLVLTARAVSVLLPYIGFRLVKSYNPYAESILIWGGLRGGLALAMAMSLPEGVIIDSQSGVELRELVLVMTYAVVVFSILVQGSSMTGLIRRSNAVATEANHQIATERT

SEQ ID NO: 15366 - protein, 360 aa, Acanthothamnus aphyllus; identical to SEQ ID NO: 8431

SEQ ID NO: 15367 - protein, 639 aa, Photobacterium profundum SS9
MGRIIGIDLGTTNSCVAVLDGDKPRVIENAEGERTTASVVAYTQDGETLVGQPAKRQAVTNPENTLYAIKRLIGRRFEDEEVQRDLKIMPFKIVKADNGDAWVEAKGQKMAAPQVSAEILKKMKKTAEDFLGEEVTAAVITVPAYFNDAQRQATKDAGRIAGLEVKRIINEPTAAALAYGLDKKGGDRTIAVYDLGGGTFDISIIEIDEVEGEKTFEVLSTNGDTHLGGEDFDNRLINYLVEEFKKEQGMDLRNDPLAMQRLKEAAEKAKIELSSAQQTDVNLPYITADATGPKHMNIKVTRAKLESLVEDLVQRSLEPLKVALSDAGLSVSEITDIIVVGGQTRMPMVQAKVAEFFGKEPRKDVNPDEAVAVGAAVQAGVLAGDVKDVLLLDVTPLSLGIETMGGVMTKLIEKNTTIPTKANQVFSTAEDNQSAVTIHVLQGERKQSSYNKSLGQFNLEGIQAAARGMPQIEVTFDLDADGILHVSAKDKSTGKEQKITIQSSSGLSEEDIEKMVQEAEANKESDKKFEELVTARNQADQLIHGTRKQVEEAGEALPAEDKEKIEAAVSELEEARKAEDKEAIDAKVQALVAASQKLMEIAQQQAQAQQAPGGEGEQEAKQDDNVVDAEFEEVKDEKK

SEQ ID NO: 15368 - protein, 85 aa, Triticum aestivum
  misc_feature (12)..(12): Xaa can be any naturally occurring amino acid
  misc_feature (25)..(25): Xaa can be any naturally occurring amino acid
  misc_feature (39)..(39): Xaa can be any naturally occurring amino acid
EFISFTASQAKXKCMKEKRKTINGXDLIWSMGTLGFEDXYVKPLKLYLKLYREMEGDTSKGSKSEQAAKKVGALNGQPGSSFNGM

SEQ ID NO: 15369 - protein, 727 aa, Xylella fastidiosa Ann-1
MRLRILNSLKVALLTLAITTAPALMAKSDSASPQVATPDQTTATKLVYGLLSDSRYAYRLRPLDEAMSKDIFKRYLEALDSNKQFFTEADIDNFSAFKAEIPDSIRNGNLKPAFSIFAVYKKRVAERVTYANQLLKQNFDFSGQEKYEYDRSKAPWPASPQDLDDIWRRSTMNDWLRLKLAGKKPEDIRKTLKKRYANLLKTVNELKGEDVFQLYLNAYTNSIDPHTDYFTPRTADAFNQQMSLSLEGIGAQLQKQEDMVIIREVIPGGPTALDGTLKPGDRIVGVGQGKGGPIEDVIGLRIDDVVSKIRGKKDTQVRLEYIPAESGIDGAHRIVTLTRQKVRLAEQAAKGETITIEGSNGDAQRRIGIIKLPTFYEDFEGRRRNVANYTSATRDVAKLLTNFKTDKVDGVVLDLRNNGGGSLDEAIQLTGLFIEQGPVVQVRESGGRVTVNGDRDDKVTWDGPLAVLINRGSASASEIFAGAIQDYGRGLVIGETSFGKGTVQNIVDLDRWPANESRRFGQVKLTIAQFFRISGSSTQHKGVLPDIAFPASVGATEFGESTYENALPWTRIASLQHTQYGNFSPILSKLKKIHISRTANDIEFKWWQEDVHNFSLEKEKKYVILNEAERLAERRKQETQHRERQTIRKNLGLQLDPLSEESDDGLIGNERDIAKDTAREKLADKRPDPLLHESAAILTDTINLLEKDQILSAQVLLQSTTPGHWAN

SEQ ID NO: 15370 - protein, 158 aa, Triticum aestivum
MSGNSEKAPITFKHQVVIWWAGLMRGAVSIALAYNQFTFSGVTQDPVHATIITSTIVVVFFTTLVFGFLTRPMISAMLPQHRHREPTGGRSTGSNSPKDEFILPFLGDEDASGSGSGFVQAKRSISMMLERPIHTVHIYWRKFDDRFMRPIFGGPRSY

SEQ ID NO: 15371 - protein, 612 aa, Pinus pinaster; identical to SEQ ID NO: 8436

SEQ ID NO: 15372 - protein, 469 aa, Vibrio campbellii AND4
MSVENVLSLIQENEVKFVDLRFTDTKGKEQHISIPAHQIDADFFEEGKMFDGSSVAGWKGINESDMVMMPDASSAVLDPFTEDATLNIRCDILEPATMQGYDRDPRSIAKRAEDFMRSTGIADTVLIGPEPEFFLFDDVKFATNMSGSFFKIDDVEAAWNTGSDYEEGNKGHRPGVKGGYFPVAPVDSSQDIRSAMCLVMEEMGLVVEAHHHEVATAGQNEIATRFNTLTTKADEIQIYKYVVHNVAHAFGKTATFMPKPLVGDNGSGMHVHQSLAKDGVNLFAGDKYGGLSETALYYIGGIIKHARAINAFANPSTNSYKRLVPGFEAPVMLAYSARNRSASIRIPVVPSPKARRIEVRFGDPAANPYLAFAAMLMAGLDGIKNKIHPGEAMDKDLYDLPAEEAAEIPTVAYSLKDALEELDIDREFLTAGGVFSDDFIDSYIGLKSQDVEKVNMTTHPLEFELYYSV

SEQ ID NO: 15373 - protein, 1256 aa, Arabidopsis thaliana
MKRKHYFEFNHPFNPCPFEVFCWGTWKAVEYLRIENGTMTMRLLENGQVLDDIKPFQRLRIRSRKATLIDCTSFLRPGIDVCVLYQRDEETPEPVWVDARVLSIERKPHESECLCTFHVSVYIDQGCIGLEKHRMNKVPVLVGLNEIAILQKFCKEQSLDRYYRWRYSEDCSSLVKTRLNLGKFLPDLTWLLVTSVLKNIVFQIRTVHEKMVYQIVTDEDCEGSSSSLSAMNITVEDGVVMSKVVLFNPAEDTCQDSDVKEEIEEEVMELRRSKRRSGRPERYGDSEIQPDSKDGWVRMMPYRYNIWNVSSDDDDEEEDCEDDKDTDDDLYLPLSHLLRKKGSKKGFSKDKQREIVLVDKTERKKRKKTEGFSRSCELSVIPFTPVFEPIPLEQFGLNANSLCGGVSGNLMDEIDKYRSKAAKYGKKKKKKIEMEEMESDLGWNGPIGNVVHKRNGPHSRIRSVSRETGVSEEPQIYKKRTLSAGAYNKLIDSYMSRIDSTIAAKDKATNVVEQWQGLKNPASFSIEAEERLSEEEEDDGETSENEILWREMELCLASSYILDDHEVRVDNEAFHKATCDCEHDYELNEEIGMCCRLCGHVGTEIKHVSAPFARHKKWTTETKQINEDDINTTIVNQDGVESHTFTIPVASSDMPSAEESDNVWSLIPQLKRKLHLHQKKAFEFLWKNLAGSVVPAMMDPSSDKIGGCVVSHTPGAGKTFLIIAFLASYLKIFPGKRPLVLAPKTTLYTWYKEFIKWEIPVPVHLLHGRRTYCMSKEKTIQFEGIPKPSQDVMHVLDCLDKIQKWHAQPSVLVMGYTSFLTLMREDSKFAHRKYMAKVLRESPGLLVLDEGHNPRSTKSRLRKALMKVDTDLRILLSGTLFQNNFCEYFNTLCLARPKFVHEVLVELDKKFQTNQAEQKAPHLLENRARKFFLDIIAKKIDTKVGDERLQGLNMLRNMTSGFIDNYEGSGSGSGDVLPGLQIYTLLMNSTDVQHKSLTKLQNIMSTYHGYPLELELLITLAAIHPWLVKTTTCCAKFFNPQELLEIEKLKHDAKKGSKVMFVLNLVFRVVKREKILIFCHNIAPIRLFLELFENVFRWKRGRELLTLTGDLELFERGRVIDKFEEPGGQSRVLLASITACAEGISLTAASRVIMLDSEWNPSKTKQAIARAFRPGQQKVVYVYQLLSRGTLEEDKYRRTTWKEWVSSMIFSEEFVEDPSQWQAEKIEDDVLREIVEEDKVKSFHMIMKNEKASTGG

SEQ ID NO: 15374 - protein, 162 aa, Pseudomonas syringae pv. syringae B728a
MSAFHDIKLKALGGQELPLANFRKKVVLVVNVASKCGLTPQYAALENLYQQYKDQGLEILGLPCNQFAGQEPGTEQEIAEFCQLNYGVTFTLGEKLDVNGPNRHSLYRLLAGEGAEFPGDITWNFEKFLVGKNGGVSARFSPRTTPDDPAVIQAIEKALAQS

SEQ ID NO: 15375 - protein, 162 aa, Novosphingobium aromaticivorans DSM 12444
MSGPRTIADFKARKPNGEEIDLAEKKGKVLLVVNTASKCGFTPQYDGLEALWRQYGERGFEVLAFPCNQFGKQEPGTADEIESFCKVNFGLSFPLMAKIEVNGDNADPLYDWLKSEAPGVLGTKSIKWNFTKFLIDREGRVVRRYAPTDKPESIAGDIERLL

SEQ ID NO: 15376 - protein, 668 aa, Glycine max; identical to SEQ ID NO: 13640

SEQ ID NO: 15377 - protein, 1465 aa, Arabidopsis thaliana
MVWLCHHAFFMPFSLSLSAHLSLFHFLKPVKIKNFSKNSRTSSSSSQTRIFVFALMECIGKRVKSRSWQRLQAVNKRKKMETVAPVTSPPKKRRQKKPKNYDSDIEDITPTCNDSVPPPQVSNMYSVPNNSVKESFSRIMRDLNVEKKSGPSSSRLTDGSEQNPCLKERSFRVSDLGVEKKCSPEITDLDVGIPVPRFSKLKDVSEQKNTCLMQKSSPEIADLDLVISVPSSSVLKDVSEEIRFLKDKCSPEIRGLVLEKSVPGEIEILSDSESETEARRRASAKKKLFEESSRIVESISDGEDSSSETDEEEEENQDSEDNNTKDNVTVESLSSEDPSSSSSSSSSSSSSSSSSSSDDESYVKEVVGDNRDDDDLRKASSPIKRVSLVERKALVRYKRSGSSLTKPRERDNKIQKLNHREEEKKERQREVVRVVTKQPSNVVYTCAHCGKENTGNPESHSSFIRPHSIRDEIEDVNNFASTNVSKYEDSVSINSGKTTGAPSRPEVENPETGKELNTPEKPSISRPEIFTTEKAIDVQVPEEPSRPEIYSSEKAKEVQAPEMPSRPEVFSSEKAKEIQVPEMPSIPEIQNSEKAKEVQANNRMGLTTPAVAEGLNKSVVTNEHIEDDSDSSISSGDGYESDPTLKDKEVKINNHSDWRILNGNNKEVDLFRLLVNSVWEKGQLGEEDEADELVSSAEDQSQEQAREDHRKYDDAGLLIIRPPPLIEKFGVEEPQSPPVVSEIDSEEDRLWEELAFFTKSNDIGGNELFSNVEKNISANETPAAQCKKGKHDLCIDLEVGLKCMHCGFVEREIRSMDVSEWGEKTTRERRKFDRFEEEEGSSFIGKLGFDAPNNSLNEGCVSSEGTVWDKIPGVKSQMYPHQQEGFEFIWKNLAGTIMLNELKDFENSDETGGCIMSHAPGTGKTRLTIIFLQAYLQCFPDCKPVIIAPASLLLTWAEEFKKWNISIPFHNLSSLDFTGKENSAALGLLMQKNATARSNNEIRMVKIYSWIKSKSILGISYNLYEKLAGVKDEDKKTKMVREVKPDKELDDIREILMGRPGLLVLDEAHTPRNQRSCIWKTLSKVETQKRILLSGTPFQNNFLELCNVLGLARPKYLERLTSTLKKSGMTVTKRGKKNLGNEINNRGIEELKAVMLPFVHVHKGSILQSSLPGLRECVVVLNPPELQRRVLESIEVTHNRKTKNVFETEHKLSLVSVHPSLVSRCKISEKERLSIDEALLAQLKKVRLDPNQSVKTRFLMEFVELCEVIKEKVLVFSQYIDPLKLIMKHLVSRFKWNPGEEVLYMHGKLEQKQRQTLINEFNDPKSKAKVFLASTKACSEGISLVGASRVILLDVVWNPAVERQAISRAYRIGQKRIVYTYHLVAKGTPEGPKYCKQAQKDRISELVFACSSRHDKGKEKIAEAVTEDKVLDTMVEHSKLGDMFDNLIVQPKEADLVEGFSILMP

SEQ ID NO: 15378 - protein, 493 aa, Pseudomonas fluorescens
MKLNKQNLTQLAPEVKLPAYTLADTRQGIAHIGVGGFHRAHQAYYTDALMNTGEGLDWSICGVGLRSEDRKARDDLAGQDYLFTLYELGDTDDTEVRVIGSISDMLLAEDSAQALIDKLASPEIRIVSLTITEGGYCIDDSNGEFMAHLPQIQHDLAHPSSPKTVFGFICAALTQRRAAGIPAFTVMSCDNLPHNGAVTRKALLAFAALHNAELHDWIKAHVSFPNAMVDRITPMTSTAHRLQLHDEHGIDDAWPVVCEPFVQWVLEDKFVNGRPAWEKVGVQFTDDVTPYEEMKIGLLNGSHLALTYLGFLKGYRFVHETMNDPLFVAYMRAYMDLDVTPNLAPVPGIDLTDYKQTLVDRFSNQAIADQLERVCSDGSSKFPKFTVPTINRLIADGRETERAALVVAAWALYLKGVDENGVSYTIPDPRAEFCQGLVSDDALISQRLLAVEEIFGTAIPNSPEFVAAFERCYGSLRDNGVTTTLKHLLKKPV

SEQ ID NO: 15379 - protein, 285 aa, Dictyoglomus thermophilum H-6-12
MHDYEWYVDLVAEDQMHCYKVEEVIVDLISPYQKIQIIKNPTYGKCLIIDGKMQSAEKDEFIYHETLIHPALILHPNPKNVLVIGAGEGATLRELLKYENLSIVAVEIDPNVVDFAEKYLWEWHQGAFRSDRVRLVFEDGWNFVRDTNERFDVVVLDLPEPYPDTPAYRLYTEDFYKMVYNILNPSGIVVTQAETVQLGQEYKHFNIKKSFSAVFKSSYSYQTFIPSFDGSWGFLIGSRDNLDPFKPVDVINKLISQRIKGELRYYDGETHNHLFHLPKYLRGAF

SEQ ID NO: 15380 - protein, 324 aa, Triticum aestivum
MEAETAAKRARENEGAAAADGAGEQAGISAVIPGWFSEISPMWPGEAHSLKVEKVLFQGKSDYQDVLVFQSSTYGKVLVLDGVIQVTERDECAYQEMITHLPLCSIKDPKKVLVIGGGDGGVLREVSRHSSVEQIDICEIDKMVVDVSKQFFPHLALGFEDPRVSLHIGDGVAFLKNAPEGTYDAVIVDSSDPVGPAQELFEKPFFESVSRALRPGGVVCTQAESIWLHMHIIEDIVTNCRQVFKGSVNYAWTTVPTYPSGVIGFMLCSTEGPSVDFQHPVFSIEEDEYSTKSKGPLKFYNSEFHTASFCLPSFARRVIEAKAN

SEQ ID NO: 15381 - protein, 161 aa, Polaromonas sp. JS666
MNTVYAFEARQINGQNIPLSEFSGKVMLIVNTASQCGFTPQFGGLEELHKTYAGKGLAVLGFPCNQFGSQDPGSDGEIAEFCQVNYGVSFPMMSKIDVNGPAAHPLYKWLTAEAPGLLGSKSIKWNFTKFLVGKNGQVIKRYAPTDKPAELARDIEAALAA

SEQ ID NO: 15382 - protein, 221 aa, Larix potaninii var. potaninii
KAAGARIIVTQAAYVEKLADLQSDDVIIITIDGAPKEGCQHISVLIEADETQCPSVEIHPDDVVALPYSSGTTGLPKGVMLTHKSQVSSIAQQVDGENPNLYFHSEDVILCVLPLFHIYSLNSILFCALRAGAAILIMQRFNLTTLLELIQRYKVTVAPFVPPIVLDITKNPIVSQYDVSSVRIIISGSAPLGKELEDALRERFPKAIFGQGYGMTEAGPV

SEQ ID NO: 15383 - protein, 221 aa, Larix potaninii var. potaninii
KAAGARIIVTQAAYVDKLADLQCDDMIVIAIDGAPKEGCQHISILTEADETQCPSVEIHPDDVVALPYSSGTTGLPKGVMLTHKSLVSSVAQQVDGENPNLYFHSGDVILCVLPLFHIYSLNSVLLCALRAGAATLIMQKFNLTTLLELIQRYKVTVAPIVPPIVLEISKNPIVSQYDVSSVRIIMSGAAPLGKELEDALRERFPKAIFGQGYGMTEAGPV

SEQ ID NO: 15384 - protein, 221 aa, Larix speciosa
KAAGARIIVTQAAYVEKLAELQSDDVIVITIDGVPKEGCQHISVLTEADETQCPSVEIHPDDVVALPYSSGITGLPKGVMLTHKSQVSSVAQQVDGENPNLYFHSEDVILCVLPLFHIYSLNSILFCALRAGAAILIMQRFNLTTLLELIQRYKVTVAPFVPPIVLDITKNPIVSQYDVSSVRIIISGSAPLGKELEDALRERFPKAIFGQGYGMTEAGPV

SEQ ID NO: 15385 - protein, 221 aa, Larix speciosa
KAAGARIIVTQAAYVDKLADLQSDDMIVIAIDGAPKEGCQHISILTEADETQCPSVEIHPDDVVALPYSSGTTGLPKGVMLTHKSLVSSVAQQVDGENPNLYFHAEDVILCVLPLFHIYSLNSVLLCALRAGAATLIMQKFNLTTLLELIQRYKVTVAPIVPPIVLEISKNPIVSKYDVSSVRITMSGAAPLGKELEDALRERFPKAIFGQGYGMTEAGPV

SEQ ID NO: 15386 - protein, 374 aa, Acanthothamnus aphyllus; identical to SEQ ID NO: 8454

SEQ ID NO: 15387 - protein, 221 aa, Larix speciosa
KAAGARIIVTQAAYVEKLADLQSDDVIIITIDGAPKEGCQHISVLIEADETQCPSVEIHPDDVVALPYSSGTTGLPKGVMLTHKSQVSSVAQQVDGENPNLYFHSEDVILCVLPLFHIYSLNSILFCALRAGAAILIMQRFNLTTSLELIQRYKVTVAPFVPPIVLDITKNPIVSQYDVSSVRIIISGSAPLGKELEDALRERFPKAIFGQGYGMTEAGPV

SEQ ID NO: 15388 - protein, 245 aa, Triticum aestivum
RILRIEMSPLQKQYYKWILERNFQNLNKGVRGNQVSLLNVVVELKKCCNHPFLFESADHGYGGDSIGDRNKVERIVMSSGKLVLLDKLLLRLRETNHRVLIFSQMVRMLDILSEYLSLRGFQFQRLDGSTRADLRHQAMEHFNAPGSDDFCFLLSTRAGGLGINLATADTVIIFDSDWNPQNDLQAMSRAHRIGQQDTVNIYRFVTCKSVEEDILERAKKKMVLDHLVIQKLNAEGRLEKKEPKR

SEQ ID NO: 15389 - protein, 427 aa, Photobacterium profundum SS9
MSVYDTICIIAAVAVFISLFNHRVGKFQTTIAITGWSVIISLALLFLSNMNYIPLNKEHELINIIQNIQFDDFLLKGVLGFLLFGGALNIKLPHLKDQKFEITILALASTLFSTFFIGTVLWLLFSLVGINMAFIHCCLFGALISPTDPIAVLAIVKKMNAPQRVSTQIEGESLFNDGIGLVIFVTLFEVAFGETAPTVSSTIALFTHEALGGIAFGLVLGLVFHYLIKHSHDSMMRLILTMLIPTSGYVLGQHLGVSAPLAMVVSGIMIGNWTRNSIAEDESNQLNHLWELADEILNAILFLLIGLIMLTFSFHYIDIVAVAIAIPLVLCSRYLSVKIAYLGFNRYRTYNPESIKILTWGGLRGGLALAMAMAIPSGIATGFSPEIDVKEIIVLMTYAVVVFSIIIQGSTITPMIHKAKELEKTGY

SEQ ID NO: 15390 - protein, 364 aa, Brexia madagascariensis; identical to SEQ ID NO: 8455

SEQ ID NO: 15391 - protein, 541 aa, Medicago sativa
MAIEMSSIVSKLSMLSTSDHASVVSMNLFVALLCACIVLGHLLEENRWMNESITALLIGICTGVVILLFSGGKSSHILVFSEDLFFIYLLPPIIFNAGFQVKKKQFFVNFMTITSFGAIGTLISCVIITTGATFAFKRMDIGPLEIGDYLAIGAIFAATDSVCTLQVLNQDETPLLYSLVFGEGVVNDATSVVLFNAIQSFDLNQLNPSIALHFLGNFLYLFVASTLLGVVTGLLSAYVIKKLYIGRHSTDREVALMMLMAYLSYMLAELTYLSGILTVFFCGIVMSHYTWHNVTQSSRITTKHSFATLSFVAEIFIFLYVGMDALDIEKWKFVSDSPGTSIAASSVLLGLILLGRAAFVFPLSFLSNLTKKSQHQKISFRQQVIIWWAGLMRGAVSMALAYNQFTMSGHTQLRSNAIMITSTITVVLFSTVVFGLLTKPLIRLLLPHPKITSSMTTTESTTPKSFIVPLLGDSRDSEADLEGHEIHRPNSLRALLSTPTHTVHRLWRKFDDSFMRPVFGGRGFVPVEPGSPSERNGNQWG

SEQ ID NO: 15392 - protein, 135 aa, Salmonella enterica
GDNGSGMHCHMSLAKNGTNLFSGDKYAGLSEQALYYIGGVIKHAKAINALANPTTNSYKRLVPGYEAPVMLAYSARNRSASIRIPVVASPKARRIEVRFPDPAANPYLCFAALLMAGLDGIKNKIHPGEAMDKNL

SEQ ID NO: 15393 - protein, 361 aa, Brexia madagascariensis; identical to SEQ ID NO: 8458

SEQ ID NO: 15394 - protein, 241 aa, Arabidopsis thaliana
MAAKVSVSPTSLLNQIVVPGDVVLDLSNMNNQTIKLGSGLLQDNDAISAMGAGKLSYSKPNKYWLESSHKRYIPRPDDHVLGIVVDSRADNFWVDIKGPQLALLPVLAFEGGTRRNIPKFEVGTLLYLRVVKTNIGMNPELSCTEASGKAALFGPLRDGFMFETSTGLSRMLLNSPTRPVIEALGKKLSFEIAVGLNGRVWVNATAPRIVIIVANAIMNSESLSGTQQRIMVEKLLAIISD

SEQ ID NO: 15395 - protein, 1580 aa, Ashbya gossypii ATCC 10895
MASQVPVVDLTSDEAEDNGRNGQQDPPGALRRLYEDFGDGKERNEMGREEPGANEATRRLASLNRAASSAMRSGAASPTGMGLYNPKPADVRLPWRSPGVDMAEPEHKPSAWAPAGGVKRRRLSVAPGAPAVRCAEAGSNDGQDYDEDFSGLESSPETPDPEILVDTEEDPLLRRVLDDRGEVRLYRAQSVPSTQGSNDTPILLLSSDDEAGRPSGEREPNSASAKAAQSSWKMTTMKSSSDREIEYPSQDALLQHLARREQDYYDKLVQLKTTKQILQSKISRRETQIRAKGDSNEKLIDANRNTQGKLTNAEALLRRTELDYAAFQRQKREALLRMQLSMVDQKADKVRYQQTKMALLRVQLDNAPHTFGDEAELKNELRRIRSELSSLSVSEETHADRSEASHGIFKRTCMKALELLEASDRSQENRQAVQRLIKEVLRLEEHFLSKSLSAGERERGSKISQELQRQGIRMPFVYNRLQSICDTPESVVANINENLGAAEFISALNSALSSGNTMTEKSQTANSAAFFYTISKVRSILASSNRSPELKTDINNNLLAIEAYQQLVFCGLTPDDERKSAVLKAIRMLYKQGVKMPLVYQVLEEQGLNWRYDPTGALKNISDARDLIAQNTKRSAETKQKIYNLLDEVEKTIKETMQNVTPTIYKTTNISLNLTALKNLGVKMPVVDRTVAAYLKRMKKSSQQPQKSVKVESETSTDSINGDEEMRYFQSIQQAVSTYSTALNRARLGYDRVRRILLALEALRAYRELFHRADAPLFWNQKVQDSLNTLMDINLQLPPVFRYLKQRGFHTGDNKYVNSDDIDKDGVIEPLMIQGDPEDADLKELGDLAAGNQLQMANIYTSRDHQSLNELLESLKQAETSIDGEELTPPDMTVNLLKHQRQGLYWLLKTESSKFKGGLLADDMGLGKTVQAIALMLANRSADSTCKTNLVVGPVAVLRVWHDEINTKVKKQAQFSVMIYGGFGGKKVENFKAMHNYDVVLVSYQTLAVEFKKHWPARLQGTSENGGQLPEVASIKAMNSMKLRNEYWSPFFSDDSNFYRIILDEAQNIKNKQTQAAKACCTLNGTYRWALSGTPIQNNILELYSLLRFLRIAPYNREQKFKEDIGNALLSRGGDFDSMDTKRALKKVRVLLRAIMLRRAKTSQINGQPILELPAKHIRKKEDILDGQDLEFYKSLEHETAIQARALLNERKASSSSNILTLLLRLRQACCHQELVKLGKAKAIGTRVVNGMDFIKDWLRLYNVAKRIGTEGKGTVSQSLENMICPFCMEQMEIESLSVLTPCGHLLCDACVEPYLEDARESEYARKGPKGTRSTFVPCLVCEKLINDHEIISYQLYHQAVVKGISTDELREEYENEMTKRRHKLKYDYQLNFENLHQSKKVQQCLGIIKTVLDNSTDEKLIVFSQFTTFFDILQFFIKKVLNVSYLRYDGTMNGNVRASVIERFYREKNERLLLISMKAGNSGLTLTCANHVILVDPFWNPYVEEQAMDRCYRISQQREVYIHRLLLKNTIEDRIVELQNRKRTLVENAMDPTELREVNRLGRQELGFLFGINSLPGRE

SEQ ID NO: 15396 - protein, 363 aa, Campylostemon angolense; identical to SEQ ID NO: 8459

SEQ ID NO: 15397 - protein, 4229 aa, Oryza sativa Indica Group
MASSQQVELEAAKLLQKLIQESKDEPAKLATKLYVICQHMKLSGKEQSLPYQVISRAMETVVSQHGIDMDALRSSRIPLAGGPQAGDSSGAMPKDKEIIGSQPPMVGTDASQSSAHAGLWNFPSGSADMARHSASISGRVPAGPNRSDVAGADIHQGSMSQKSGRSSGMESPASLQIEDTRSMNSHDSLKSDEKTSKKSSSKRKRVDPKATGDLHSEDNSKSDAMSTGQNIRKGKQPGKAGTQGQLSRTVEHDPSHTLQVGNAQVPPLPSGAPFFRAHQEGPSASSARTIDKTKPSNPFTMAQISNFAEGLASGNIPAELQKSILGGANLLNASFGWNQNAQGPVMKNTQGSVPNLMRPGVNVEGKVNLGSQGTFNSMSASQMDYPTVPPYVSSSFGGGPQYLDKGKDLTSGNTGSELNSSKAGAQLGIMHMHFDTQMRYNFQGSPMQERHGIVRAPQRAGSSQMSQTSPSIPFKEQQLKQLRAQCLVFLAFRNNLQPRKVHLEIALGVGPPASEGGSAGQRGSESRMADGSGKENGNNQENPAIFGRQSDISRLQSTSTGSVADVDSASKDPEIVKKKIKIAEHEKSLEAENIQQTVPVQGTDSEMHSQETISPMPSGQLHYFQGDTRKTTPEIYKADAENLNRNLGWGGGQGPSPLGGNRHPSMEVGLLAKDEVSKEPFAVLRPHHMPVDGSNHNLSGKDQTPETAGNEIENGSHMGEMIFERSADEGDEDLSEQDDLPSSPPKYTMTDKWILDHQKRRYEENKRKALDLQKAHRRISASYEKLKENVSSSEDLSAKTKSVIELKKLQLLQLQRRVRSEFLQDFFKPNTTDLDRIKSVKKHRHGRRVKQLEKIEQKMKEERQKRIRERQKEFFADIEAHREKLEDSFKVKRERLKGFNRYVKEFHKRKERIHREKLDRIQREKINLLKNNDVEGYLRMVQDAKSDRVKQLLRETEKYLQKLGAKLQGSKSMDGRVSYASDSTANDIEDESYQPQHYLESNEKYYQLAHSVKEVVNDQPSYLQGGKLREYQMNGLRWLVSLYNNNLNGILADEMGLGKTVQVISLLCYLMETKNDRGPFLVVVPSSVLPGWESELNFWAPSINKIAYAGPPEERRKLFKEMIVHQKFNVLLTTYEYLMNKHDRPKLSKIQWHYIIIDEGHRIKNASCKLNADLKHYRSSHRLLLTGTPLQNNLEELWALLNFLLPNIFNSSEDFSQWFNKPFESNGDSSTEEVENELPEKIERLVRCWPSAYQKLLIKRVEENLGGIGAVKIEGYLPRHYLPSILRLCGKLEMLDRLLPKLKATGHRVLLFSTMTRLLDVMEDYLVWKKYKYLRLDGHTSGQERGALIDKFNNPNSQAFIFLLSIRAGGVGVNLQAADTVIIFDTDWNPQVDLQAQARAHRIGQKKEVLVLRLETVQTVEEQVRASAEHKLGVANQSITAGFFDNNTSAEDRREYLESLLRGGKKEEAAPVLDDDALNDLLARSEDEIDIFESIDKQRREEEMATWLTVVQNSSTSGLDPSVMPSRLVTDDDLKSFCHAMKIYESSNIKSVKVVRRKGELGGLDTQHYGRGKRAREVRSYEDQWTEEEFEKLCQVDSPDSPQPGGISRDADVPKVVKLEVPPESSKEPEQAKKEPASSVGDSPPAKRRRGRPRRSDASLSPVTAPPNTGKQEAGTIIDGSSAPTTTIHSVAPDVTIDSTALSATGNPDVGTEIKGTTPDGTIKPVICTDNEGTTSIAVLEGSNAKEVGIPAHSVHEPVSSSAPHPPTPVTSRGRKTQAGETPRRRGRKPKSLAASAGDVIVSPVVAVGSGEAYASSVVSSYPQGNVSSSHASATAGLQKDTIISKPAALLPEGVKGTPTPSGGEKDEMVKTPLAGDIYAGTVTTSGNASSQLPMIAHNENAGLVQGGTGQNLSVATPTIPVVSEGSTKISEVVVADKPAEKQGARRRRKKTSGTGSEDTGVSTRQRAASRRLYGTGAADIAGTDMSTGEKIGIVKEIDGSCQDTSKGLPNIISPSYEKSGYDSQPSTPIAVPINEATLPSGFSEAHATHSEIHPARESISSVGHDKLADAHLEAPPSVPFQAPVQQETGKDYVGVHSEVMTTHPETITTHSSVNPVIDHKLANVQFESHASLHTSGKDITTMPSEVDSGAPSKAPGRRRKGSAREPRTRSNSATAASERRARHAGSKQPDDTKMAEMSGNPSTAVCSSTQQQEDNTLKAAHATGSVGEEQNNAENRVREVSMPAGILKTKLELTKQTDQAGTDEKGAALSTQIPALDEKSGERELPGGHNSEQEQEMVSAAKSASANDEEHKVHEVHQIIADHNALPSSAQSETRLEKTEETVDKSGGDNLPTIEKNDDSPIERSSLSADKIAQVADGGEAGTETTTVEAVSAMNSDGLQDVRNALSTHGLSTNDITVASEEHKDPESHLSGEVSTSGGSSELKLESLNQSESACQSGEVTPEDTHATLDIQIPALTESEEKKSPGGDVHGSEEHNMHEVLHNTVDGSISPSNGEPDKLQVHIDTNTDVDMPSSDKDHSTDIVLAGCEAPCDASGKDKLSTCDASGKDMAAPTDSDLNCLQSEDTVIPVTGAKDETTLVKAIQNDDMSMGSSHGLSATIQSTDSERLAEEGESAEITGSKFSCGMEQEKMEEPLDKSVTDNQTSSQINDGSNNMDSQKVDSSLQAADRGDLLVSKGTSVEITTAINTDALDEGISVSTQSVQEVSTVEIGASTNDIAPACELRKDFESHVSGYVSKPVGLSELRLEELSQSKSVSQSIAANAEETSTRSDIETPAMDASEKLSERMEFTGPTPSANEKSNELHSQELVTMISAAETASTEGHREKDTCEVDHKIDCTIFSPIGDQDTRDRTDGDTDCGVPSCQRNAAFDSENEVSAEINLTGNQAPCDAPNKATPAPSEDDHNGQESEDTVIGAEQGAIEVEAMQIDGISKSYSSDSHATLQSSDSNQLVNSDSKFESLNKHDKTDETSNESRGDNPTHSCTNDDSHDKNLVGCSPSEDLNEDNSAQLADGDDLVGSKDTTAAHAGGLKELTSGNYVASSSSLVVQDLTSFSKMESLQAGSEEIHHGYPDETIHSARIKPVVGTEITENASVASAPVITIQPNIETEAGVTASLTVLEGSIAEEVDAQVESGHDLVASTAPLSPAPLPGESDACTDVSCPVAEEVSETKLESANHTASQLGAAYTEACTETPNALLNTLIPALPESEETKLSGSDTDGKTIIAELASSSDEHDKVHEVGNETGDDNKLPSSVAEDAVQDEISGSADMDSQIIAGSSEAENNDSTVATIADSQIPFDPSDKDTLAEDGNGLQREGTTVDVTGSKEDDMEAEEKQMDDSHLPAALQSAESSQPTEHAAPTQDDGNDLQCEGTTVDVSGSKEDIMEVEEKLIDDISGSPSSHLPAALKSTESNQPAEHAAPTEDDGDGLQSEGTAVDVVDSKNDDMEVEEKQIDISRGSSSFLPGALESAELNQPAEHTTPTEDHGNGLQSEGTAVDVPCSKEDNMEVEEQIDEISRGPSSFSPDTLESGELNQAAEHAAPTEDDGNGLQSEGTSVDVAGSKEDNIEVEEKIDDISRGSSSHLPDVLQSTPNQHSEQECLDNSDDVNASVVSSHAPLSGPKFTCVKELEKADETLETSDAQVADEVCLQTNDGAHNMASGSCSTLEDKNEDSSAQITDCEDLLLRKGATVDDLDGCVEGHSGLSTHSNDEVGNPVEIVKGMNDTSAGSEVHVDPESHVSDEVSMPVVPSELKVELKNQSEPACQFGAVIVEESNVSLSIQTPALAESEEMTSGGFMHGTEVCASEQTNIGAAAEPASTKDDHDMHEVDKEIVHCTISSPIGDQENLQGNIDGKMDVGLAACQTQSDFVSENDHSRETDLAGSQAPCDASDKEDTAAELIGPKQATLEIEKMQIDGIPEGPSSDLPAVLQLTDSNQPAEQERLENSDSKFASTKDQGRVDGTSNLSGGDNAKCSLTNDDSQTVNLVGYSPSEDSNDDDSVQAADGDGVLGNKEGTDDIISAACTDDVSMLKTESIDRHGSDEVDHSTAPSAAIKQESGTEVTCDASVPVSESSISKEIGTSPECDDDQVATAAPHPPTPLSDATDVSADVQIPAGISEAKLEQPNETTSPSGAATEENNTVVSTQIPTLAESEDRTPADTAVQGTEVDSAEPASVSDDENKVTAADDSALPSTGPEDTADDKIDSSADASEK

SEQ ID NO: 15398 - protein, 133 aa, Salmonella enterica
MPKPMFGDNGSGMHCHMSLAKNGTNLFSGDKYAGLSEQALYYIGGVIKHAKAINALANPTTNSYKRLVPGYEAPVMLAYSARNRSASIRIPVVASPKARRIEVRFPDPAANPYLCFAALLMAGLDGIKNKIHP

SEQ ID NO: 15399 - protein, 595 aa, Mycoplasma genitalium G37
MSADNGLIIGIDLGTTNSCVSVMEGGRPVVLENPEGKRTTPSIVSYKNNEIIVGDAAKRQMVTNPNTIVSIKRLMGTSNKVKVQNADGTTKELSPEQVSAQILSYLKDFAEKKIGKKISRAVITVPAYFNDAERNATKTAGKIAGLNVERIINEPTAAALAYGIDKASREMKVLVYDLGGGTFDVSLLDIAEGTFEVLATAGDNRLGGDDWDNKIIEYISAYIAKEHQGLNLSKDKMAMQRLKEAAERAKIELSAQLETIISLPFLTVTQKGPVNVELKLTRAKFEELTKPLLERTRNPISDVIKEAKIKPEEINEILLVGGSTRMPAVQKLVESMVPGKKPNRSINPDEVVAIGAAIQGGVLRGDVKDVLLLDVTPLTLSIETLGGVATPLIKRNTTIPVSKSQIFSTAQDNQESVDVVVCQGERPMSRDNKSLGRFNLGGIQPAPKGKPQIEITFSLDANGILNVKAKDLTTQKENSITISDNGNLSEEEIQKMIRDAEANKERDNIIRERIELRNEGEGIVNTIKEILASPDAKNFPKEEKEKLEKLTGNIDAAIKANDYAKLKVEIENFKKWREEMAKKYNPTGEQGPQAK

SEQ ID NO: 15400 - protein, 361 aa, Campylostemon angolense; identical to SEQ ID NO: 8463

SEQ ID NO: 15401 - protein, 616 aa, Yarrowia lipolytica CLIB122
MPQIIHKSAWGDIPLSTFFYGNVTDYLRSKKSFGSDKIGYIDAETGEGITYKQLWKLANGISAVLYHHYGIGHARAPVASDHTLGDVVMLHAPNSRFFPSLHYGMLDMGCTITSASVSYDVADLAHQLRVTDASLVLCYQEKENNVRQAIKEAQKDAAFPGITHPVRILLIENLLTMACNISEEKINSAMARKFEYSPQECTKRIAYLSMSSGTTGGIPKAVRLTHFNMSSCDTLGTLSTPSFSTGDDIRVAAIVPMTHQYGLTKFIFNMCSSHATTVVHRQFDLVKLLESQKKYKLNRLMLVPPVIVKMAKDPAVEPYIPSLYEHVDFITTGAAPLPGSAVTNLLTRITGNPQGIRHSQSGRPPLTISQGYGLTETSPLCAVFDPLDPDVDFRSAGKATSHVEIRIVSEDGVDQPQLKLDDLSHLDGMLKRDEPLPVGEVLIRGPMIMDGYHKNRQSSEESFDRSQEDPKTLIHWQDKWLKTGDIGMVDQKGRLMIVDRNKEMIKSMSKQVAPAELESLLLNHDQVIDCAVIGVNSEAKATESARAFLVLKDPSYDAVKIKAWLDGQVPSYKRLYGGVVVLKNEQIPKNPSGKILRRILRTRKDDFIQGIDVSKL

SEQ ID NO: 15402 - protein, 155 aa, Triticum aestivum
MEFDKRTGTPSPLLPRSASTVTYCCGRCGYDLKLSSSARDTAGIVGAGAGGARRRGWRSAAVVVFDAIDDARFGHLDEFRCLDLRARRLFARRTRLLCRKCGAHVGFGYDDNTTATRPPRYHIKIRALHPASSDDAFSGAATPPPPSHAPADPRS

SEQ ID NO: 15403 - protein, 154 aa, Salmonella enterica
MPKPMFGDNGSGMHCHMSLAKNGTNLFSGDKYAGLSEQALYYIGGVIKHAKAINALANPTTNSYKRLVPGYEAPVMLAYSARNRSASIRIPVVASPKARRIEVRFPDPAANPYLCFAALLMAGLDGIKNKIHPGEAMDKNLYDLAAKNLYDLPP

SEQ ID NO: 15404 - protein, 508 aa, Enterococcus faecalis V583
MTISLFAIRDCLEKEDLLKEFISPEGWHLTLSDTLGQREVTALSYDSRDVTAETLFFCKGLNFKEIYLENAVKDGLEIYVSEVPYEVPAQLGIIVTDIKKAMAVLSMAFYDYPQNKLKLIGFTGTKGKTTAAYFTKYILDVATQQKTALLSTMNSTLDGKTFFKSALTTPESLDLYRMMATAVANGMTHFIMEVSSQAYKTNRVYKLFFDVGIFLNITPDHISPIEHPTFDDYFYCKRQLITHSKVIVLNHEADYFPLLKETAQQQKVPAIVYGSQPAPEVDYSFAVSSEDSLRFIVESPADALGLAGSYHLRLGGDFNKGNALSAAIASVLVGASKEECQQGIAATTVPGRMESLTNTNGATVYVDYAHNYDSLKNLLTFVREEHPDGRLIVLVGSTGDKAISRRKDFGRVLSELADVAVLTTDDPASEDPAKICQEIQAHITKEMPVYTVLDRGEAIAHALSLSTTADDAIVLAGKGADLYQKVNGVDEPYAGDFALAEAFINKKN

SEQ ID NO: 15405 - protein, 179 aa, Zea mays
MAEAPASPGGGGGSHESGSPRGGGGGGSVREQDRFLPIANISRIMKKAIPANGKIAKDAKETVQECVSEFISFITSEASDKCQREKRKTINGDDLLWAMATLGFEDYIEPLKVYLQKYREMEGDSKLTAKSSDGSIKKDALGHVGASSSAAEGMGQQGAYNQGMGYMQPQYHNGDISNV

SEQ ID NO: 15406 - protein, 607 aa, Myxococcus xanthus DK 1622
MGKVIGIDLGTTNSCVAVMEGGEPVVIPNSEGSRTTPSMVGFTDSGERLVGQIAKRQAITNPENTVFAAKRLIGRKFDSPEGKKAIGVSPFKVASSPNGDAWVEIRGKGYSPPEVSAIVLMKMKQTAEDYLGEQVSEAVITVPAYFNDSQRQATKDAGRIAGLSVLRIINEPTAAALAYGLDKVQDGGTERIAVYDLGGGTFDISILELNAGVFEVKSTNGDTFLGGEDFDQRLIDYLAKRFAESNNGLDLRKDRMALQRLKEAAERAKHELSSAPETEVNLPFITADASGPKHLTETVDRATFEALVTDLIDRTIEPCRIALKDAGIPAQQINQVLLVGGMTRMPRVQQKVKEFFGREPHKGINPDEVVAVGAAIQGGVLKGEVKDVLLLDVTPLSLGVETAGGVFTKIIDKNTTIPCKKSQVFSTAVDNQPLVSVHVLQGEREMAADNKTLARFELVGIPPAPRGVPQIEVSFDIDANGIVHVSAKDLGTGKVQQVRVVSNSGLSEAEIQAMISDAQSHASDDKKKKELAELRNNADGLIYTTEKSLEEYASLLSEKDREEIKADLERLKEVLNTSDAAVLKESFQRLEGSAYRIADAIYTGQAS

SEQ ID NO: 15407 - protein, 540 aa, Zea mays
MGLGVVAELVRLGVLSSTSDHASVVSINLFVALLCACIVLGHLLEENRWVNESTALIVGLGTGTVILMISRGVVIHVLVFSEDLFFFYLLPPIIFNAGFQVKKKQFFRNFITITLFGAVGTLISFTVISLGALGLISRLNIGALELGDYLALGAIFSATDSVCTLQVLSQDETPFLYSLVFGEGVVNDATSVVVFNALQNFDITHIDAEVVFHLLGNFFYLFLLSTVLGVATGLISALVIKKLYFGRHSTDREVALMMLMAYLSYMLAELFALSGILTVFFGCIVMSHYTWHNVTESSRITTKHAFATLSFLAETFLFLYVGMDALDIDKWRSVSDTPGKSLAISSILMGLVMVGRAAFVFPLSFLSNLAKKTEHEKISWKQQVVIWWAGLMRGAVSMALAYKKFTRAGHTQVRGNAIMITSTIIVVLFSTMVFGLLTKPLINLLIPHRNATSMLSDDSSPKSLHSPLLTSQLGSDLEEPTNIPRPSSIRGEFLTMTRTVHRYWRKFDDAFMRPMFGGRGFVPFVPGSPTERNPPDLSKA

SEQ ID NO: 15408 - protein, 750 aa, Cryptococcus neoformans var. grubii
MAVSQSHPNIVDGWFREINTQWPGQAMTLKVKQILHQEKSLFQDVLVFESETYGNVLVLDGVIQATERDEFSYQEMITHLPMASHPNPENVLVIGGGDGGVIREVLKHKSVKKVTLCDIDEAVIRVSKQWLPLMSDCYKDSRVEVHIGDGFKFLPEHKNEYDVIITDSSDPVGPAEALFQPPYFQLLKEALKEGGSVSTQAECLWVHLPLIKTLKETCSKLFPVVKYGFTTIPTYPAGQIGIMVCSKDSTRDLTVPLRAVPDTRYYNSEVHRAAFTIPEFGRAMLEDGVNVLPKFSGARPTPTTTKKKVLLLGSGLVAGPAADYIARHNHELTIACRTLASAQDLASGLPNATPMSVDVSSADALRQAIKGHDVVVSLIPYTYHAQVMEAALEEKVHVVTTSYVNPQMRALEQKFKDAGLICFNEIGVDPGVDHLWAIKVFDEVKKAGGKIKSFYSFCGGLVEPAAADNALGYKFSWSPVGVLMALNNDGKYLKDGKVVEVAGKDLMSTAKPYYFTPAYNLVAYPNRDSTVFREFYGLEGVQNLCRGTMRYAGFCEVITAWKEIGLMSDAQVDYLAQGAAPITWIKVVSQLLGVEAKEAAVIEKLKTLKSFETESRVLITKFRDLGLFSEEQVAQRGSVMRALSALLEEKCAFKEGEVDLVLLQHTFEIINADGSEQTITSSLEAYGDRNGGPSAMAKLVGVPCGMAVQFILEGVLNKPGVFAPYDEETCKLFRERLEKEEGITMVEKLV

SEQ ID NO: 15409 - protein, 230 aa, Brassica napus
MERGAPLSHYQLPKSNSGLNLDQHNNSIPTMTGSISACDDKNKTILPQQQPSMPREQDQYMPIANVIRIMRKILPPHAKISDDAKETIQECVSEYISFVTGEANERCQREQRKTITAEDILWAMSKLGFDDYVGPLNVFINRYREFETDRGCSLRGESSFKPVYGGSGMGFHGPPPPGSYGYGMLDQSMVMGGGRYYHNGSGPDGSVGGGGGSSSSMNGMPVYDQYGQYK

SEQ ID NO: 15410 - protein, 1131 aa, Solanum lycopersicum; identical to SEQ ID NO: 8472

SEQ ID NO: 15411 - protein, 382 aa, Vibrio vulnificus YJ016
MKNAVHFGAGNIGRGFIGKLLADANVSVTFADVDAPLVDQLSHRQEYKVKVVGSECQIDTVTHVTAVNSASEEVIDRIVQTDLVTTAVGPNVLDIIAKTIAQGIAKRFAAGNLAPLNIIACENMVRGTTHLKGEVYKHLDASLHAQVDELVGFVDSAVDRIVPPAEAANDDPLEVTVESFSEWIVDEQQFKGEVPSIAGMEKTHNLMAFVERKLFTLNTGHCITAYLGCLQGHRTIREAIENPAICDQVKQAMMESGEVLIRRYGFDREMHQAYIEKILARFANPFLVDEVDRVGRQPIRKLGMNDRLIKPLLGTIEFGTANQHLLKGIAAALKYQNDSDPQAVELQRSLQQVGVKKTLAKYTSLAEDSVEVAKIETLYNQL

SEQ ID NO: 15412 - protein, 647 aa, Psychrobacter arcticus 273-4
MGKVIGIDLGTTNSCVAVMEGDKVKIIENAEGTRTTPSIVAYKDDEILVGQSAKRQAVTNPNNTLFAIKRLIGRRFDDKVVQKDIGMVPYKIAKADNGDAWVEINGKKLAPPQVSAEILKKMKKTAEDYLGEAVTEAVVTVPAYFNDSQRQATKDAGKIAGLDVKRIINEPTAAALAYGMDKKQGDSTVAVYDLGGGTFDVSIIEIADVDGEQQFEVLATNGDTFLGGEDFDSALIDFLVAEFKKDQDVNLKGDSLAMQRLKEAAEKAKIELSSAQSTEVNLPYITADSSGPKHLVVTISRSKLESLTEELVQRTMGPCKMALEDAGIKIGDIDDVILVGGQTRMPLVQQKVQEFFGQEPRKDVNPDEAVAAGAAIQGAVLSGEKTDVLLLDVTPLTLGIETMGGILTPIIEKNTMIPTKKSQVFSTAEDNQPAVSIQVYQGERKIANQNKQLGRFDLTDIPPAPRGLPQIEVSFDINADGIMNISATDKGTGKAQSIQIKADSGLSDEEVEQMIRDAEANAAEDEKFANLAQVRNEADGRIHAVQKALKDAADKVSDDEKSSVETAISELEAAAKEDDHDDIKAKLEALDNAFLPVSQKIYADAGAGSEGMDPNQFQQGADNAGENNQADDDVVDAEFTEVEDDKK

SEQ ID NO: 15413 - protein, 373 aa, Aspergillus niger; identical to SEQ ID NO: 1070

SEQ ID NO: 15414 - protein, 221 aa, Brassica napus
  misc_feature (61)..(61): Xaa can be any naturally occurring amino acid
  misc_feature (113)..(113): Xaa can be any naturally occurring amino acid
MKHENLVRLTGFCCSKGRGECFLIYEFVPNGNLLQYLDLKDESGDVLEWTTRVTIINGIAXRGIVYLHGENGNKPAIVHQNLSAEKILIDHWYNPSLADSGLHKLFTDDIVFXKLKASAAMGYLAPEYITTGRFTDKSDVYAFGMILLQILSGKSKISHLMILQAVESGRLNEDFIDPNLRKKFPETEAAQLARLGLLCTHESSNQRPSMADVVKELNKLS

SEQ ID NO: 15415 - protein, 427 aa, Synechococcus sp. CC9605
MTKPLDIPAILLFLATMFGAINHKFVKLPHTIGLMIVALAASLSLIALDLIFPSLGMSVLVNKFLGNIDFNVTLMQGMLSFLLFAGALHVDLDQLLENKWTILAFASFGVLVSSFVIGGGFWLISGAVGLSLPFLICLLLGVMVSPTDPVAVLGVLKTLQVPSPLKAKIAGESLFNDGVAVVLFSVLVSLVFGNGGEEGLETSFQLTSVIWLLTKEALGGLFLGLISGYIAFWLLRQIDDYVLEVLITLALVTGAYSIALHLHLSGPIAMVIAGLLIGNQGTSMAMSETTRMHVETFWELVDEILNSVLFLLIGLKIVFLFQHSSYEIAYPLLISLFIAITLLSLFARFVAIALPVQIKSLNSEVNPGTVQILTWAGIRGGVSVALALSLPSSSESELLLFVTYLVVLFSVAIQGLTIENVIKRYYP

SEQ ID NO: 15416 - protein, 594 aa, Picea sitchensis
MAELPLSPSDSPGKAAIETQAAGVGILLQIMMLVLAFVLGHVLRRHKFYYLHEASASLLIGLIVGGLANISNTEENIRKWFNFHEEFFFLLLLPPIIFQSGFSLQPKPFFSNFGAIITFAILGTFISSMVTGILVYLGGIFLLMFRLPFQESLMFGALISATDPVTILAIFQELGCDTNLYALVFGESVLNDAVAISLYRTMLSVRQHAATNPSLFTAVWRFIETFFGSMSTGAAVALSSALLFKYAGLGIDNLQNLECCLFVLFPYLSYMLAEGLGLSGIVAILFCGIVMKHYTFSNLSENSQTFTAGFFELISSLAETFVFIYMGLDIATEQQSWSHVGFIFFSILFIGVARAANVFPCAYLINFVRPASRKIPMKHQKALWYSGLRGAMAFALALQSIHELPDGHGQTIFTATTAIVVLTVLLIGGSTATMLETLEVTGDSQGVLLGESSEEESDYRAPDETTSSSSGQNLKMKLKELRKSTATFTAIDKNFLTPFFTAHNGDVHGHRTSRGNEAHNSARQILKTSNDRGSSTSSPLLQSTALNGQDHRVESNDGRSRWLSPGNHLHNDKYRNMYAQSKEHERPGQAAGIS

SEQ ID NO: 15417 - protein, 1034 aa, Corynebacterium glutamicum ATCC 13032
MTSHLLHGLWIKDRGLQLWIEQVEGHRIVLPEAVEKGTFPPVVEQILDGKTFRARMNVHLRTPKGRHVELPTPTAAFTPEEAVTVFSQLSFLKAETPAATRAQRDSIAPDLWWLIVMYQGLARFVQAGRVTLRTVMMDNAWWPQWQLSASLSERGWLAEMNHAAPGILRINGGRDLAGSMSNELPHWIANAILRDYRDETMPYARHEFVEALLFNHSLRKGSTMLTHALNQWKNTITSASLQLVILVEEPPAESDYEDPMDSVWPVRLMVRTGVDAPQAIQKGSIDSGGMEQLRSQYETAKTTSMLLDPAREDAMLGHMVDIAQNGDWDIFLTTEEIVNFISHDVAKLRKAGIPVMLPKAWSTYETRAQVEARTPNDAADSSTKAIIGLDQLVEYNWRISVGDIQLSDEEMRELIDSKTGLIRLRGDWVMADQDALRRITSYMEELSKSSEKRARTEMEKVAMQAKLAEANGEEGWQLLAAKAETLRKEFNEKFSGDGQGEVTLAELREIALKAAENEPVEFTGSQWFNSLLGGTETPAPVRVDIPDTVLADLREYQRRGVDWLYWMSANNLGAVLADDMGLGKTLQLLSLLAVERAENPELERGPTLVVCPTSVVGNWAAEAAKFVPSLKVLMHHGPQRLNDADFLSQSKGMDLIITSYGVITRDFKLMGQVGFERVVLDEAQAIKNSSTRVSKAVRSLPSRHRVALTGTPVENRLSEMRSILDFCNPGVLGSASFFRNHFAKAIEREQDDTMTERLRQLTAPFILRRLKTDPNIIDDLPEKTEQIIRVDMTTEQASLYKALVEDVQKQLDERQGMSRKGLVLATITRIKQICNHPAHFLGDGSEVTLKGKHRSGKVEALMELIDTAVKEERRMLIFTQYAAFGRILAPYLSDRLGTNIPFLHGGVTKPGRDRMVAEFQSEDGPPAMILSLKAGGTGLNLTAASIVVHMDRWWNPAVENQATDRAFRIGQRKNVDVYKMITVGTMEESIQDILDGKTHLASAIVGEGEGWITELNPEELAMLMSYREKEGADD

SEQ ID NO: 15418 - protein, 473 aa, Synechococcus sp. WH 7803
MASTAQDVLRQIKDEGIELIDFKFTDLHGKWQHLTICSDLLEADSFEEGLAFDGSSIRGWKTIDASDMAMVPDPSTAWIDPFYSHKTLSMICSIQDPRTGTLYDRCPRALAQRALAYLSGSGLADKAFFGPEPEFFLFDDVRYNSSEGGSFYSVDTIEASWNSGRLEEGGNLGYKIQLKEGYFPVAPNDTAQDIRSEMLLMMAQLGIPIEKHHHELAGAGQHELGMKFAELIKAADNTMTYKYVVRNVAKKYGKTATFMPKPVFNDNGSGMHVHQSLWKAGQPLFFGEGTDANLSQTARWYIGGILKHAPSFLAFTNPTTNSYKRLVPGFEAPVNLVYSEGNRSAAVRIPLTGPNPKAKRLEFRSGDALANPYLAFSAMMMAGIDGIKNQIDPGAPTNEDLFELSAERLSAIDTVPASLNGALEALNADHHYLMEGGVFSKDFINNWIDLKYEEVQQLRQRPHPHEFTMYYDA

SEQ ID NO: 15419 - protein, 358 aa, Canotia holacantha; identical to SEQ ID NO: 8487

SEQ ID NO: 15420 - protein, 958 aa, Oryza sativa Indica Group
MYYRRQRKASSEANANVFMPGGPNDISFPASNRAHDWGYGGVGKEWEASYARKLQLMNFLSSLHQRTANPLVTTRMDANMDTPLEQKQKDSSAIIVLDSDDEDGYTEGCEQLTSENNKQQAPSGLTSPYTTWIVSSAKDQVNGTLHVDGVQSTQIVPYYGQNAPLINQFPLQTSWQPSIQYERVILQKRPEEQRVQDLVAASHAEKIAETQVLLTLPTLPNERKRRKTEPTTLVDVDGGTNLGKRKRKNHQNQAAVDSNLDLQQNDVPSQSYRTMIEEEKPVKESDGLEDLWKDFSLAAECTKLDTNEDMSNEKDVDDENEMDDDCNHDIRIHEDLGHVCRICGMIVRKAETIIDYQWKKASRTRTNYYESRSKDADEIDTGAVKVSEDFIVSDIAIHPRHAKQMRPHQLEGFSFLVKNLVGDKPGGCILAHAPGSGKTFMLISFIQSFLAKYPSARPLVVLPKGILGTWKREFQRWQVEDIPLYDFYSVKADKRVEQLEVLKSWEAQMSILFLGYKQFSRIICGDGDGNIAAACRDRLLMVPNLLILDEGHTPRNRETDVLASLKRVQTPRKVVLSGTLFQNHVSEVFNILDLVRPKFLKMESSRPIARRIMSQVAISGIRSLKGVHDSAFTESVEDTLLNDDNFTRKAHVIRSLRELTKDVLHYYKGDILDELPGLVDFSVFLKLSTKQKEIVHKIEAYEKFKRSAVGTALYIHPCLSEISEGDAADRASNLTDATVDSLIESIIIKDGVKAKFFFNILSLANSAGEKLLAFSQYILPMKFLERLLVKRLGWHVGKEIFMISGDTSADDREVAMDQFNNSADAKVLFGSIKACGEGISLVGASRVIILDVHLNPSVTRQAIGRAFRPGQQKKVFVYRLVAADSPEVKFHETAFKKEVIPKLWFEWSELCTTEDFKLNQVDIDDSEDELLEANAIRQDIKALYRRSAISFSRCACAS

SEQ ID NO: 15421 - protein, 185 aa, Zea mays; identical to SEQ ID NO: 14592

SEQ ID NO: 15422 - protein, 374 aa, Canotia holacantha; identical to SEQ ID NO: 8489

SEQ ID NO: 15423 - protein, 193 aa, Oryza sativa Japonica Group
DPRVRLHVGDAVEFLRNAPEGTYDAIIVDSSDPIGPAQELVEKPFFDTIARALRPGGVLCNQAESMWLHTHLIQDMLSICRETFKGSVHYAWTSVPTYPSGVIGFLLCAKEGPPVNFLTPANPIEKLEGAMEAGRDIRFYNSEMHRAAFVLPTFARRELEAYCTTVEREQQEETTAEPLKMNIMPNSEILTAS

SEQ ID NO: 15424 - protein, 560 aa, Mycobacterium sp. MCS
MELILVVVGAIVVTAIAHRRGLEPALVLVVVGFAVSFAPDFNGIELESDVLLSVVLPPLLYSAALSFSFPTFLRNIRPILGLGVGLVVITTFAVAGLASWLVPSLTFGTALILGAVVAPPDAVTAVAVGRRLGLPKKVMAILTGESLVNDAAALSLFSIAVAQVAGTRAFIENPVLLFGYSALLGPVVGAALGFITLWIRRRLANPGLETIQGLVVPFAAFISAEHLHASGVLAVVVAGFVVGHGSLDAGYQTRLQERYVWNSVDVMLEAFVFAYIGLQLRFVLEDLNEAHESLAEVAVASAVVLLVVLLIRPVCVFAMFGRGVLSRKVESKLSVPKPEQGGRGALGVRRRGGAGRLSGLVDRRMLTWQENVVVSWTGMRGVVTLAAASGIPMMTIDGEPFPERATIQAIAFVVSVGTLLLQGWTLPPLIRWLQPSFEHDRQSDETETRKAEQVVHAAADDVLNRFADAPPPGLDDATLANIRQTIARHAQDADEMPDPESHTPRAEVFSKLYRDVLCAQRNALIAERDAGRIEDEAVRAMLERLDLQEAGVSARLESRI

SEQ ID NO: 15425 - protein, 683 aa, Zea mays
  misc_feature (432)..(432): Xaa can be any naturally occurring amino acid
MTTLLQVWLEKRYVGSQHTSEWFNTAGRSVKTGLIASVIVSQFQSHVYRIEQWTWAATILQSSNVAWQYGVSGPFWYASGATIQVLLFGVMAIEIKRKAPKAHTVCEIVRARWGRAAHAVFLAFCLATNVIVTAMLLLGGSAVVNALTAINVYAASFLIPLGVVVYTLAGGLKATFLASYIHSVVVHVVLVVFVFLVYTSGNRLGSPRVVHDHLTAVASAVRNCSAPLSHPDQACGPVHGNFKGSYLTMLSSGGLVFGIINIVGNFGTVFVDNGYWMSAIAARPSSTHKGYLLGGLVWFAVPFSLATSLGLGALALDLPITAAEAAKGLVPAATATALMGKSGSVLLLIMLFMAVTSAGSAELVAVSSLCTYDIYRTYINPDATGEQILRVSRATVLVFGCLMGVLAVILNLVGVSLGWLYLAMGVIIGSAXIPIALLLLWRKANALGAILGAVSGCVLGVTVWLSVAKVQYGRVDLDSTGRNAPMLAGNLVSILVGGAVHAACSLAWPQHYDWESSRQITTVESVPADSDLAEELKEERLVHAKRWIIKWGVAFTAVIAVVWPVLSLPAGRYSAGYFTMWAVIAIAWGTVGSAVIIFLPLVESWDTICKVCEGMFTNNAVYERLGEMNLRLKAIMGDMPEAEERYQEMQKEKDLGTMEMVHPASGTRPSIVANDDEDNLSLA

SEQ ID NO: 15426 - protein, 141 aa, Salmonella enterica
KPMFGDNGSGMHCHMSLAKNGTNLFSGDKYAGLSEQALYYIGGVIKHAKAINALANPTTNSYKRLVPGYEAPVMLAYSARNRSASIRIPVVASPKARRIEVRFPDPAANPYLCFAALLMAGLDGIKNKIHPGEAMDKNLYD

SEQ ID NO: 15427 - protein, 374 aa, Catha edulis; identical to SEQ ID NO: 8490

SEQ ID NO: 15428 - protein, 894 aa, Oryza sativa; identical to SEQ ID NO: 14950

SEQ ID NO: 15429 - protein, 374 aa, Celastrus orbiculatus; identical to SEQ ID NO: 8491

SEQ ID NO: 15430 - protein, 640 aa, Piscirickettsia salmonis
MAEIIGIDLGTTNSCVAVLDGDKPRVIESAEGDRTTPSIVAYTNDGVTVGQPAKRQAVTNPNNTLFAVKRLIGRKFSDDTVQRDIERLPYTIAAADNGDAWIDVNGEKLAPPQISAQVLAKMKKTAEDYLGEDVKEAVITVPAYFNDAQRQATKDAGRIAGLDVKRIIDEPTAAALAYGMDKKRGDGVIAVYDLGGGTFDISIIEIAEVDGEHQFEVLATNGDTHLGGEDFDLRLISYLVDEFKKEQGIDLNNDPLALQRLKEASEKAKIELSSTQQTDVNLPYITADATGPKHMNIRVTRAKFESLVEDLVEGTIEPCRVALKDAGLSVNDVTDVILVGGQTRMPKAQAVVKNFFGKEPRRDVNPDEAVAVGAAIQGGVLAGDVKDVLLLDVTPLSLGIETMGGVMTKLIEKNTTIPTKASQTFSTAQDNQTAVTVHVLQGEREVATGNKSLGRFDLADIPPAPRGMPQVEVTFDIDANGILNVSAKDKGTGKEQSIVIRASSGLSDDEVDAMIKDAEDHADDDKKFQELVGARNNAEAMIHATEKGLKEAGDKVAADDKTAIEKAISELKDVVSGNDKAVIDEKVEALTQASAKMAEVLYANQGAEAEAAAAAGAEQAQSQTDEKKDDDVVDAEFEEV

SEQ ID NO: 15431 - protein, 134 aa, Salmonella enterica
NGSGMHCHMSLAKNGTNLFSGDKYAGLSEQALYYIGGVIKHAKAINALANPTTNSYKRLVPGYEAPVMLAYSARNRSASIRIPVVASPKARRIEVRFPDPAANPYLCFAALLMAGLDGIKNKIHPGEAMDKNLY

SEQ ID NO: 15432 - protein, 180 aa, Zea mays; identical to SEQ ID NO: 12387

SEQ ID NO: 15433 - protein, 373 aa, Celastrus scandens; identical to SEQ ID NO: 8492

SEQ ID NO: 15434 - protein, 1114 aa, Gibberella zeae PH-1
MAPRSRANAVDTDASMSDAQEHRQAEDMEVDETPDYTDTENPSTTASSVAGEPTGDGRRRRTEVNQLRRSIFGKKHDRLGESKEDDTIRRFRYLLGLTDLFRHFIETNPDPKIRDIMTEIDRQNAEAARAKKGAGRQGGATSERRRRTEAEEDAELLKDEKQGGSAETVFRESPSFVHGLMRDYQIAGLNWLISLHENGISGILADEMGLGKTLQTISFLGYLRHILDITGPHLVIVPKSTLDNWKREFAKWTPEVDVLVLQGAKDERQALINDRLVDEKFDVCITSYEMVLREKSHLKKFAWEYIIIDEAHRIKNEESSLSQVIRLFDSRNRLLITGTPLQNNLHELWALLNFLLPDVFGDSEAFDQWFSGQDRDQDTVVQQLHRVLRPFLLRRVKSDVEKSLLPKKEVNVYLGMSEMQVKWYQKILEKDIDAVNGAGGKRESKTRLLNIVMQLRKCCNHPYLFEGAEPGPPYTTDEHLVYNAGKMAVLDKLLKRLQKQGSRVLIFSQMSRLLDILEDYCVFREYKYCRIDGGTAHEDRIAAIDEYNKPGSEKFVFLLTTRAGGLGINLTTADIVVLYDSDWNPQADLQAMDRAHRIGQTKQVVVYRFVTENAIEEKVLERAAQKLRLDQLVIQQGRAQQAAKAAANKDELLSMIQHGAEKVFQSKGATGTMGSKDGEVDDDDIDAILARGEDRTKELNAKYEKLGIDDLQKFTSESAYEWNGENFANTKKNINTTWINPAKRERKEQSYSMDKYFRQTMYPNPKADAKPKAPRAPKQVPVHDYQFYPPRLRDLQDRETAYYRKEIGYKVPLADGEEDTLEEREAERALDQQEIDNATPLTEEEREEKETLSLQGFGDWNKRDFQQFVNGSGKYGRHEYEGISQEIDSKSPPEIKAYAKVFWQRYTEIADYPKYIKTIEDGEERTRRIEHHQKLLKKKMGQYRVPLQQLKINYSVSTTNKKVYTEEEDRFLLVLLDRYGIDSEGLYEKMRDDIRESPLFRFDWFFLSRTPIELSRRCTTLITTIVKEFEDVPARNGVNGKSKREPDDENDEDSILGMAPAKKKAKNEVKNKALDNVKSVKSSKNSSATPSRASSVASTASAGGSAKSKKGRKK

SEQ ID NO: 15435 - protein, 644 aa, Aspergillus nidulans FGSC A4
MWKISINFILLHWLAVFYPYGNVSAIDSYFFGVSSSTESGLNPYANLGLYIWVVDLKDLKTYQQLFLYFIPIVSNLGFINILIVVIRLHWFEKRLKEIAPSVLRQRPEVSAIKTTQFDQEAQSVSNAEPTKPAGNQGVQENKASEKVRETSIQAGASTKGSLEESQPAVSFSYTSKALYIPPPRDRDRGCPIIEIDHTPNKDDSANDTDIAVGDVRARRRLSDASIHQVGVLTFAQTSRKHRDTGTAVSLSKDMSLPGLSSQATLGRNSQFLNLTTRDREHLGGVEYRSLRLLLKIAIGMEFQIGARSAFYSAQTMSNNLGLTLTPDSMVSFQEATFPLFVMSFLAYAGNTLYPCFLRLVIWTMFKLVPGESSLREPLNFLLKYPRRCYVLLFRSRPTWALAGIIFILNFVDILLILLLDLDNPAVNSVPAGPRVIAAIFQAASARHTGTASFSLADVNPAVQFSLLVMMYIAVYPIAITVRASNTYEEKSLGIYSPEPETDENGKGYILTHMRNQLSFDLWYIFLGIFCICVAESKRIMNPAEPGFSVFAIFFEAVSAYGNVGLSLGYAGVSTSFSAQFSTFSKLVVCALMIRGRHRGMPSQLDRAVLLPSDRLVEDDSVTMYSSKGLWLEPRSLKVRRYHTR

SEQ ID NO: 15436 - protein, 474 aa, Bacillus licheniformis ATCC 14580
MVGMLYIGYYAYKRTANLSDYMLGGRTLGPAVTALSAGASDMSGWLLMGLPGAMFATGLSGSWIVIGLVLGAWANWIFVAPRLRSYTEVAGNSITIPAFLENRFHDKSKILRIFSGVVIITFFTFYVSSGMVSGGVLFNSIFNLDYHAGLWIISGVVVAYTLFGGFLAVSWTDFVQGIIMFVALILVPIVTVIQTGGPGEAFSEIQSIDPNLLNIFKGTSVLGIISLFSWGLGYFGQPHIIVRFMAISSIKETKKARRIGMGWMIFSSAGALLTGLLGIAYYSKNGLHLDDPETIFIQLGNILFHPLITGFLISAILAAVMSTISSQLLVTSSSLTEDLYKTLFKRSASDKELVFFGRLSVLAVSIVGLCLAWTKNNTILGLVSYAWAGFGASFGPVVILSLFWKRMTKWGALAGMVAGALTVIIWAEAGLSDVLYEMIPGFAASLLFVFVVSLLTSKPEQQVLDEFEQYKQTL

SEQ ID NO: 15437 - protein, 959 aa, Arabidopsis thaliana
MEEEDEEILSSSDCDDSSDSYKDDSQDSEGENDNPECEDLAVVSLSSDADRKSKNVKDLLRGNLVVQRQPLLPRVLSVSDGAAVCRKPFKPPCSHGYDSTGQLSRRLSARKRFVPWGSSTPVVVALPTKLEASTNIERDEEEEVVCLPPDIEPLVLWQSEEDGMSNVTTIMVHSVLVKFLRPHQREGVQFMFDCVSGLHGSANINGCILADDMGLGKTLQSITLLYTLLCQGFDGTPMVKKAIIVTPTSLVSNWEAEIKKWVGDRIQLIALCESTRDDVLSGIDSFTRPRSALQVLIISYETFRMHSSKFCQSESCDLLICDEAHRLKNDQTLTNRALASLTCKRRVLLSGTPMQNDLEEFFAMVNFTNPGSLGDAAHFRHYYEAPIICGREPTATEEEKNLAADRSAELSSKVNQFILRRTNALLSNHLPPKIIEVVCCKMTTLQSTLYNHFISSKNLKRALADNAKQTKVLAYITALKKLCNHPKLIYDTIKSGNPGTVGFENCLEFFPAEMFSGRSGAWTGGDGAWVELSGKMHVLSRLLANLRRKTDDRIVLVSNYTQTLDLFAQLCRERRYPFLRLDGSTTISKRQKLVNRLNDPTKDEFAFLLSSKAGGCGLNLIGANRLVLFDPDWNPANDKQAAARVWRDGQKKRVYVYRFLSTGTIEEKVYQRQMSKEGLQKVIQHEQTDNSTRQGNLLSTEDLRDLFSFHGDVRYVFLLKSGNVLCPLRTSFLYPLLGTDFVPQDDTHSNGLSQSLFSGNVARSEIHEKMSCSRCQNDASGTENIEEGNENNVDDNACQIDQEDIGGFAKDAGCFNLLKNSERQVGTPLEEDLGSWGHHFTSKSVPDAILQASAGDEVTFVFTNQVDGKLVPIESNVSPKTVESEEHNRNQPVNKRAFNKPQQRPREPLQPLSLNETTKRVKLSTYKRLHGNSNIDDAQIKMSLQRPNLVSVNHDDDFV

SEQ ID NO: 15438 - protein, 161 aa, marine gamma proteobacterium HTCC2143
MTTIYDFDAETIGGQPAPMENYQGKVLLIVNTASKCGLTPQFKGLEKLYEDLKDRGLEILGFPCNQFANQDPGSNEKIEEFCQMNYGVSFPMHAKIDVNGAKTHPLFKHLKEKAPGFMGTRQIKWNFTKFLVNDEGEVLKRFAPTDTPEQIRSAIEQVLPE

SEQ ID NO: 15439 - protein, 1492 aa, Oryza sativa Japonica Group
MDENRKLSDDMSKKMEPIHSNGEAGEDKTIIIEPESDANKLEVETDARHGICEAHKAHEYGTMENDLHEEASTTDDDSENDSYEYLLRESDNEQTSESDAGEGDNEAPLTDEEVETLITEFLDAESKAAQAQESLEKESLEKIESEVRLELSESLQGNELESAVSTEMKQYKKEWESELDDLETHIAVLLEQLDAAGVELPSLYKSIESQVPNVCETEAWKNRAHWAGYQVPEEANKSIRKADEYLQSCRPVRRKHGRLLEEGASGFLAGKIPVGDDGSAQCHEKSWNAFNELTKSKEYAESSFGSSNWASVYLASTPQEAAALGLQFPGVDEVEEIAEVEGAVSDIKGVDEIELSEVQRRKYRKVPEEDDAKMTKRLQRHLKERRTRHLHKENIGLASSSNGCCELPPKKLKTYENGVSVELAKRTREDDVEFDNKRSKTVIIESDDDMQTDSKPDSAPSENADEIIDLDIFPSQSPKLGDKVRPKPFKCTICTEMLNVPEVHRHPVLDVIICGSCRFLVIEKNRLEDPVSGGYCTWCVKSEQLQSCSSCKLLFCRNCLSKNFGEEGLSEARVAGWQCCCCLPSQLEHLISDCDKALGGVESSDPENDFAELSVLESNGPFSKHKMKKRIRRIMDDEELGEETKLKIAMEKARQEHLKSMQEQSASKLKSNNIGISLEAPSEVSEYVGDGHIVNLAREEDEAPVRIPSSISAKLKPHQVSGIRFMWENVIQSVKKVKSGDKGFGCILAHNMGLGKTFQVITFLYTVMRCIQLGLRTALIVTPVNVLHNWKKEFIKWCPAELKPLRVYMLEDVPRCRANIQYLLKKWRIKGGVLLIGYSSFRNLSLGRSARDKTVANEITNALQMWVLIQSIYICHNQCGPDILVCDEAHIIKNRRADTTQALKQVRTQRRIALTGSPLQNNLMEYYCMVDFVREGYLGSSHEFRNRFQNPIENGQHTNSTSDDVKIMNQRSHILYEQLKGFVQRMDMNVVKNDLPEKKVFVVTVKLSQLQRKLYRRFLDVNGFSSSAASEKSFQRSGFFAKYQTLALIWNHPGLLQMAKQKGNLRQEDVESFLMDESSSDDNIENYLPNGEKLRSRNDQLSKKSSDVVNEESNWWENLLDENAYKEADYSGKMVLLLDILSSCSELGDKALVFSQSLSTLDLVEFYLSKLQVNGKEGKYWKQGKDWYRIDGSTPSSERQNLVERFNDPENIRVKCTLISTRAGSLGINLHSANRVILLDGSWNPTHDLQAIYRVWRYGQTKPVYAYRLMAHATMEEKIYKRQVTKEGLAARVVDRQQVSRTISKEEMLHLFEFGDEELLEQSGSTMNGHSKVGTEKPPTPNSSETTEHLPLDRLMVNLLHDHSRWIASYHEHETLLQENEEERLTKEEQDMAWLSYNKLLEVAPRKATHDAERKPSTVPTESSLIQPPKATSRSRQPQQPKITSNNQKKCNNLSHLLTLRSQGTKPGCSTSCKECGQDISWETLNRDGRSR

SEQ ID NO: 15440 - protein, 400 aa, Sesamum indicum
MGDRVFQHRNSSSILNCPSSVMATTSISDNVAGMSICSESMFKPPNGIDPFYSSSGWDPVISQDQSGNFGNSSMVLQNEFANPNYPVLLENQTMGSSSHLVHFPSDSGLVGMVPKIPSFGSGSFSEIVSSFGHSNFAQNNGAGVQNTVKNVEDAQDHRQDSENGVLGASPNGKRKRKNVEVEKQKDQTRDLAELPKEYDEKKNSGPSSRSRQAVKEAKDNSSGAEASKENYIHVRAKRGQATNSHSLAERVRRERISERMRLLQELVPGCNKITGKAVMLDEIINYVQSLQQQVEFLSMKLATVNPELNVDIERLLSKDILHSRGSNATALGIGPGLSSSHPFQGLPQGTLNAFPGTAPQFQSLPQNLWNNELQNILQNGYDSNPSVGSLGPSGLSKMEL

SEQ ID NO: 15441 - protein, 615 aa, Rhodococcus sp. RHA1
MARAVGIDLGTTNSVVCVLEGGDPVVVANSEGSRTTPSVVAFAKNGEVLVGQPAKNQAVTNVDRTVRSVKREIGTDWHVAIDDKKYSAQEISARTLMKLKRDAEAYLGEDITDAVITVPAYFEDAQRQATKEAGQIAGLNVLRIVNEPTAAALAYGLDKGDKEQTILVFDLGGGTFDVSLLEIGEGVVEVRATSGDNHLGGDDWDDRIVKWLADKFKAQNGIDLTKDKMALQRLREAAEKAKIELSSSQSTSINLPYITVDADKNPLFLDEQLSRSEFEKITSDLLDRTRAPFQSVIKDAKISVKDIDQVVLVGGSTRMPAVTNLVRELTGGKEPNKGVNPDEVVAVGAALQAGVLKGEVKDVLLLDVTPLSLGIETKGGVMTKLIERNTTIPTKRSETFTTADDNQPSVQIQVFQGEREIASHNKLLGSFELAGIPPAPRGVPQIEVTFDIDANGIVHVTAKDKGTGKENTIKIQEGSGLSKEEIDRMIKDAEAHAAEDAQRREEAEVRNQAESLVYQTEKFIKDNEDKVPADVKEKVESSITNAQEKLKGSDVTAIKEAIEKLTTDSQALGQAIYDAQAKDSAATGGGNGSSGGAEEVFDAEVVDEPGREDNR

SEQ ID NO: 15442 - protein, 296 aa, Brassica napus
MEVEKSQENTTGGEDDESKIIYRGWKVMPFIIGNETFEKLGIVGSSSNLVIYLTTVFNMKSITAATVVNIYGGTSNFGTIVAAFLCDSYFGRYKTLSFAMIACFLGSVAMDLTAVINQLHPAKCGKEIGSVCKGPSIGQIMFLAGAMVLLVIGAGGIRPCNLPFGADQFNPKTKEGKRGVDSFFNWYFFTFTFAQMVSLTLIVYVQSNVSWSIGLAIPAILMLLGCIIFFAGSKLYVKVKASGSPIHSITRVIVVAIKKRRLKHIGSSSEGLYNYIAKDFKNSKLSHTNQFRFLDK

SEQ ID NO: 15443 - protein, 124 aa, Arabidopsis thaliana
  misc_feature (18)..(18): Xaa can be any naturally occurring amino acid
  misc_feature (32)..(32): Xaa can be any naturally occurring amino acid
  misc_feature (39)..(40): Xaa can be any naturally occurring amino acid
  misc_feature (56)..(56): Xaa can be any naturally occurring amino acid
  misc_feature (67)..(67): Xaa can be any naturally occurring amino acid
  misc_feature (79)..(79): Xaa can be any naturally occurring amino acid
  misc_feature (82)..(82): Xaa can be any naturally occurring amino acid
  misc_feature (86)..(86): Xaa can be any naturally occurring amino acid
  misc_feature (88)..(88): Xaa can be any naturally occurring amino acid
  misc_feature (93)..(93): Xaa can be any naturally occurring amino acid
MASSMLSSATMVASPAQXTMVAPFNGLKSSAXFPATRKXXNDITSITSNGGRVNCXQVWPPIGKKKXETLSYLPDLTDXELXKEVXYXYPQPXGFLCDEPLEHRATFPVLTHHEISPPVIRLLP

SEQ ID NO: 15444 - protein, 473 aa, Synechococcus sp. CC9311
MAKTAQDVLRQIKDEGIELIDLKFSDLHGKWQHLTVCSDMVDEDAFKEGLAFDGSSIRGWKAINASDMSMVPDPATAWVDPFYRHKTLSLICSIQDPRTGDPYERCPRALAQKALAYLSNTGLADKAFFGPEPEFFLFDDVRYNSSEGGCFYSVDTIEAGWNSGRMEEGGNLAYKIQLKEGYFPVAPNDTAQDIRSEMLLMMAQLGIPIEKHHHEVAGAGQHELGMKFDELIQAADNVMTYKYVVRNVAKKYGKTATFMPKPVFNDNGTGMHVHQSLWKGDQPLFFGEGTYANLSQTARWYIGGILKHAPSFLAFTNPTTNSYKRLVPGFEAPVNLVYSEGNRSAAVRIPLTGPSPKAKRLEFRSGDALANPYLAFAAMMMAGIDGIKNQIDPGDGFDGDLFELPADQLKDIATVPASLNGALEALNADHHYLMEGGVFTKDFIDNWINLKYEEVQQLRQRPHPHEFTMYYDA

SEQ ID NO: 15445 - protein, 177 aa, Ceratodon purpureus
MAPPTVGTQAQAAPAMVPARVYSKDDEVLVKKSWDILKKDAQRNGINFFRKVFEIAPGAKSMYSFLRDSTIPFEENPKVKNHARYVFMMTGDAAVQLGEKGAYQVLDSKLQKLAATHINAGVTDDQFEIVKEAILYAIEMGVPELWSPELKSAWGDAYDMLAAAVKAEMHAQRAAAQ

SEQ ID NO: 15446 - protein, 1390 aa, Ostreococcus tauri
MSPTSRTRNARAVYRVEQRSLESAFAELDANVIAEVLERRRGNVDLAAQDLLEIRPSSTEKRRRKAEAPATEREYWGDVLAERRADAERPGTESDGSASNDNAATRSEERSIRSRHEWPSEQWGRESDDSTRFADVERICGWRNGSAGETELLLKWRGTSYANCTWAKTSAIERDVASGTHGKMRVTRYFDKHPIELGPRVDVRPEYLVVERVFSKFEGVDKTLMCVKWQRLGYDETTWEEQSAVRDLFEGGSAAIERFERVHSRATSAFARQAIIERETANDVNNAWSSYDDDAVCESYGESSELRSYQKEGVKWMSFNFRAGRGCILADEMGLGKTAQSLALIHHCLKVRPGLPALIVVPLSTVVNWEREAKRWVPDAYLVTHIGKQAGRDFAREHDWYHAPVEGADGSLRSMKADIVLTTYETVTADRQSFAKVKWCTMVVDEAHRLKRIGGKLGNDLGTLSVERICLLTGTPLQNNTAELWSLLNFVDSKHFSDAEDFEAAFGGMVKASQVERLQQVLGPYLLRRLKSDVEQKLPPRSETLVECELAPLQKKCYRALFERNFSFLRQGCESKENFANFANIMMEVRKCCQHPFLLDGVEAAVAPEGASTNILVSSSGKLQLLDKLLPHLREGGHRALVFSQMTRVLDVLEDYCRARGHSYVRLDGSVTGSARQEAIDHYCAEDSDTFLFLLSTRAGGQGINLVQADTVIMFDSDWNPQNDAQALARAHRIGQTRQVQVYRLVMRGSYEKEMFTRASMKLGLEQAIFGGADKEEKTTAQSRKEIEALLKHGAYGIFAEDEVRAQQWSDDSIVDILARSEQKLIKGAEETNEVGPSTFATATFVDSGMRADGVSLDDPNFWQKLMPEAAAAEEERKAEAEELLAKMRAAEKLAEEKKNAVNAFHWSWGERKRVVASFMLFGWGMWEPIRARSQLKDDKTIAHVKMFCRCYVEDALKTVPSDLVPNIIEVLTTEEDEDENSLPDSEGREYLKYIMAEQGFNNFVRGRASDDLARLELLQGGIKAVTKAGSFENALTAEGMPIPELFADPVASWWTEDHDRALVVGTLKHGFGKYAEIRDDPNLPFAETFAGKNAPEPVKKDKKKEFDVVAVDTVDAEKPIEWIHGRLLSMRTKRIFSALGGTSFEPPPKIERTARKSKTAKFPREKKPKGAPRSGSGATIEKLEKAQEFLKELKRDACGQLAMPVGPISGVTIECLGAVHNKNDFVSQQYILPVGFKSSRMYPRLDNLDERTRWEQKITKGPKGEPQFTLTAEEGCEPIVAKSATAAWAEVLKRAKAAREARGEVPKKTAISGPEFFGYSLPHVRLMIESLPRVSECKGYVMYADSCAKTVERKKKEEAAMTHPSAGDDKPVANDDVDLSQGYETIDIE

SEQ ID NO: 15447 - protein, 293 aa, Ashbya gossypii ATCC 10895
MSDEITHPTIKDGWFREISDTMWPGQAMTLRVEKVLHHEKSKYQDVLVFKSTNHGNVLVLDNVVQCSERDEFAYQEMITHLAMNLHANPKKVLVIGGGDGGVLREVLKHESVEEAWLCDIDEAVIRVSKQYLPEMSRSYEHPKVKTHIGDGFQFLRDYPNTFDVIITDSSDPEGPAEALFEQPYFSLLNQALTENGVITTHPESLFIHMEIIKQLKGTCSQLFPNVGYAYASVPTYPSGQIGFMVCSKNADIELSKPLRTISDEQERELYKYYSKKMHEACFVLPTFAAKELN

SEQ ID NO: 15448 - protein, 149 aa, Candida albicans SC5314
MSEYSGSNSEDLSLPKATVQKIINEILPKDIGIAKEAREAITECSIEFIMMLSTQSNDIAEKEAKKTIASDHVVKALEELDFKIYLDIINKILDEHKELLKGKEKRNNKFQNSGLTEEELLRQQEELFKKSRARLQNQSGSLTAKPEPN

SEQ ID NO: 15449 - protein, 333 aa, Zea mays
  misc_feature (209)..(209): Xaa can be any naturally occurring amino acid
  misc_feature (216)..(216): Xaa can be any naturally occurring amino acid
MEAEAAAKRAREGGEDATAPVAGAEAAVAGAGEQAGISAVIPGWFSEISPMWPGEAHSLKVEKVLFQGKSDYQNVMVFQSSTYGKVLVLDGVIQVTERDECAYQEMITHLPLCSIKDPKKVLVIGGGDGGVLREVSRHISVEQIDICEIDKMVVDVSKQFFPHLAVGFEDPRVSLHIGDGVAFLKNAPEGTYDAVIVDSSDPIGPAQEXFEKPFFXSVARALRPGGVVCTQAESIWLHMHIIEDIFVNCRQVFKGSVNYAWTTVPTSPSGVIGFMLCSPEGPAVDFQPPVFNIEGEEHFTKSKGPLKFYNSEIPPASFCLPFFAKRVIESKAS

SEQ ID NO: 15450 - protein, 545 aa, Xanthomonas campestris pv. campestris str. ATCC 33913
MHSIDVVLAMLLAVAASGYLIRILPFSLPLPLVQIALGAVVSGVFDAGHELEPELFFLLFLPPLLFLDGWRIPKQGLFRDKAAILELALGLVVFTVVGAGLLIHWLIPAMPLAVAFALAAIISPTDPVAVSSIASKVQIPKRLMHILEGESLLNDASGLVCFQFAVAAVLTGTFSVATASLTFLWVALAGLGLGVATTFGLSRIQAWIWRHFGEEPGSAILVNLLTPFAAYLLAEAFHASGILAAVAAGITMSYVEMAGNAPGNMRLQRSAVWDTVQFTFNGIIFVLLGEQLPGILDGAVRSVQEAGHLNPWWLAVYVATISASLMALRFVWVFLSLRWNLFKAQRRGEAHVSPPWRIVVAVSLAGVRGAITLAGVLTLPLVLEDGSPFPARQLAIFLAASVILVSLLVASVALPRLLRGLELPEEEDEQLKEDLAVKAASQAALEAVEKLRQRLVEDSAHAERYNAAANQVSQRYQRKLGAVDMAETDPEEAGAFEQALRQFRHAALVAERNELFKLARRREISDDLSRRLVRNLDLIESRKRA

SEQ ID NO: 15451 - protein, 364 aa, Celastrus scandens; identical to SEQ ID NO: 8509

SEQ ID NO: 15452 - protein, 370 aa, Celastrus scandens; identical to SEQ ID NO: 8513

SEQ ID NO: 15453 - protein, 175 aa, Synechococcus sp. WH 7805
MSIPEGYRLRRMLRSAMAPSVSNVSVRTPDGSEKSLGSYAGQVLLIVNVASRCGFTKQYAGLQSLQDTFGPRGLQVLGFPCNDFGAQEPGTLDEIKSFCSTTYGASFELFDKVHATGSTTEPYTTLNQTEPAGDVAWNFEKFLVGKDGTVLARFKSGVAPEDAELSAAIEAALQA

SEQ ID NO: 15454 - protein, 221 aa, Glycine max
MKNCELCKLPARTFCESDQASLCWDCDAKVHGANFLVERHTRTLLCHACQSPTPWKASGAALGNTVSLCERCAGGTTEQGQESQGGNDDDIDTDIDTDDEDDYDESEDEVAADEEDGDNQVVPWSSEPPPPAPSSSSSEESVSRCNNVDEVSTTLKRRRQEDNDFQGWNSNNWGCERSEVERGGWLVRLRRRTADDVAVEQRSARAASPDGCCGDRASEDV

SEQ ID NO: 15455 - protein, 852 aa, Schizosaccharomyces pombe
MIQQPTTAKPRISTSSKLNTVLSKNKENVPGKLFKKFKCPSLVISEKRKELPLRKKPRVNYSEYGSVDGKYDSAYVSENVSGLATIKEANRLILNHERRDPSTVIKKQFSVPKPIKGHEDISKLCAHRPPPTLGMKRKVDFIPRPLYDPADEFAIVLYDPTTDADEIIPDIKEVLAEKRKKDELLKNRKGKKEISDSEPESDHDSCVSTDTVASCSTEQSLITSNTSKHRRPNKSLKDLLGIQKEKPPPPPVAVVIDPKLARILRPHQIEGVKFLYKCVTGRIDRCANGCIMADEMGLGKTLQCIALLWTLLKQSPQAGKPTIEKAIITCPSSLVKNWANELVKWLGKDAITPFILDGKSSKQELIMALQQWASVHGRQVTRPVLIASYETLRSYVEHLNNAEIGMLLCDEGHRLKNSDSLTFTALDKLNVQRRVILSGTPIQNDLSEYFSLLNFANPGLLGSRQEFRKNYEIPILKGRDADGTEKDKENGDAKLAELAKIVNRFIIRRTNDILSKYLPVKYEHVVFCNLSEFQLSLYKHFITSPEINKILRGTGSQPLKAIGLLKKICNHPDLLNLTEDLEGCEALFPPGFIPRELRGRDRNIDSSLSGKMLVLERMLYQIKQETDDKIVLISNYTSTLDLFEQLCRARGYKALRLDGTMNVNKRQRLVDTFNDPEKDAFVFLLSSKAGGCGINLIGANRLILFDPDWNPAADQQALARVWRDGQKKDCFVYRFIATGTIEEKIFQRQSHKQSLSSCVVDEAQDVERHFSLDNLRQLFQLNDHTVCETHETYKCKRCRDGKQFIRAPAMLYGDTSTWNHFTNPTLDRIEDHLLKREAGKQQVSTVFQYKSH

SEQ ID NO: 15456 - protein, 457 aa, Arabidopsis thaliana
MLDSLVSKLPSLSTSDHASVVALNLFVALLCACIVLGHLLEENRWMNESITALLIGLGTGVTILLISKGKSSHLLVFSEDLFFIYLLPPIIFNAGFQVKKKQFFRNFVTIMLFGAVGTIISCTIISLGVTQFFKKLDIGTFDLGDYLAIGAIFAATDSVCTLQVLNQDETPLLYSLVFGEGVVNDATSVVVFNAIQSFDLTHLNHEAAFHLLGNFLYLFLLSTLLGAAVSPLFSSLPFFLTGLISAYVIKKLYFGRWPHINCHRHSTDREVALMMLMAYLSYMLAELFDLSGILTVFFCGIVMSHYTWHNVTESSRITTKHTFATLSFLAETFIFLYVGMDALDIDKWRSVSDTPGTSIAVSSILMGLVMVGRAAFVFPLSFLSNLAKKNQSEKINFNMQVVIWWSGLMRGAVSMALAYNKFTRAGHTDVRGNAIMITSTITVCLFSTVVRNLWMIK

SEQ ID NO: 15457 - protein, 142 aa, Salmonella enterica
PKPMFGDNGSGMHCHMSLAKNGTNLFSGDKYAGLSEQALYYIGGVIKHAKAINALANPTTNSYKRLVPGYEAPVMLAYSARNRSASIRIPVVASPKARRIEVRFPDPAANPYLCFAALLMAGLDGIKNKIHPGEAMDKNLYD

SEQ ID NO: 15458 - protein, 374 aa, Crossopetalum rhacoma; identical to SEQ ID NO: 8514

SEQ ID NO: 15459 - protein, 374 aa, Crossopetalum rhacoma; identical to SEQ ID NO: 8516

SEQ ID NO: 15460 - protein, 569 aa, Schizosaccharomyces pombe
MPDSKHWVILLFRRDGDDDDDDGQDPALQELYSSWALFILLVLLIGALLTSYYVQSKKIRAIHETVISVFVGMVVGLIIRVSPGLIIQNMVSFHSTYFFNVLLPPIILNSGYELHQSNFFRNIGTILTFAFAGTFISAVTLGVLVYIFSFLNFENLSMTFVEALSMGATLSATDPVTVLAIFNSYKVDQKLYTIIFGESILNDAVAIVMFETLQQFQGKTLHFFTLFSGIGIFIITFFISLLIGVSIGLITALLLKYSYLRRYPSIESCIILLMAYTSYFFSNGCHMSGVVSLLFCGITLKHYAFFNMSYKAKLSTKYVFRVLAQLSENFIFIYLGMSLFTQVDLVYKPIFILITTVAVTASRYMNVFPLSNLLNKFHRQRNGNLIDHIPYSYQMMLFWAGLRGAVGVALAAGFEGENAQTLRATTLVVVVLTLIIFGGTTARMLEILHIETGVAADVDSDTEIGMLPWQQSPEFDLENSAMELSDASAEPVVVDQQFTTEHFDEGNIAPTLSKKVSSTFEQYQRAAGAFNQFFHSSRDDQAQWLTRFDEEVIKPVLLERDNLKNGTKK

SEQ ID NO: 15461 - protein, 131 aa, Salmonella enterica
GDNGSGMHCHMSLAKNGTNLFSGDKYAGLSEQALYYIGGVIKHAKAINALANPTTNSYKRLVPGYEAPVMLAYSARNRSASIRIPVVASPKARRIEVRFPDPAANPYLCFAALLMAGLDGIKNKIHPGEAM

SEQ ID NO: 15462 - protein, 374 aa, Cuervea integrifolia; identical to SEQ ID NO: 8517

SEQ ID NO: 15463 - protein, 534 aa, Synechococcus elongatus PCC 6301
MLPFLLADLSLAAVTAKPEPSADLATTLTICLLGATLVALISRRFRIPYVTGLVLAGLTITNLLPRRLGIDSGLILNLFLPILVFQAAINTDISRLRSSFAPISVLAGPGILLATGVTASVLKFGLNLDWIPALLVGSILAITDTVSVIAVFREIAVPSRLTTIVEGESLFNDGVALVIFGLIVELQAGEQVTAISAVQSFFLVVLGGGLLGLATGYLASGLFRTLADDSLSGILLTVAVALGTFQLGEALNVSGVVAVVVAGLTVGNLALDRAQSPSSRLTLINFWEYAAFCVNTFIFLFIGVEVDPRSLLQTLPAVLLAIVAYQLARLVTVYPLMALVNRFDRPIPFRWQHVLFLGNIKGSLSMVLALSLPATLGNRSELVNLVFGVVLLSLVVQGLSLPWFVKRLKVATRSTRSQEAEQLQAQLIAGKAVQSELLNLYDAGVLPKAVHEELRARYQLAIAGAEQSLRGLYNRRSTNLRNSAAPAFSSLQRRLLLVEKNALLDSARKGILTEEAIADRLQVIDAELLRAEAD

SEQ ID NO: 15464 - protein, 582 aa, Pseudomonas syringae pv. syringae B728a
MKQNATTYSQRLLRGQSPSYERLQARLAEDGSQIDADPLALHCGWGRLLIGHTYPDPAALAQDLLNEKPGERDIALYVAAPQQVLAQSPQQLFLDPSDTLRLWFSDYRPAHRVFRGYRIRRAHNENDWQAINNLYLARGMLPIDPELLTPRHEGGPVYWVAEDEGSKTIIGSVMGLNHQKAFNDPEKGSSLWCLAVDPQCTRPGVGEVLVRHLIEHFMSRGLSYLDLSVLHDNDQAKALYAKLNFRNLPTFAIKRKNGINESLFLGPGPQADFNPYARIIVEEAHRRGIDVQVDDADAGLFTLSYGGRRIRCRESLSDLTSAVSMTLCQDKSLTHRALKAAGLRLPAQQRAGNAADNLAFLEEHGQIVVKPLDGEQGQGVAVDLRTIEDVQSAIEQARQFDTRVILESFHEGLDLRIVVIGFQVVAAAIRRPAEIIGDGRHTIKQLIEAQSRRRAAATDGESRIPMDQETERTVREAGFDYADILPMDQRLAVRRAANLHTGGCLEDVTAILHPVLHDAAVRAARALDIPVVGLDLMVPAADQPDYVFIEANERVGLANHEPQPTAERFVDLLFPHSLPVHI

SEQ ID NO: 15465 - protein, 177 aa, Shewanella oneidensis MR-1
MMKFPLFILTSLMSTSVFAATCPSYLDVEVRKLHSEQSVNLCELTQGKPVLLINTASNCGYTSQFKALEALHKEYKDKGLVVIGFPSDDFFQEENDEKDTAKVCYINYGVTFTMLATSPVRGSDVNSVFKYLGDKAGAPKWNFYKYVVSGDGNTVMQFNSKVKPDSTELKQAIESVL

SEQ ID NO: 15466 - protein, 442 aa, Silicibacter pomeroyi DSS-3
MTIDLAKFAKDKGVKYFMISFTDLFGGQRAKLVPAQAIADMQEDGAGFAGFATWLDMTPAHPDMLAVPDPSSVIQLPWKPEVAWVAGNCVMEGADVAQAPRNVLRRLIAEAAAEGMHVKTGIEAEFFLLTPEGDQISDPFDTAAKPCYDQQAVMRRYDVVREICDYMLELGWGPYQNDHEDANGQFEMNWEFDDALSTADKHSFFKFMTKSVAEKHGFRATFMPKPIEGLTGNGCHAHISVWDAPGAASKVNVFAGAGDGPTGEVGLSERGKHFLGGIMKHASALAAITNPTVNSYKRINAPRTMSGATWAPNTVTWTGNNRTHMVRVPGPGRFELRLPDGAVNPYLLQAVIIAAGLSGIHSKADPGKRWDIDMYAEGHKVRGAPKLPLNMLDAIREFDRDKELKKSMGDEFSASYIKMKMQEWNSFVTHFSRWEKENTLDI

SEQ ID NO: 15467 - protein, 338 aa, Cyanothece sp. PCC 8801
MGSHSDFDYYLAYGNRDSVTIQPQPGILLIGGAEGDKSGEHEATQWFLERAKGGKYLVLRVGRIKKQADWIAQHYRDWIHSAAELSINSREAANNRKVVDYIREADALFIAGGDQTAYQEYWEGTATEDALNYLINEKKIPIAGTSAGMAIMGDYYYAPHHQGVLSSEILDDPFHYNTEHIHRSKFLEVPYLGRVITDTHLDRLNQKNPETRYGRLLGLLARLIYEDNNQLDHYAIGLEEGAFVAIDEKGIATVFGNGTNIGQDAYFLQTNGALPEQMEPGWPLIWDHNGQAVKVYRIPGTPEGSGYFDLNDWSTAKGGQWKYWYTVGGKSGLRKTSL

SEQ ID NO: 15468 - protein, 619 aa, Corynebacterium efficiens YS-314
MGRAVGIDLGTTNSVVSVLEGGEPVVIANSEGSRTTPSVVAFAKNGEVLVGQSAKNQAVTNVDRTIRSVKRHIGTDWSVAIDDKNYTAQEISARILMKLKRDAEAYLGEEVTDAVITVPAYFEDSQRQATKEAGQIAGLNVLRIVNEPTAAALAYGLEKGEQEQTILVFDLGGGTFDVSLLEIGDGVVEVRATSGDNELGGDDWDQRIVDWLVEKFQSSHGIDLTKDKMALQRLREAAEKAKIELSASQNANINLPYITVDADKNPLFLDENLSRAEFQRITQDLLDRTKTPFNQVIKDAGISVSEIDHVVLVGGSTRMPAVTDLVKELTGGREPNKGVNPDEVVAVGAALQAGVLRGEVKDVLLLDVTPLSLGIETKGGVMTKLIERNTTIPTKRSETFTTAEDNQPSVQIQVFQGEREIASANKLLGSFELGGIAPAPRGVPQIEVTFDIDANGIVHVTAKDKGTGKENTITIQDGSGLSQEEIDRMIKDAEAHAEEDKKRREEQEIRNNAESLVYQTHKFVEENDGKISEELKGKVEEAAKGVEETLKGEDIDAIKTAVDKLNTESQEMGRAIYEAEAAAGATQADAGAEGAADDNVVDAEVVDEDVSEEKKDGDK

SEQ ID NO: 15469 - protein, 382 aa, Vibrio vulnificus CMCP6
MKNAVHFGAGNIGRGFIGKLLADANVAVTFADVDAPLVDQLSHKQEYKVKVVGSECQIDTVTHVTAVNSASEEVIDRIVQTDLVTTAVGPNVLDIIAKTIAQGIAKRFAAGNLAPLNIIACENMVRGTTHLKGEVYKHLDASLHAQADELVGFVDSAVDRIVPPAEAANDDPLEVTVESFSEWIVDEQQFKGEVPSIAGMEKTHNLMAFVERKLFTLNTGHCITAYLGCLQGHRTIREAIENPAIRDQVKQAMMESGEVLIRRYGFDREMHQAYIEKILARFANPFLVDEVDRVGRQPIRKLGMNDRLIKPLLGTIEFGTANQHLLKGIAAALKYQNDSDPQAVELQRSLQQVGVKKTLAKYTSLAEDSVEVAKIETLYNQL

SEQ ID NO: 15470 - protein, 448 aa, Synechococcus sp. WH 5701
MGRGRTGIAVLAGLGACATAVIVGTDWLGSPSAASLITDSPKEVMDQAWQIVFRDYLDTTGKYTPDQWRKLRRDLLAKSYGSTKESYEAIRGMLGTLDDPYTRFMDPREFKEMQIDTSGELSGVGIQLSLDKETKELVVVSPIDGSPASEAGVQPKDVIVSIDGKSTKGMTTEDAVKLIRGQAGTKVTLELRRNSKVVSVPLTRARIELHAVEHQINTGPDGVKVGYIRLKQFNANAAKDMRAAIRDLEQKGVQGYVIDLRSNPGGLLMASVEIARQLLDEGIIVSTRTRDGIQDVRRANGRALTKSPIVVLVNEGSASASEILSGALQDNKRAVLVGQKTFGKGLVQSVRGLSDGSGMTVTIAKYLTPSGRDIHKHGIDPDVSVKLSEAEASKLKLEDLGTSKDVQYRAAESTLVKKLRATSASRTTFNPTSANLPAALGTSATPTP

SEQ ID NO: 15471 - protein, 664 aa, Schizosaccharomyces pombe; identical to SEQ ID NO: 200

SEQ ID NO: 15472 - protein, 441 aa, Legionella pneumophila str. Paris
MSAYVKNFDEHKEIKSSRDICKSLKPVPTAYMDNKHCEHCYPEKRSHFRRKFFNLFHYFIFNPFIYLLSKLFLLSEHDFLRFNNLLNQLVINIFQKLKLYTKTQTIDRKQFNNSVLAFWDEAQKRGLELYNFKESNLHTLYFKLVYNRKKYYFIQTPISLISQKNTRFDEDTKYDNKWILKKKLLDSQIPCPLGRVFISSKKAYNYGISLGFPLVVKPLSESLSIHTSCTIQTPNELKEAINIVKQVDFRVLVEKHIPGDVYRSLIINDSLIACVRRQPESIVGDGVTTLQELIDKKNKVRWKESHGKYPYKITPNSNLIKILSSQEVALNTVINKGQQIFIAKKVTMSSGAKISDVTDLIHPENKLLLEKAHKILNIPLTGLDFICQDISLPWHKQQFGIIENNSFPYIELHLNPSDGKGINVAGKIWDYVLDVLSQKNE

SEQ ID NO: 15473 - protein, 173 aa, Arabidopsis thaliana; identical to SEQ ID NO: 10585

SEQ ID NO: 15474 - protein, 664 aa, Chlamydophila caviae GPIC
MSEQKKSSKIIGIDLGTTNSCVSVMEGGQAKVITSSEGTRTTPSIVAFKGNETLVGIPAKRQAVTNPEKTLASTKRFIGRKHSEVESEIKTVPYKVASGSNGDVVFLVDGKQYTPEEIGAQVLIKMKETAEAYLGEPVTEAVITVPAYFNDSQRASTKDAGRIAGLDVKRIIPEPTAAALAYGIDKAGDKKIAVFDLGGGTFDISILEIGDGVFEVLSTNGDTHLGGDDFDEVIIKWMIEEFKKQEGIDLSKDNMALQRLKDAAEKAKIELSGVSSTEINQPFITMDASGPKHLTLTLTRAHFEKLASTLLERTKAPCQKALADAKLSASDIDDVLLVGGMSRMPAVQEVVKSIFGKEPNKGVNPDEVVAIGAAIQGGVLGGEVKDVLLLDVIPLSLGIETLGGVMTPLVERNTTIPTQKKQIFSTAADNQPAVTIVVLQGERPMAKDNKEIGRFDLTDIPPAPRGHPQIEVTFDIDANGILHVSAKDAASGREQKIRIEASSGLKEDEIQRMINDAEKHKEEDKKRREASDARNEADSMIFRAEKAISDYKDNIPESLVKEIEERIEKVRTVLKEEAPVEKIKDASEELSRHMQKIGEAMQSQSASAAASSAANAQGGPNINTEDLKKHSFSTKPPAGNSASSNSNNENIEEADVEIVDKPND

SEQ ID NO: 15475 - protein, 493 aa, Shewanella sp. MR-7
MMLLRDLLAPWFPYAGEQTFLDLTLDSRAIRRGDVFLALPGHKVDGRQFIDKALAQGVTAVLVHTDSIEEQGKVITTEQGVQIYFYQLAKQVSAVAAVRYPVVQGQSMGIVGITGTNGKTSTSQLCAQLVTLLEGKAAVMGTLGNGLWGELVDSGNTTADAITLMRQLHEFAGKGVNTCAMEVSSHGLVQGRVDAVPFDVAVFTNLTRDHLDYHGDMENYAAAKQMLFRFDALRHGLVNLDDPVGAAWLSELANVPAKMWGFSIEAHTEAAFYTKNAQFNDQGVQATLVWPEGEIDIRSPLLGAFNLSNLLAALSALYLQGVDMRALAAKVPYLVPVAGRMERFTTADNITLVVDYAHTPDAIEQALNALRRHCAGELWCVFGCGGDRDKGKRPLMGQAAEQCADRIMVTSDNARSEDPNQIITDIIQGLTHPERALTEVDRVAAIKRVVAQAKPGDVILLAGKGHETYQEAAGVRHDYDERALARQLSEQSQ

SEQ ID NO: 15476 - protein, 524 aa, Parvularcula bermudensis HTCC2503
MEIGTFVSLGAYFLLMLGIGFYAYRTSTGDTSEYMLGGRKLGPAVTSLSAGASDMSGWMLLGLPGAAFVSGLPATWIAIGLTLGAFANYLVVAPRLRLYTERADDALTIPDYFEKRFHDNTHILRVFSSVVIVLFFTLYTSATLVGGGKLFESAFGQDYITGLWITAGVVMAYTFVGGFLAVSLTDFVQGCIMFIALLIVPIAAFTQLGDNVDLAAILADIGPALSGEIAGGLDSPTLNLFAGASFLGTISLLAWGLGYFGQPHIIVRFMAIRSVADVPMARHIGMSWMIVALIGSVSTGLIGLAYIAQNGVPMEFVDENGQFDPETVFIVLSQILFHPLIGGFLLAAILAAIMSTISSQLLVASSSLTEDFYKLFLRRGASDKELVMVGRISVILVALVAILLAYDDNSSVLDLVANAWAGFGAAFGPVIIISLHWRKMTMPAAFLGMVVGAVTVIIWTYLPLLPDADGVARQIPLNSELYSIVPGFLFCWLTVWGVSLFTHPKEAVIATHDAVHAEITGGSA

SEQ ID NO: 15477 - protein, 432 aa, Synechococcus sp. PCC 7335
MTVNKRGFILGATALASAALVITGTGIQLSDGQAFFKDGPKEIVDEVWNLIDNQYVDESFNSLDWNDVRLEYLNRTYTDKESAYVAVREMLEQLDDPYTRFMDPEEFNNMQIETSGELTGVGIQISKEEETDNIVVVSPIEATPAFEAGLLSGDVITSIDGNSTEGMELNDAVSLIRGPVNSDVVLSIDRDGRALEFELTRARIEIHPVRFSVKDSPQGSIGYIRLTQFSSNAAEEMKDAIESLEERKVTGYVLDLRSNPGGLLFSSIEIAKMWIEEGTIVSTVDRNSTSNEEVAHSEALTDKPLVVLVDGGSASASEILSGALQDNQRATLVGTQTFGKGLVQSVRGLTDGSGIAVTIAKYLTPSGRDINKLGIEPDYIVELSDEEREALVEDRDKVGTLDDPQYAEAVKVLTDEVRLQRQSASSAGAADR

SEQ ID NO: 15478 - protein, 136 aa, Brassica napus
  misc_feature (132)..(132): Xaa can be any naturally occurring amino acid
RRRDRINERMKALHELIPHCTKTDKASILEEAIDYLKSLQLQLQVMWMGSGMAGAAATPIMFPGVQPPPPFIRQVQSPVLLPRFPVMDGSAIQNNPGLVCQNPVQSQVFPDRFGRYVGLFPRMQGTSQPMEXMTFG

SEQ ID NO: 15479 - protein, 1123 aa, Physcomitrella patens subsp. patens; identical to SEQ ID NO: 8531

SEQ ID NO: 15480 - protein, 443 aa, Pyrococcus sp.
MNEIKGIERAVQVEVPRPRFLLLAFTDINGSLKGMEIPMERYEEAVEDGVSFDGSSIPGFEGIEDSDLIFKADPSTYAEIPWEGIGRVYGYIYKGDEPYQADPRGILKRVLERLEKEGLKAHIGPEPEFYIFKKNGTWELHIPDSGGYFDLVGLDKAREIRREIALYMPYLGLKPEVLHHEVGKAQHEIDFRYDEALRTADNIVSFKHVVKAVAELHGYYATFMPKPIYGFPGNGMHLHISLWKDGENVFIGEDGLSDTALHFIGGILKHAKALAALTNPTVNSYKRLVPGYEAPVYISWGYRNRSALIRVPAFKGSGARIEYRCPDPSANPYLALAGILMVGLDGIKKKVEPDSYVETNVYEMDDAERERLGIDTLPGSLGEALEELKKDKTVREALGGANKNFIDYKEREWEEYIEYLSSRDIPIDTKKVTEWELERYFYV

SEQ ID NO: 15481 - protein, 635 aa, Haemophilus somnus 2336
MGKIIGIDLGTTNSCVAVMDGDKPRVIENAEGERTTPSIIAYTNDNETLVGQPAKRQAVTNPKNTLFAIKRLIGRRFEDQEVQRDVAIMPFEITKADNGDAWVSVKGEKMAPPQISAEVLKKMKKTAEDFLGETVTEAVITVPAYFNDAQRQATKDAGRIAGLEVKRIINEPTAAALAYGLDKGKGNQTIAVYDLGGGTFDLSIIEIDEVGGEKTFEVLATNGDTHLGGEDFDNRVINYLVDEFKKEQGVDLRNDPLAMQRLKEAGEKAKIELSSAQQTDVNLPYITADATGPKHLNIKLTRAKLEALVEDLVARSMEPVKVALSDAGLSVSEINDVILVGGQTRMPLVQQKVAEFFGKEPRRDVNPDEAVAIGAAVQGGVLAGDVKDVLLLDVTPLSLGIETMGGVMTTLIEKNTTIPTKKSQVFSTAEDNQSAVTIHVLQGERKQASANKSLGQFNLEGINPAPRGMPQIEVTFDIDADGIIHVSAKDKGTGKEQKITIKASSGLSDEEIQQMVRDAEANAEADRKFEELVQARNQADHLVHSTRKQLAEVGEKLSAEDKAPIESAVNELETAAKGEDKTEIDAKVQALIQVSEKLLQASQQQAQADAGAQQSQSTKGGEDVVDAEFEEVKDK

SEQ ID NO: 15482 - protein, 546 aa, Thinopyrum intermedium
MGLDLGELAFRYTGLAVSDHDSIVAINIFIALLCGCIVFGHLLEGNRWVNESTTALVLGLITGGVILLCTKGVNSRILIFSEDIFFIYLLPPIIFNAGFQVKKKQFFRNFATIILFGAAGTLISFVIITFGAMGLFSKLDVGPLELGDYLAIGAIFSATDSVCTLQVLNQDEAPLLYSLVFGEGVVNDATSVVLFNAIQNIDINHFDVFVLLQFIGKFLYLFFTSTVLGVASGLLSAYIIKKLCFARHSTDREVAIMILMAYLSYMLSMLLDLSGILTVFFCGIVMSHYTWHNVTESSRVTTKHTFATLSFIAEIFLFLYVGMDALDIDKWKLASSSPKKPIALSAVILGLVMVGRAAFVFPLSFLSNLSKKESHPKISFNQQVIIWWAGLMRGAVSIALAYNKFTTSGHTAVRVNAVMITSTIIVVLFSTMVFGLLTKPLINLLVPPRTGTAADISSQSFIDPLTASLLGSDFDVGQLTPQTNLQFLLTMPTRSVHRVWRKFDDKFMRPMFGGRGFVPFVPGSPIERSVHGPGLLGTATEAENRS

SEQ ID NO: 15483 - protein, 1142 aa, Brassica napus
MATVIDAAMPYRLLEEAAGSSSEGESSPVDAVLFVGMSLVLGIASRHLLRGTRVPYTVALLVIGIALGSLEYGTHHNLGKLGHGIRIWNEINPELLLAVFLPALLFESAFSMEVHQIKRCIGQMVLLAGPGVLISTFCLASLVKLTFPYSWDWKTALLLGGLLSATDPVAVVALLKELGASKKLSTVIEGESLMNDGTAIVVFQLFLKMVMGNTSDWGSIITFLIRVALGAVGIGLAFGIVSVLWLKFIFNDTVIEITLTIAVSYFAYYTAQEWAGASGVLTVMTLGMFYAAFARTAFKGDSQKSLHHFWEMVAYIANTLIFILSGVVIAEGILDSDKIAYQGNSWGFLFLLYFYVQVSRCIVVGVLYPLLCRVGYGLDWKEGIILVWSGLRGAVALSLSLSVKQSSGNSFLSRETGTLFIFFTGGIVFLTLIVNGSTTQFALHPLRMDGLPATKLRILDYTKYEMLNKALQAFEDLGDDEELGPADWPTVEKYISSLKDSEGEQVHPHSGSKTGNLDSTSLKDIRIRFLNGVQAAYWEMLDEGRISESTANILMRSVDEALDRVSTESLCDWRGLKEHVKFPGYYNFLHSKLIPGKLVIYFAVERLESACYISAAFLRAHTIARQQLYDFIGESSIGSTVIKESETEGAEAKEFLEKVRSSLPQVLRVVKTKQVTYSVLNHLLEYIQNLEKIGLLEEKEIAHLHDAVQTGLKKLLRNPPIVKLPKLSDLISSHPLSGALPAAICEPLKHSKKETMKLRGVTLYKEGSKPTGVWLICDGIVKWKCKSLGNNHSLHPTFSHGSTLGLYEVLTGKPYMCDMVTDSVVLCFFISSDRILAFVHSDSTIEDFLWKESALVLLKLLRPQIFEKVAMHELRALVSAESSKLTTYVSGESIDIDYNSVGLLLEGFIKPVGIQEELVPSPAALLPYNENQSFRNASEASGIMRVSFSRQATQYSVETRARVISFNTGAFGAHRTLQRKPSSLSSQIGTSSEHQLQRSSSKEHRGLMSWPESIYKTEQQEEINRKALNLSEQARQLSIFGSKVNLFTRSASFGGIINNKPQDNVLYKKHPLDAAKSESSMATREQVETRKFVSQLPAHVASGESSTRRKPMAESSDDEEEGIIVRIDSPSTIVSGMIEFNH

SEQ ID NO: 15484 - protein, 154 aa, Crocosphaera watsonii WH 8501
MPLPTSLVTLEGTALPLSELENKVILFVNVASKCGLTPQYSGLVQLDKKYGERGFKVVAVPCNQFGEQEPGTPAEIKEFTSTKYDVEFTLLEKQDVNGSNRSPLYQFLVKDGEDIAWNFGKFLVGRDGEVVARFEPATAPDDAQLEAAIDKALG

SEQ ID NO: 15485 - protein, 201 aa, Hyphomonas neptunium ATCC 15444
MRLAILALAAPFLAAACAEATAGQPTANAPAAPTEFQAEEPAPAMSATQFTSITGQPLDLTALGAKAILVVNTASRCGYTPQYAGLQKLYEANKADGLVIVGVPSNDFGGQEPGTEEDVKSFCEINYGVTFPLTKKYAVTGASQHPFYTGAIKTLGDPALPKWNFHKILVSADGTPLKAYASSVKPDDSGLAADIEAALGI

SEQ ID NO: 15486 - protein, 472 aa, Pediococcus pentosaceus ATCC 25745
MKKIIEKHPYLTIVFSMILGVLITIVSGLVFFVGILGHTDGEKNDFNRVASVYNQINSDYYKKVDTSKLATGAIDGMLSTLNDPFSDYLTDSDATSLNDSVSGAFGGVGIQVVKKNHQIEVMTTIDGTPAKKAGLKAGDVILEVDGKKLTNQSLSKATTLMRGKVGTKVKVKLQRGNDTFDKVLTRSKIPVETVTAKMLKNKVGYITISTVAEKTSSELKRALKRLDKQGAKSYIIDVRNNPGGLMQEALKMSSMFLKNGKTIMQVKARTGKAEVYKASKKYDGGYKVTKPTTVVINGESASAAEIFAAALHQSANVPLVGSKSYGKGTVQNITQYTDSDELKLTIAKWLTPNGTWIHGKGLKPDYQADYPAMAYITEFDQKKTYSVGESNSDIKNIQIALKGLGYYDDKISKEYTEKVKQAVEAYQEKNQLAVTGKVDAKTMRSIEQNVIKTLAKNDPALEKAQKVMNDEK

SEQ ID NO: 15487 - protein, 391 aa, Cyanobium sp. PCC 7001
MLLLAAGPALALSDAQQLVVEAWRLVNQSYVDPQRFEAVHWRRLRQKALERPISSSDDAYMAIEAMLAPIGDPYTRLLRPDDYNNLRSSTQGSVTGVGLQIGLRDGDQRVVVIAPLDDSPAAEAGLTSGTELLAVDGQPTPALGLEGTAAALRGSTGSQVLVTVARSGQPEEVVLERRQVNLRPVRSRRLRLEGHTVGYLRITQFAEPVPEQVHQALTDLVDQGIEGLLLDLRNNSGGLVSAGLAVADQLLDRQPIVETQDRDGLSSPVQAGAGQLYDGPMLTLVNGGTASASEILAGALQDNGRSELAGSRTFGKGLIQSLLPLSDSSGLAITVARYVTPSGRDIQNQGIEPEHPLPPPEPLNPGGDNDAWLQEASDLLVERIGRNAPEP

SEQ ID NO: 15488 - protein, 280 aa, Synechococcus sp. CC9605
MSSWIDEEHRGVRYGLRGEVLVEETSPFQRISVIRSERYGRGLLLDGCWMTAEQQERHYHEALVHPALCSASSIARILVIGGGDGGTARECLRHPDVQWLDMVEIDGRVVELSQEHLPDIGGSAWSDPRFQLTVGDGIAWAAQADDQSYDVVLVDGSDPAGPAEGLFNRAFFENCRRLLKPGGVFGTQSESPEAFRDVHIAMVRLLREVFDHADPLYGWVPMYPSGWWSWTFAAMGTPRYCTPDLERSQAIAAGCEIWSPRWQRGAMDAIPAFIERELQS

SEQ ID NO: 15489 - protein, 1133 aa, Debaryomyces hansenii CBS767
MEEEESPLDQLGVKFVDQDELEHDITKKANEALINKDTELDQKRLDKANNDYNKALSKLRILRNRLSNPRTKISQRKPLKDECDWIEKNELEPLKQDIVDITNRLNENKSQLSESKNQCNQKKSTQSINEKLPGESERDFLIRTGKITAFGNENAFHQDKTNEPDDIKSHVFLRAPGFEDANVTTQNDDDYDYGATENAMPSLYNETNKRKQLEMEGSENESDYSPLEENQNALEEEDIDNDNVVDDDYDIYSAPNEVVTETKNLDAQRNVDDGDEYLYQIRLKNWIKRRSELRKKTEEVTNETNDKEEWFKPHPTIPDAVLNSKFKLPGDIYPSLFDYQKTCVQWLWELYSQKTGGIIGDEMGLGKTIQIISFLAGLHYSGLLEKPVLVVVPATVMNQWVNEFHRWWPPLRCVILHSIGSGMGKNAIHSEEKIEAFLETTDPSSVKNDSFKGINSHMRAKEIIDTVMEKGHVLVTTYVGLRIYSKFILPRQWGYVVLDEGHKIRNPDLDISLTCKQIKTYNRIILSGTPIQNNLIELWSLFDFIFPGRLGTLPVFEQQFSVPINMGGYANASNVQVQTGYKCAVILRDLISPYLLRRLKSDVAQDLPKKNEMVLFVKLTQYQQDLYEKFLSSEDLHAILKGKRNILMGVDILRKICNHPDLVDREILQRRKNYNYGNPAKSGKLQVLKNLLQLWQMQGHRTLLFCQTKQMLDILEKFVTNLPSLNENGEEVRGTFNYLRMDGSTNIGRRQALVDTFNEDKQYHVFLLTTKVGGLGINLTGADRVIIYDPDWNPSTDIQARERAWRLGQKKDITIYRLMTAGSIEEKIYHRQIFKTFLTNKILKDPKQRRFFKVNDLHDLFSLGDQDEVGTETGDLFNGSETKFNGKKDRKSNKLFKPKHKNDDDFYQVANINGVSKLDNFEGDNQEKDGEQDGNKDESRIMEGLFANSGVHSALKHDDIMDSSKQEVSIIEKEANRVAAEAAEALKRSRKLTRKNNIGTPTWTGKFGLAGKFGPKVKRTKLSSNDKPSKLLSSTSILSELKQKKNKSDTVFAKKSANDDKKFDRQEMLDKLIGFLAKQTDHFSTSNNILTDLKLELNDEKDMILVRSMLREIATWDTPRKGWILKQEFLTNS

SEQ ID NO: 15490 - protein, 1187 aa, Vitis vinifera
  misc_feature (332)..(332): Xaa can be any naturally occurring amino acid
  misc_feature (368)..(368): Xaa can be any naturally occurring amino acid
  misc_feature (384)..(384): Xaa can be any naturally occurring amino acid
  misc_feature (542)..(542): Xaa can be any naturally occurring amino acid
MHSEPKQKRQKAGPNVVDYSDPFAIPNLLEGLDAGRFGSVTKEIEALCARRMQMLQPYYVMYPSLSYMCTDLGKKQGKKASKLVNREASHLAHEDVIDLEDDHVVDDALTATAVEDATLPVVIIDSDDEDCGDQKVSHPPQETAWPSFSYQEVVLRKPSVGLLANNPVVRDYVGSIAPKVEEGSLMGATEIRKDKDVYIGVGEKSLVANLEMKKVQGEYVGVEDDMETNEGNLRAKTEDDGLADMWQEFDLALQSSKDVAVDPEEDEKESKEECEHSFVLKDDIGSVCRICGVVNKSIETIIEYQYTKGGGELQNRPHLVSWSNVCMEKKDXGLGIKNLSSPNMVLLGKWSWRFASENEPFWKLVIIXKYGEEKGGWCFGASKXSHGMGLWKAIKNGWLEFGKRVAFKVENGRKVQFWNDRWCGENALKEDFPSLYFLASFREAWVALLWDGTREVGHWNLVFTRHNDDWEIKDVEALFRKLNGQVLRRDDEDVMNWWISKKGLFTVKSFYSFLAPCNVREFPQSIFWNWVSNKVKRSRTYXYEPRNTKDREPTDDPSDGLGFSEHNLTVTEIHAHPRHSMQMKPHQVEGFNFLVSNLVAENPGGCILAHAPGSGKTFMIISFMQSFLAKYPQARPLVVLPKGILATWKKEFLTWQVEDIPLYDFYSVKADSRPQQLEVLKQWVAEKSILFLGYKQFSSIVCGDGASKATIACQEILLKAPQILILDEGHTPRNENTDVLYSLAKVQTPRKVVLSGTLYQNHVKEVFNILNLVRPKFLKLESSRAVVKRIMSKVDIMGVRKQLKSNAADAFYDLVENTLQKDDNFRRKITVIQDLREMTSKVLHYYKGDFLDELPGLVDFTVLLNLSARQKKEVGNLNKFERKFKKNSVGSAVYLHPQLKYFAEKLAANESKTDEMTCQKKMDEILEQLDVRDGVKAKFFLNVLALCQSSGEKLLVFSQYLLPLRFLEKLTMKVKGWSPGKEIFAISGESSSEQREWSMERFNTSPDARVFFGSIKACGEGISLVGASRVLILDVHLNPSVTRQAIGRAFRPGQKKKVHVYKLVAADSPEEEDHNSCFKKELISKMWFEWNEYCGHHEFEAETVDVSDSGDIFLESPLLREDIKVLYRRIFSKEQLANQRLKEFFIKSPVQVVPCFVGNESSSMMDFRSLPCRWISSFLYMPLGVLL

SEQ ID NO: 15491 - protein, 1163 aa, Gibberella zeae PH-1
MAAQDAGSENHEVDKAALLDQMVAAAQESVSQNEGQEEQPNTEGLNEEDALRNLTGTVRDQNDLERDITLQANAALNEAEDKKDKNRIAKLQESKHRLQLQLDKEKKNLERVAHSNVYQSRNIQKKIAKLDDEIRQMTSDISDFQSRISKRHEDHPAEDPKKSKSAKLPGETNREFLIRTGKITPFAKIGGPRPAGIQGQLAETILDAEEEAAAEQLGEELQGPASHQQLRRPGFADEIETETAPPQPAATIAESEFSLRPRKKTRLTQKERSPSADFEPEASGNESHDDDVWQQGNEDDLIREQRRQAKAKAKVADQEQIDLSKIDDGNESHYKTRLNDWVTRRSRARKARRLTSEVPTDGNESDEEEKEWFKPAPDFPDYDFGDGLKLPGDIHPSLFGYQKTGVQWLAELYKQNVGGIIGDEMGLGKTVQLIAFIAALHYSKKLRRPVIVVAPATLLRQWVSEFHRWWPPLRVSILHASGSGMMNPKFEDEYDLDHYKPLATKSQKAASRIVNGVAKSGHVLVTTYTGLQTYADTLLPVEWDYAVLDEGHKIRNPNAEITVTCKELNTPNRVILSGTPVQNNLTELWSLFDFIYPMRLGTLVNFRAQFEIPIRQGGYANASNLQVMTAEKCAEALKETIGEYLLQRLKVDVAADLPEKTEQVLFCKLTEGQHKAYETFIKSDEVSAILNRRRQSLYGIDILRKICNHPDLLDKSLGKKAGYDFGNPKLSAKLQLTKDLLQKVMIPNGHKTLLFSQGKQMLDIIEKCIGECGISYVRMDGETPVDRRQTMIDKFNESPDIHVFLMTTRTGGLGTNLTGADRIIIFDPDWNPSTDLQARERAWRLGQKKPVKIYRLMTEGTIEEKIYHRQIFKQFMTNKVLKDPKQRSSYDLSDLYDLFSFNTGKDATANRSEIFKKAQVSLTNGDEDGNGNLDPKHVGSPDREKDKERMELKQMGLVAAMEDVREEKSSHDEKRMLEGIFAKSVNNAYDHEAIVNGPQKPKADISILQDEANLVARQAAAHLRQAGAEARRVPIGTVTWTGEVGQAGRPGANRRRGGPSSAGIMSNLADRQGLDTGSGRSSRSGTPGVDKNLKSKDFIAMIKTFINRHNGRVPSKMLVDHFNPYCPGKKQSDEFKAALDKVAVMNKTGGAGRGIWTLKPGVK

SEQ ID NO: 15492 - protein, 169 aa, Zea mays; identical to SEQ ID NO: 239

SEQ ID NO: 15493 - protein, 363 aa, Cuervea kappleriana; identical to SEQ ID NO: 8542

SEQ ID NO: 15494 - protein, 102 aa, Salmonella enterica
TFMPKPMFGDNGSGMHCHMSLAKNGTNLFSGDKYAGLSEQALYYIGGVIKHAKAINALANPTTNSYKRLVPGYEAPVMLAYSARNRSASIRIPVVASPKARR

SEQ ID NO: 15495 - protein, 364 aa, Dicarpellum baillonianum; identical to SEQ ID NO: 8545

SEQ ID NO: 15496 - protein, 1088 aa, Oryza sativa Indica Group
MAASVEAAAAAAVVAPPASVGGDEVVVGGGGGGASEQARTLIGALNLLSRNLPLPPAVLHAVSSIYHGGDAWEGEGEEGGEEEVAAAAAAVGDGCGESGEGEEDRADASPGADEGCSFKAPYCHCDDWGVTLIQELEDAVLKNQGPYMSYSELTALKEDRFNTSIQHRLTELEGLPSTRGEDLQMKCLLELYGLKLLDLQKKVRTDISAEYWLHKKCAHPDRQLFDWGMMRIRYPFTMYGIGDSFSMDADDINRKKRFSEDSLFGIWEQQRISRLEEEEKNQAEIRKRKFFSEILNAAREYQLQVPASYKRKKQRNDGVLAWHVRARQRINRMEKSRLQVLKAGDQEAYLRMVEESKNERLKLLLGKTNELLEGIGKAVQRQKDAEHVSRPDGSELPKGSESDDCSQISGLKVESPDEESPSDVDADHHSSADHSKFNAGHRLDSTVHSIEEKVTEQPSALEGGELRPYQLEGLQWMLSLFNNNLNGILADEMGLGKTIQTIALIAYLLEKKEVTGPHLIIAPKAVLPNWSNEFKTWAPSIGTILYDGRPDDRKALREKNFGQRQFNVLLTHYDLILKDLKFLKKNFEEWFNAPFACEVSLNDEEQLLIIHRLHQVLRPFLLRRKKDEVEKYLPVKTQVILKCDMSAWQKAYYEQVTSNGRVSLGSGLKSKALQNLSMQLRKCCNHPYLFVEHYNMYQRQEIVRSSGKFELLDRLLPKLQRAGHRVLLFSQMTKLLDILEVYLQIYQFKYMRLDGSTKTEERGRLLADFNKKDSEYFLFLLSTRAGGLGLNLQTADTVIIFDSDWNPQMDQQAEDRAHRIGQKNEVRVFVLVSVGSIEEEILDRAKQKMGIDAKVIQAGLFNTTSTAQDRRALLQEILRRGTSSLGTDIPSEREINRLAARNDEEFWLFEKMDEERRQRENYKPRLMEGIEVPDWVFANDTLTEKIPADEPQNVLLTTKRRRKEVVYSDSFGDQWMKADDVVEETPRMAPRAKRSAYSSDVQEVDFSERRKRHKSLVNISDDASIPMWTPEKVRAGVSSYSKDENEDDAEDESTTSGLQGGSFTWKTLRRKRSSHFSNSSDSKGRSAF

SEQ ID NO: 15497 - protein, 141 aa, Salmonella enterica
MPKPMFGDNGSGMHCHMSLAKNGTNLFSGDKYAGLSEQALYYIGGVIKHAKAINALANPTTNSYKRLVPGYEAPVMLAYSARNRSASIRIPVVASPKARRIEVRFPDPAANPYLCFAALLMAGLDGIKNKIHPGEAMDKNL

SEQ ID NO: 15498 - protein, 362 aa, Dicarpellum baillonianum; identical to SEQ ID NO: 8546

SEQ ID NO: 15499 - protein, 852 aa, Schizosaccharomyces pombe
MIQQPTTAKPRISTSSKLNTVLSKNKENVPGKLFKKFKCPSLVISEKRKELPLRKKPRVNYSEYGSVDGKYDSAYVSENVSGLATIKEANRLILNHERRDPSTVIKKQFSVPKPIKGHEDISKLCAHRPPPTLGMKRKVDFIPRPLYDPADEFAIVLYDPTTDADEIIPDIKEVLAEKRKKDELLKNRKGKKEISDSEPESDHDSCVSTDTVASCSTEQSLITSNTSKHRRPNKSLKDLLGIQKEKPPPPPVAVVIDPKLTRILRPHQIEGVKFLYKCVTGRIDRCANGCIMADEMGLGKTLQCIALLWTLLKQSPQAGKPTIEKAIITCPSSLVKNWANELVKWLGKDAITPFILDGKSSKQELIMALQQWASVHGRQVTRPVLIASYETLRSYVEHLNNAEIGMLLCDEGHRLKNSDSLTFTALDKLNVQRRVILSGTPIQNDLSEYFSLLNFANPGLLGSRQEFRKNYEIPILKGRDADGTEKDKENGDAKLAELAKIVNRFIIRRTNDILSKYLPVKYEHVVFCNLSEFQLSLYKHFITSPEINKILRGTGSQPLKAIGLLKKICNHPDLLNLTEDLEGCEALFPPGFIPRELRGRDRNIDSSLSGKMLVLERMLYQIKQETDDKIVLISNYTSTLDLFEQLCRARGYKALRLDGTMNVNKRQRLVDTFNDPEKDAFVFLLSSKAGGCGINLIGANRLILFDPDWNPAADQQALARVWRDGQKKDCFVYRFIATGTIEEKIFQRQSHKQSLSSCVVDEAQDVERHFSLDNLRQLFQLNDHTVCETHETYKCKRCRDGKQFIRAPAMLYGDTSTWNHFTNPTLDRIEDHLLKREAGKQQVSTVFQYKSH

SEQ ID NO: 15500 - protein, 528 aa, Burkholderia xenovorans LB400
MNNVELFHYLLLLVCGAGLLTWLAERLTIPPAVMLLVGGSAVALSGPHMTVGMDPNLILTAVLPPLLMSSSFYTAWRDFRREIATISSLALGAVVFTTVAVAVAVHAFEPALSWPACFALGAIVSPPDAVAAKAMLERYPLPSRLVTVLEGESLVNDASGLLLYQMAIAAVLVGQFTVSRAATVLLMLMVIGIATGAACGQAMIWLIRRLPDPMLRIVLTFLMAWGSYSVAEELGGSGVLSVVTCGLVLGIHQHRVFDAHTRIKATATWEVIVFVLDALVFILIGLALEGIVSRMGNVSSMLKTGVGVALPATVAAILARLLWVAAAIYLPSLLSSRLGKSPHPWSRGEAAILGWAGMRGVVSLAAALALPDNFPGRDVIVFSTFLVIFATLVIQGGSLAFLIRLTGLRPVRSTTMSELEARTHTFGASLKEIEKISQSATDDDKPLVQRLIDEYKVRVSNNERAFEAGKEHVELRARQLRLELDLVAISRQALLGLHHEGKIQDSVLHRLEAELDLEELRLHRLLEP

SEQ ID NO: 15501 - protein, 365 aa, Dicarpellum pancheri; identical to SEQ ID NO: 8547

SEQ ID NO: 15502 - protein, 536 aa, Nocardia farcinica IFM 10152
MAELLIGGVVMLIVIAGAATVGPKLGVAAPLILVAVGIVGSVVPFVPEVEIDPEWVLEGLLPPLLYSSAVAMPTMNFRRDFGAIGGLSVVLVVLTAVTLGVFFAWAIPGLSLAWGIALGAVISPTDAVATSIIRQAPVPRRVVAILDGESLLNDATALVLLRTAIAATAAAFSFGAAVGTFAWSVLVAVVVGGVVGWANLAVRHRVADATVNTVISFTVPFVASVPTELLGGSGLVAAVVAGIVTGYRAPRMLSARHRLSDSQNWRTIEVVLEGIVFLTMGLHLSGIVAEVHREHAGIGSALLVAVGALVLGLLVRAGYVGLLLAALAHRARRSVALQPRIRQFGERLARRVAEGEPAGRSIPERRVRRAGSRVRRALADIDYFLAQPLGPREGFVVVWAGMRGAITVAAAQTLPADTPNRPLLIFVAFAVATLSLLCQGATVGPLVRRLLGPARPGDDLRDERASVLELLRTVSAGVPRDPSASPKQHRLAVLSAQRAAILDARDDGAFDAEVLQAALSNIDAAQIALEMRGGPV

SEQ ID NO: 15503 - protein, 364 aa, Dicarpellum pancheri; identical to SEQ ID NO: 8549

SEQ ID NO: 15504 - protein, 1062 aa, Kluyveromyces lactis NRRL Y-1140
MENPVSNNQHDEKYWSERRSKFLLDVDPKIAKQRNKEDTYIRFKHLLQITDLFRHFIGIRAKYDKNMQKLLKTIDAENKVAGTLKEPAGHLARAPRHYRKTEQEEDAELMEDEEVELEEDTTILTQSPSFIKEGKLRDYQVYGLNWLISLHESKLSGILADEMGLGKTLQSISFLGYLRYIKGIEGPYIVIVPKSTLDNWQREFAKWTPEVKTVILQGDKDFRKELIETKILTCNFDVLITSYEMVLKEKLTLKRFAWEYILIDEAHRIKNEQSALSQVIRLFYSKNRLLITGTPLQNNLHELWALLNFLLPDVFGDSEVFDEWFQQNGKEEDQEVVVQQLHSVLQPFLLRRVKSEVEKSLLPKKEINLYVGMTDMQIEWYKSLLEKDIDAVNGAVGKREGKTRLLNIVMQLRKCCNHPYLFEGAEPGPPYTTDEHLVFNSGKMIVLDKLLKKKKEQGSRVLIFSQMSRLLDILEDYCYFRGYEYCRIDGSTSHDERVEAIDEYNKPNSEKFIFLLTTRAGGLGINLVTADTVVLYDSDWNPQADLQAMDRAHRIGQKKQVFVYRFVTENAIEEKVIERAAQKLRLDQLVIQQGTGKKTSALTNNKDDLIDMIQFGARDMLQHGSGNITVDEDIDEILKKGERKTLELNAKYESLGLDDLQKFNGMADQSAYEWNGTNFEKKKPDDHTVDWINPPKRERRREQPLYSVDDYYREVIGNGKSKPSGSNTPALKLPKQPKVIRMTYYQFAHPEFVRLQELEQLWYKKSVGYKITAYDVKEHADESEGDDDDEEDSRSDGESDDTNNAQKQEDDIDAKIAEEQAKIDAAEEFTDENLEQKQRFLEESFYNWNKREFLAFISACIKFGRDNYVSISKAIHTKTPEEVQRYSETFWKRYKEVQGWEKYVANIEAGEKKTEKLKIQETILKQKLQQYQYPLVELKILYPPNNTRRTYNSLEDIFLLVTVGNLGLFASNLYERVKQEILKSPLFIFSWFIKTRTPLDISKRIATLLTLVQREHEGVEHKRKRKTVTSADDQPNDSHNLNANVVSSPPSKRIHTDKQFID

SEQ ID NO: 15505 - protein, 756 aa, Arabidopsis thaliana
MTSIIGAALPYKSPEKAIASSSYSAENDSSPVDAVIFAGTSLVLGTACRYLFNGTRVPYTVVLLVIGIFLGSLEYGTKHNLGKLGHGIRIWNGINPDLLLAVFLPVLLFESSFSMDVHQIKRCMGQMVLLAGPGVLISTFCLGALIKLTFPYNWDWKTSLLLGGLLGATDPVAVVALLKELGASKKMTTLIDGESLMNDGVSVVVFQLFFKMVMGHNSDWGSIIKFLVQNSFGAVGIGLAFGIASVFWLKFIFNDTVAQITVTLSASYFAYYTAQEWAGVSGILTVMILGMFFAAFARTAFKGDSHQSLHHFWEMAAYIANTLVFMLSGVIIAESVLSGQTISYKGNSWSFLFLLYLYVQLSRCVVVGVLYPLLCRSGYGLDWKESIILTWSGLRGAVSLSLALSVKQSSGNSYLSSDTGTRFLFLTGGIVFLTLVVNGSTTQLLLHLLRMDTLTATKKRILEYTKFEMMKTALKAFENLGDDEELGSADWPTVIRHISSLKDLEGRQVNPHDGYEAGSLDPTNIMDIRIRFLNGVQAAYWEMLDDGRITQCTANVLMQSVDEALDLVSTSSLSDWRGLEPRVHFPNYYKFLQSKIIPHKLVTHLIVERLESACYISSAFLRAHRIARQQLHIFLGNSNIASTVINESEVEGEEAKQFLEDVRDSFPQVLSVLKTRQVTHYVLNHLNGYIKNLEKVGLLEGKEVSHLHDVVQSDLKKLLRHPPSLKLPNVDDLITSNPLLKDRSSFRSLAIGETDA

SEQ ID NO: 15506 - protein, 444 aa, Prochlorococcus marinus str. AS9601
MKIRELLKKKYIFLFATSFSGLFLNNFAEATVLNNSYKEVIDHVWQIVYRDFLDSSGKFQKSNWINLRKEVLSKTYSDSNEAYDAIRDMLSNLDDSYTRFLEPKEFNQMRIDTSGELTGVGIQIVKEKESDDLIIISPIEGTPAFDAGIKARDKILSIDDISTKGMNIEDAVKLIRGQRGTKVKLEILRGSQSFFKTLSREKIEIKTVSSKINQTKNGLSIGYVRIKQFNANASKETRDAIKDLETKKVAGYVLDLRSNPGGLLESSIDISRHFINKGVIVSTVSKDGLKETKKGNGKALTKKPLVVLVNEGSASASEIVSGAIKDNKRGKLVGKKTFGKGLVQSMRTLVDGSGLTVTVAKYLTPNGTDINKSGIIPDIEVRMNINPILQREIGTRKDKQYRAGEKELINIINRKNQISEFKPDTTNLNAFLKINKEDKVFSLN

SEQ ID NO: 15507 - protein, 438 aa, Desulfotalea psychrophila LSv54
MRQQQITARTLGVCLIFLTLFIANSALAEQKSTDKTYKQLEVFATSLSILEQNYIQPLDPEKSLTDAISGILQGLDPHSSYLSAKEFHDLQSETSGSFSGIGIEVSTRNNNLTIIAPLDGSPAAQAGIEAQDQIIEINGKKTAEMSSQQALMLLRGPIGSSISLSLKREGEENLLHISLIRERISLQSVSFLPLGRDIFYSRITSFQSNTSHDYVEKLNRIKKKREIRGLILDLRNNPGGLLSQAISISDLFISSGAIVHTRGRAAEQNMTFEARDLGEDNDFPMLVLINGGSASASEIVAGALQDQGRAIIVGTDSFGKGSVQTIIPLPNGAALKITTAQYYTPKNRSIQAQGIHPDITLSRLKKGSSCRESADQSTEASLTNHLDNPNGKAKRAPRSAREKKVQKLLADDNQIRVARDILRGILRYSAYQDAQVGE

SEQ ID NO: 15508 - protein, 192 aa, Araucaria araucana; identical to SEQ ID NO: 8552

SEQ ID NO: 15509 - protein, 371 aa, Cathaya argyrophylla
LSLHSYCFERVAEFADRPCLIDGATNKTYCFAEVELISRKVAAGLANLGLQQGQVVMLLLPNCVEFAFVFMGASVRGAIVTTANPFYKPGEIAKQAKAAGARIIVTQAVYVEKLAELRSDDVIVITIDDAPKEGCKHISVLTEADERQCPSVEIHPDDVVALPYSSGTTGLPKGVMLTHKSQVSSVAQQVDGENPNLYFHSEDVILCVLPLFHIYSLNSVLLCALRAGAATLIMQKFNLTTLLELVQRYKITVAPIVPPIVLEITKSPIVSQFDVSSVRMIICGSAPLGKELEDALRDRFPKAIFGQGYGMTEAGPVLAMNLAFAKKPFPVKAGSCGTVVRNAQIKILDTETGRSLPYNQAGEICIRGPEI

SEQ ID NO: 15510 - protein, 903 aa, Ashbya gossypii ATCC 10895
MSNGLSLPKYANMPFRPPRMAKQGDKRRGGDSTAGGETAVVREGGLGKSVKDQEQTGDGLKRPKRETKIFMVTYRKASNKKNKTWDGDGYGVLRSGEQLRVYNGDGKALGTYHWQPDRAMSDVVFRCGAGWECQLDYEIKDEREFSAALDTVKGALAPEKKSPCRTTVQPGPGAGGNNTPTRVPLSKLFVGAKNTKFKPVMRSADAAIAAGSAASGRHCALFDKTQIDDPLVMNKAGDDEVEVVVDPILSKKLRQHQRTGIKFMYDCVRGLARSEKDDDRTVMILEYDSDVKGCLLADEMGLGKTCMTIALIWTLLKQHPRPSSVPCSQLGVALQGICQKVLVVCPVTLIGNWKKEFIKWLPMNRIGILTLSSKNTPEKDKNDVRNFLRVQRTYQVLILGYEKLLNVFSELDQAKSKLDLLICDEGHRLKNSSSKILKCLTDLEIERKVILTGTPIQNDLNEFYTIINFINPGILGTFAHFKRVYITPITRARDVNNKHNDQIVSLGESRSQDLIEITKKFILRRTSSIIADYLPPRTDIVVFCKPTQHQLDAFNQVLVGTRVDFQNMSFNSSLGLITLFKKICNSPSLVSSDSYFQSKVNGGTPALRIAQSTTSGKLKVLMSLLHQIAHRSDNEKVVVISNYTQTLDIIGNLMSSASLSYLRLDGSTPAKERDAIVNDFNRSQTIFGFLLSAKSGGVGLNLVGASRLILFDNDWNPSVDLQAMSRIHRDGQKKPCFIYRLVTTGCIDEKIFQRQLMKNNLSKKFLDDHCDDKSSDNVFEQEDLKDLFSVQSGTLSNTHDLLCSCEGSGEEFEDTNTPPPSSENTEGGKAKMTGWMRALDVKNIMDNSQKQQSALKATIMKKCLVGYRHINPRLMSDFGDHILERTLEEYPDSVTFAFVKRNK

SEQ ID NO: 15511 - protein, 397 aa, Oryza sativa Japonica Group
MEGGGARNGSTTGAARTGGSGGDAAAGGGGGSAGNGKPLPPCCVKARAAAPESEAKCHATVVSGWFTEPRSRGGKTSKVQYYNNPMWPGEAHSLKVEKILYQGKSPYQEVLVFESSTYGKVLVLDGIVQLTDKDECAYQEMITHLPLCSIPSPKKVLVIGGGDGGVLREICRHGSVESIDICEIDQLVIDVCKDFFPDLSVGFKDPRVRLHVGDAVEFLRNAPEGTYDAIIVDSSDPIGPAQELVEKPFFDTIARALRPGGVLCNQAESMWLHTHLIQDMLSICRETFKGSVHYAWTSVPTYPSGVIGFLLCAKEGPPVNFLTPANPIEKLEGAMEAGRDIRFYNSEMHRAAFVLPTFARRELEAYCTTVEREQQEETTAEPLKMNIMQNSEILTAS

SEQ ID NO: 15512 - protein, 477 aa, Clostridium perfringens str. 13
MVNLMILSGIVLLTCIISSKIFYKWGVPVLLVFIIIGMLFGSDGIGGIYFDNYNITYSLSSIALVFIMFYGGFCTEWKKARSVAIPSIMLSTLGVIITAGLTGLFCHFVLKTSIFEGLLLGCIVASTDAASVISILRSRNLKLKNNIDTLVEFESGSNDPTAYMLTSVMLIFITSNESVGIGLLGMIFKQIVFGVTVGLFLSKLAVFILRKVEFEIEGLYPIFTITVAILAYSISEFLGGNGYLSVFIAGIVMGNSKIPHKKSLNHFFDGLSWIMQIILFFMLGLLAFPSQLPSIAFEGIAISIFLILVGRPIAVFTILSWFKVPIKEQMFISWVGLRGAGSLVFAIYAITKTSAIENDIFHIIFFIALFSVAIQGTLIPWFAKKLDLICYEDDNHEDNMKNNIKDYIFEVKVGENNKIVNKAIMDSEIPDEILIVMIKRDNKVVIPKGFTIIKPNDTLVLTSKNNEIMNSFLDEIR

SEQ ID NO: 15513 - protein, 108 aa, Oryza sativa
  misc_feature (31)..(31): Xaa can be any naturally occurring amino acid
  misc_feature (60)..(60): Xaa can be any naturally occurring amino acid
FPPVFKGPVNMVGPPGPPYPKGVFGFKSCAXPRGPPVVFRPPIFSLLGKEFSPKLKGPLXFYNFEIPPAPFCFPSFPKKVFGSQGPLDQRSLSPRPPGLESLPQKIWL

SEQ ID NO: 15514 - protein, 359 aa, Arabidopsis thaliana
MMFLPTDYCCRLSDQEYMELVFENGQILAKGQRSNVSLHNQRTKSIMDLYEAEYNEDFMKSIIHGGGGAITNLGDTQVVPQSHVAAAHETNMLESNKHVDDSETLKASSSKRMMVDYHNRKKIKFIPPDEQSVVADRSFKLGFDTSSVGFTEDSEGSMYLSSSLDDESDDARPQVPARTRKALVKRKRNAEAYNSPERVSNLFKIQSIVNTESDTTDDNESMLDEAINYMTNLQLQVQMMTMGNRFVTPSMMMPLGPNYSQMGLAMGVGMQMGEQQFLPAHVLGAGLPGINDSADMLRFLNHPGLMPMQNSAPFIPTENCSPQSVPPSCAAFPNQIPNPNSLSNLDGATLHKKSRKTNR

SEQ ID NO: 15515 - protein, 1690 aa, Candida albicans SC5314
MNRQPTREDIQRAIQRWHQMKQQYGDQVQLNPEFVKLTKFLNTLKMQQQRFQQQYQQQQQQQQQQQQQQQQQQQQQQQQQQSLNHSQQSPLLQNAQGQTPQQPPTPQQFSNFNQNGYNGQQFSSQVHSPAIGGSLSTSGHGTPLVTNANLMTGKKNTRTPNAQFGNQTAAGTPLQQQQQQQQQQQQPFPHGNNSNPMLNQTAQQPPQSQQRQQNQPPSPQSAFTNQQFQLLKSQLQAFKYFVRAPSQGQGQIPQNLIAYVSNPSSAMANDMYLPAVNRPQTNGMDRTMQMPQSIPSQPQQYALQQQNDLSNSNPKSTGGTPEIPEKKKGKRGPKPKNPKKPTKKQLREEEQRLALEKQRQELEQNRLKSSAPQAFPPQAGLQGQAPFPPQPPQQSQQHVPQPPPASTSSSPPGGLPQSQPQQQQQQPSRPITKPATPQPLFPDPSPPVNIKSVVPDKANNKKVIIPVTKPNIEVDTFELFDIISDEVKDIPFNTLYAPQSRFQIPSFLPDGINMEDIYVNREGYMQITIEQEKERLRKQIDSLNEKDTEKKLELETQLSQLELIPYQKDLRGKVLIQSWFGKSLLPNSHPNFLARFSSLSMDSVHMTTDLYRLQLESMMREQNKKHGKTIEEIINFSDRSSIKAVKKSDRLSRFMTKINNFHNQTAKEEQKKLEKMAKQRLQALKSNDEEAYLKLLDHTKDTRITHLLEQTNQFLDSLALAVQSQQKEAQDNLAYSGRAIEPASVEPLDDEKREKIDYYNVAHRIKEEVTKQPSILVGGTLKEYQLKGLQWMVSLFNNHLNGILADEMGLGKTIQTISLLTYLVEVKKIPGPFLVIVPLSTVTNWNLEFEKWAPSIKKITYKGTPNQRKVMQHDIRTGNFQLVLTTFEYVIKDKGLLGRIKWVHMIIDEGHRMKNANSKLSETLTQNYHSDYRLILTGTPLQNNLPELWALLNFVLPKIFNSVKSFDEWFNTPFANTGGQDKIELTEEETLLVIRRLHKVLRPFLLRRLKKDVEKDLPNKVEKVVKCKSSALQSKLYQQMLRYNMLYAGDPANGSVPVTIKNANNQIMQLKKICNHPFVYEEVENLINPNIETNDQIWRVAGKFELLDKVLPKFKATGHKVLIFFQMTQIMNIMEDFLRFRGMKYMRLDGGTKADDRTDLLKSFNAPDSDYFCFLLSTRAGGLGLNLQTADTVIIFDTDWNPHQDLQAQDRAHRIGQKNEVRILRLITENSVEEMILERAHKKLEIDGKVIQAGKFDNKSTAEEQEAMLRALIEKEDERRQKGGTDEEEEDLDDDELNQIIARNENELVVFRKMDEERYLATKNAPYPSRLYTEEELPEIYKIDPEELFKKEDVASEEYGRGARERKILQYDDNLTEEQWLKKIEGMVSDDDDDNDDDDGNVDMSDSEMEAKPKKPKGRRGRKPKVARVEDEESQTESDVISVKRQFPEDADDFIPPKRQKSATPGGTTTSGRGRGRGRGRGRGRGRGRGRGSLLSRYTPSVDPLTADERSTLQNQIENILGLIINYKNEHDRVLSELFLVKPPKRFYPDYYVLIKHPIALDVIKKRTASKSYSKIREFLEDIHLMFTNAKIYNEEGSIVYQDAAFLERLSMDKFKELSANLSEDEINKILDFAEFDEMFSLKPLVPSTAIKHPIEAKLEKIDKGEAIDSPLLNASTTAGTEESTPANFD

SEQ ID NO: 15516 - protein, 240 aa, Glycine max
METKSTSSFTNLVDQSVCPGDVVLDLSKMINQTIKLGGGLRQDCDAISVMKAGRLRFSKPHKYWVENSQKRYVPYAEDSVLGIVVDSRSDNFLVDIKGPTLAFLPVLAFEGGTRRNIPRFEIGTLIYVRVIKANPGMNPELSCTDASGKAAEFGALKDGYMFECTTGQSRMLLSSPTCPVLDALGKKLSFEIAVGLNGRVWVDAASPHTTIVVANAIMNSETLSGAQQRIMVEKLLQRIQ

SEQ ID NO: 15517 - protein, 259 aa, Picea sitchensis
MFEVITGSLRDLKMAKTMKECELCELSARLYCESDEASLCWDCDAKVHSANFLVARHCRSLLCQICQSVTAWRASGAKPGLTVSVCERCAGGSRAKSDGDDDEGNNDENQVVPLASGYSGPPLSCSSADQEESSGDERHCAESPLSIAPPDAASHKRPHESLALNTYEGDCGCSSSGVNNSNNNISGCEDDATSSRIRVLKKTKADQGLKDDLVKTLEVIRREDHDNSTVLAICKLCRDSHTRELVSVDCPSNSSRYAG

SEQ ID NO: 15518 - protein, 1123 aa, Cryptococcus neoformans var. neoformans B-3501A
MASTARAKSVRNILMELRKVCQHPYLSAPELEIFDLPLEEQHRQLLNASGKLQFLKLLLPKLIARGHRILLFSQFKMALDRNFLYGENVKHLRLDGDTQQAQRQKYMDQFNAPNSDYHIFLLTTRAGGVGINLASADTVILHDPDFNPHQDQQAIARAYRYGQEKRVLVFKLMIKGSVEETIINKGKRKMVLDHLVVQQMGKETEENDFEDLFLKGVEGMYSGQGGINIPDINYNSKNVDELIDRVEADAEAEAKAMAERERQDKNGVVKQMKSKQGVPFQFSRIWEADKNELIHDEVQDTVKDEEEEEDVDWEQLMVAVQAERQLRLQKEMEESRIRRKLKSKEGVYKIDDDFEVDEKKRRKNKGKGKGVELSSSDAEYMDGGLSDNGSATDIPDIDLETLKDDLSIDPIVAKSSGGVKRKRSKKILDNVFNQSTAPHVCPRSSLSHVSTSETPPGSLTTYPAQPGLSLIEPRQNNTAQYSSLSKTGLSGSMLSANAPEEANDTFSSSKKRNPVDFAQARQTHPPIHSVRPPIEIIAAQNIVQWLFLIIRELAWGHHIGHWATLGVREIPAEKRKRLYCIIAADVDGYLRRFRQTPYFLEREQREAVERLLDSGWPIIPDISALIAVPEKAAVLIDPPFPVSGSGHRESTYASMPPAPPKYVSETSEILRGATAPEISENDGNTGDAAKTSSNSVTSQGTVSMPPAPPKYVPEAQAILPDATPPETPENNENTGGAAKSLLSYETSRDTVSLPDIRGPGAAVLPSSFKEKEDIQNRSDTTSAGGHSIPLAPQILEQTLHSPVQMPTLVASTPSLSTEIAPVEISQSAHISNGSPSVSRQPGHVTPTHSTGSSLPELNLQTNGVNDIHKSSEAASASEPAPLAHTSEPALIQSSLKIPSGLPIQLSSSQAVKGTLPSSSRQSSEIIVADSSGEPGRCEYCLEDGHRLQDCQRMYSVEILEKAFLAIKQSNLSEGQKRRDLETLDRLKSFMIKAGKLQKDYHFPESSFVAVMSNRSPSSNACHSSVPEPGAQGQLTIDKDTRNEGKRDISASERPLRACIQATGDRKSLKRKIRKLKEKIDGLTKAPGEPQTDKQQMERIMLRKMQSSLFDCYKKWPKERPSDL

SEQ ID NO: 15519 - protein, 221 aa, Larix gmelinii var. olgensis
KAAGARIIVTQAAYVDKLADLQSDDMIVIAIDGAPKEGCQHISILTEADETQCPSVEIHPDDVVALPYSSGTTGLPKGVMLTHKSLVSSVAQQVDGENPNLYFHSEDVILCVLPLFHIYSLNSVLLCALRAGAGTLIMQKFNLTTLLELIQRYKVTVAPIVPPIVLEISKNPIVSQYDVSSVRIIMSGAAPLGKELEDALRERFPKAIFGQGYGMTEAGPV

SEQ ID NO: 15520 - protein, 566 aa, Xylella fastidiosa Dixon
MLAAAMRGMAVTFFSQFMVSCMHSIQIVLAMLLVVAASGYLVRIIPFSMPLPLLQIALGAVISGVFDGGYELQPEVFFLLFLPPLLFLDGWRIPKQGLFRDKNVILELALGLVVFTVLGIGFLIHWMIPTMPLPLAFALAAILSPTDPVALSSITSRVPIPKRMMHILEGESLLNDATGLVCFQFAVAAVLTGNFSLATASLTFVWVLVVGLSLGIATTYVLSRVQRWVWRHFGGEPAAAILVNLLTPFAAYLLAESMQASGILAAVAAGITMSYVELSGNAQATIRVQRWAVWETVQFTFNGIIFVLLGEQLPGILDDLVHSAQQAGHMNVGWLLVDVAVISAGLMLLRFLWVWLSLQWNLFKAVCCGKQRISPPWQIVVAMSLSGVRGAVTLAGVLTLPFLMPDGTPLPARQLVIFLAASVILVSLLLASVALPYLLRGLELPEKSSYDKEEDFARKVSAQAALEAVERLRQRLVEDSANAERYNEAAHQVSQLYQRKLGAVDLANVDPQETKVFEQVVRRFRQVGLAAERDELFRLAREHNISDELLQRMVRNLDLIEARRRS

SEQ ID NO: 15521 - protein, 1904 aa, Candida glabrata CBS 138
MTSKVSRLDRQVILLETGSTQTIRNVAADQLGELAKQHPEDILSLLSRVYPFLSSKKWETRVTAARAMGGILSNASVWDPNEGEVKEEEESHMNSEIKKENQNNDHAEMENTVIKEEPDQDNGVSVPNHTNNDNNIETVNAKVKLEQDIQLKLEELIKEDSSLLDDNKNADNCLTLSNWHLNELFKSGKVFLASSINDYDDKKVASNSPSTLSSDIEDASMKKENDAENHCSKSSNIEGGNSSKKSARMLAMAKRKKKMQKSKTTTTMEVNLSESSLSKKLMDDPSAVKSDAVKMENPKLAITDQADPNAIMVEAVVPKILEKHEKVAGLVWQFQGVFELLLQNLMHDNWEVRHGATLGLRELMKKHAYGINRIKGKTRKENNDRNYQGLEDLATRLLTIFALDRFGDYIYDTVVAPVRESAAQILAALLINLPDDLALKVYMKLEDLVFQNPEVTGLPNKIWEATHGGLLGIRYFVSIKQEFLIEQNLLDKVVQTVLYGLNQNDDDVKSVAASILTPITAEFVKLDTDTLDIVLTTIWNSLIHLDDDLASSVGSVMDLLANLCQYKEVLDVLKHKATEQPLEWSFKSLVPKLYPFLRHSISSVRKSVLNLLQSFLSIKDESTKHWLNGKVFRLVFQNILFEQNPDILNLSYEVYTSLLTHYQLKHTEKTLDHAFCKHLQPLLHLLNTPIGEKGKNYSMESHYILKPSPRYQLHPEKKRSISEANNASDIPNPRPNENINIDIPMINGDVTLLGEQKIMNTRVLAAKAFGFTLAMFQEATVQSFFANVLVRCLDLPYATPRMLTAIIVNRFCKFWVDRHDDVPEVPKFVSEIFGATMNEQLNNPSKLPVFRELIPSLKALRTSCQNLFATFVDVGMLPQHKLPSVAIVVQGESEAGPEAFGLETAEKVYHDYYDKMYKNLGNSYKLLAKKPLEDAKHRVKQSIESAKESKQKRICSILSNYASSVLMFSELPPKLNPIIRSLMDSVKEEPNEALQKMSCESVIYLIHELLKCNKAPVANKIVKNLCGFLCVDTSEVPDFQQNLSYQDRLYTFIKEPDAFVINENVELMKVAEEARLKRKGGIYAMGTLLEICGSSALDDIPQLKKVFLEPLENISDVSSIDVIKGQAVTDYFGIVRVLFPYMDQSLQESVVIAKFPRMLDFLKCPYSVIRYSVARTFADLAKYKPIKVMPFLIKNVLPMINDAGSLFNRQGATELIFHLSVSMEADILPYVIFLIVPLLGRMSDPNEDIRNLATTTFASIIKIVPLEEGIKDPEGMPEELMKGRERERDFIKQMMDPSKAKPFKLPVAIKATLRKYQQDGINWLAFLNKYHLHGILCDDMGLGKTLQTICIIASDQYLRQEEYKLSGNIECRPLPSLIVCPPSLTGHWENEFEQYSPFLKIVVYAGGPSVRQPLRKQLSSADIIITSYDVARNDLDTISSYDYNYCVLDEGHLIKNAQSKLAKAVKLIKANHRLILTGTPIQNNVVELWSLFDFLMPGFLGTEKSFQERFAKPIAASRNSKTSSKEQEAGALALEALHKQVLPFMLRRLKEDVLSDLPPKIIQDYYCELSDLQKQLYEDFAKKQKNVVEKDIQNTADVDSKQHIFQALQYMRKLCNHPALVLSNDHPQLKQIQNYLKQTGCDLHDIRNAPKLTALRTLLFECGIGEADMDKKVTGEQLLTGSVISQHRALIFCQLKDMLDMIENDLFKRYMPSVSYMRLDGSVDPRDRQKVVRKFNEDPSIDCLLLTTKVGGLGLNLTGADTVIFVEHDWNPMNDLQAMDRAHRLGQKKVVNVYRIVTKGTLEEKIMGLQKFKMNIASTVVNQQNSGLASMDTHQLLDLFDTDNVPSNNAGEVAESGDKLPDDVANETGLSGKAKEALGDLKELWDPSQYEDEYNLDNFIKTLK

SEQ ID NO: 15522 - protein, 221 aa, Larix gmelinii var. olgensis
KAAGARIIVTQAAYVEKLAELQSDDVIVITIDGVPKEGCQHISVLTEADETQCPSVEIHPDDVVALPYSSGTTGLPKGVMLTHKSQVSSVAQQVDGENPNLYFHSEDVILCVLPLFHIYSLNSILFWALRAGAAILIMQRFNLTTLLELIQRYKVTVAPFVPPIVLDITKNPIVSQYDVSSVRIIISGSAPLGKELEDAPRERFPKAIFGQGYGMTEAGPV

SEQ ID NO: 15523 - protein, 248 aa, Debaryomyces hansenii CBS767; identical to SEQ ID NO: 1162

SEQ ID NO: 15524 - protein, 535 aa, Bradyrhizobium sp. BTAi1
MEAHFQIFLVLLAVLAGTALIARRANLAPAILMMLAGIALAFVPTMPAFALPPELVLLVVLPPLIYSSSVAMSWREFKRNLRPIVLLAVGCVLFTASAVAIATHYLLGLPWSIGFLLGAIVAPPDVVAPLAIARRLHLPRRVMVILEGEGLANDATALILYRFAVAAITTGTFSLPVAAGEFAAIVVGEIAFGIGVGWLMLRARHYARDPQVEITLSVLTPYLAFWIPEHVGGSGVIATVACGLYMSWNGPLWISSATRLQGVFFWDLMIYLIEGMLFLLTGFQMRLIYEKSKIFSLDEIVIATALVLAIVVIARFAWTFPATILPRLLSSSLRARDPLPPWQQTFIIGFTGVRGTVSLATALALPLTLSTGDAFPYRDQILFIAFGVIFFTLIGLGLTLPTVVQWLGVARTGRAEHAREHEQEIAARREALDSALRSLETMTNDRDLSDEVVRLLRARHEVRANQLPEGLKPDDNDASALGIELTRELITAERKFIHVMLRDGKITDETRRRIERDLDLEEASLANREYEHLPL

SEQ ID NO: 15525 - protein, 361 aa, Elaeodendron orientale; identical to SEQ ID NO: 8564

SEQ ID NO: 15526 - protein, 154 aa, Synechocystis sp. PCC 6803
MPLPTSLTTLDGTPLAPEVIADKVVLFVNVASKCGLTPQYSGLVALDKAYGEKGLVIIGVPCNQFGAQEPGSPEEIKDFTKTKYDVDFTLLEKQDVNGPNRSPLYQFLVGDGEDISWNFGKFLIGRDGQVVARFDPQTKPDDTNLKAAIEKALG

SEQ ID NO: 15527 - protein, 362 aa, Elaeodendron orientale; identical to SEQ ID NO: 8565

SEQ ID NO: 15528 - protein, 1997 aa, Neurospora crassa
MDHFSTVLQRPPHFDEDGTEGRGDRGNGAGPGPAPPPPPPRGGLRDILNPVSSNSAVQSQAAAAAPPPPPAVASSSLHGIAASVPPPSSTNSMRATPHSSSSFNLRSPTREPSEYRHPLSSLATPAPFAASPPTSIANANNTNNNNALGAAGSLSSQPPPPPPTGPRSILNPPTPSQQHQQQHHHPNPFVAASAPSLPPPPSSLQAPPAITPIAGLSAPAPASGSLPLSAGGIGNSITVSSSSQPPARASQLHAPSAYYSPAESFRDRDSSVREKSSTGGSFYDPTAEASNGISGSSPRKDRDRDRDHRGTTRESQRRSVSGHSDTGSSWRNATQTSASNKTRDPYNYSPSSADYYNTRKKENYPVDNTTSSSIAAPSNFTVATRSPVAALSHPASIAAPASVGSLTGSISPRLSLRPPSMASPTIRSAVLANPTNGTTSTALPALGRNDSPPSKMSPGTSTNPSRAAGVMSFSNILSSSEPVPRPRATSPNNPDDDDDVPMKVERADSSEKVVKEKKERKPRQPKQPRISDIRHSESTPKGRRGSTKQESPLPNIRIPAKRMANGAPKQQKTFSAENEEKIRKAMDRIETRELPHEDEFEEELRLWRERREYKRQQMNQRDLRQRRQRRADYTEVEAQKLKLHADFGKRRYDDLNYDDALQEVRERELFAEKERKKDMQRKRRREKSMATTMEAKAAALARASAAQDEAERQKYMREAERANKKVQQTRLILQKGIKGPSRNTGPIEPNLEGGTMATFQAENMEPGKTKGKGRAGARPKKSKEQKQAEKDAAEAAQAALDAGLELPPKEETNKIRIKLTKTKAPKEADVDKDKENKEPQEPKEPKEPKEKVIKEKVVEEPKDPLELKFQSKGFNQIYDQIWRDLARKDVNKVFRLAIDSYSTKSSNLKKTAILASKEAKRWQLRTNKGTKDLQARAKRVMRDMMGFWKRNEREERDLRKAAEKQELENARKEEADREAARQKRKLNFLISQTELYSHFIGKKIKTNEVERSTDHPDEIAAEKDKIPENEMDIEVPTGPIGAKVTNFENLDFDAEDESTLRAAAMANAQNAIAEAQKKAREFNKEESKLDEDGEMNFQNPTMMGDVEIEQPKLLNCQLKEYQLKGLNWLVNLYEQGINGILADEMGLGKTVQSISVMAYLAEKYDIWGPFLVVAPASTLHNWQQEITKFVPQFKVLPYWGTAGDRKVLRKFWDRKHTTYKKDAPFHVMITSYQLVVSDVAYFQKMKWQYMILDEAQAIKSSQSSRWKCLLGFHCRNRLLLTGTPIQNNMQELWALLHFIMPSLFDSHDEFSEWFSKDIESHAQSNTKLNEDQLKRLHMILKPFMLRRVKKHVQKELGDKIEMDVFCDLTYRQRAMYANLRNQISIMDLIEKATLGDDDSASLMNLVMQFRKVCNHPDLFERADTASPYSFGHFAETASFIREGSQVTVGYSTRSLIQYELPRLLWRDGGRLHKAGEDNQVAGWRNQWLNEKFNIWTPEHIRESLAGTDNFSWLRFADTSYEEAYRASHKDLFARAVEMSTKKNRLAEIKIAYDEPEDLNFTPAHALFHIREREDRRPLAEITEQGILGSLMNVSRSAFSETGLGRLEQAAAPKASAPPIEVVCDSRSAVVERENIMFNAPMRKVLFGPTLAEEKALVVQKVPPSRYPPPALLPAPDKEKQKFTNITVPSMRRFVTDSGKLAKLDELLRELKENGHRVLLYFQMTRMIDLMEEYLTYRNYKYCRLDGSTKLEDRRDTVADFQTRPEIFIFLLSTRAGGLGINLTSADTVIFYDSDWNPTIDSQAMDRAHRLGQTKQVTVYRLITRGTIEERIRKRAMQKEEVQRVVITGGSSAAGGGVDFSGRRAPENRNRDIAMWLADDEQAEMIEKRERELLESGELDKMQKKSRGGNKRKRGGAGGEGKEVSLDEMYHEGEGNFDDGGNNIKGSGTATPNGAAGGEGGDGKGAVGGAAKKRKTGGSKKAKTTKQRLAIADGEIDI

SEQ ID NO: 15529 - protein, 143 aa, Salmonella enterica
FMPKPMFGDNGSGMHCHMSLAKNGTNLFSGDKYAGLSEQALYYIGGVIKHAKAINALANPTTNSYKRLVPGYEAPVMLAYSARNRSASIRIPVVASPKARRIEVRFPDPAANPYLCFAALLMAGLDGIKNKIHPGEAMDKNLY

SEQ ID NO: 15530 - protein, 374 aa, Elaeodendron xylocarpum; identical to SEQ ID NO: 8568

SEQ ID NO: 15531 - protein, 829 aa, Aspergillus nidulans FGSC A4
MFSSFLRQLAQLKARIPWLKDLHLNFILIHYIYIISMALVTSIIIYPGNDLPYIDALFFSAGAATQSGLNTVDFNLLQTYQQVILYFVSMLTTPIFINTALVFIRLYWFEKRFQHVVRDARALRTTRSRLRTISEDKNSQSYGREEAGINGRPIVVLRNQAANPPQEDSPRSAPRSPNESDSESVSPTSNASSAKMESQSPLATINRDFGDLRVPAQLSPEHHIAFLEKQRKNKGALRIPSPREYDRGGAPEVLEEEENEDNDLSKTRTDQSEPRSPRNLDGDDTNNTPNMDGPHITITEPQLPRTRTRNSTFPRMDTRPTFRETKDDDDPAAFSRANRKSTFNGIFRSLTQERDRPTLPYLSWDATVGRNSNFIDLTEEQRDELGGIEYRALKTLAVVLISYYVLFHILGVICLTPWIMETHWGNVVTAAGQGRPWWAIFTAASAFNDVGFTLTPDSMMSFQGAVWPLLLMSFLIIIGNTGFPCMLRFIIWTMSKVVSKETPLWEELKFLLDHPRRCFTLLFPRNATWWLFAILVLLNGIDLIFFIILDLNDETVTSLSTGIKILDGLFQATCTRTAGFAVVSIADLHPAVQVSYMIMMYISVFPIAISLRRTNVYEEKSLGIFADDEDDDDDSQTAPSYIGTHLRKQLGFDLWYVCLGLFIITIVEGDRLENKNQYSFQIWSVLFEVVSAYGTVGLSLGYPGVNASFVSQFRVLSTLVIIAMQIRGRHRGLPYSLDRAILLPSESLQQKEILDAERRMRRRASNLSQIGSLGRQQSQAVSENNAAGVSSALDARERERNTEANTGINAAEPITMRRHPTLRSQQSQR

SEQ ID NO: 15532 - protein, 54 aa, Glycine max
FMLCSTEGPPVNFKHPINKLNPEKNGVAKGPTKFYNPEIHAAAFCLPSFVDKVD

SEQ ID NO: 15533 - protein, 374 aa, Elaeodendron xylocarpum; identical to SEQ ID NO: 8570

SEQ ID NO: 15534 - protein, 374 aa, Euonymus alatus; identical to SEQ ID NO: 8574

SEQ ID NO: 15535 - protein, 467 aa, Hyphomonas neptunium ATCC 15444
MADDLLKLMKDQDVQYVDLRFTDTRGKLQHVSFHKDMVDKSFFEDGQMFDGSSIAGWKAINESDMLLKPDAKGAFIDPFFQQTTLVVFCDILDPISGQAYSRDPRTTAKKAEAYLAASGVGDTAFFGPEAEFFIFDDVRWSTDPHNTGYSFDSTELPANSGREYPMGNLGHRPGPKGGYFPVPPIDSEQDMRGEMLSIMGDIGLEPEKHHHEVAPAQHELGLKFSTLTVMADRMQLYKYVIHQVAASYGKTATFMPKPMFKDNGSGMHVHQSIWKGGKPLFAGDKYADLSEMCLYYIGGIIKHAKALNAITNPSTNSYKRLVPGYEAPVMLAYSARNRSASIRIPYGSNPKAKRIETRFPDPMANPYLAFAALLMAGLDGIENKIHPGDAMDKDLYDLPPAEAKQIPQVCGSLREALAALDADRAFLKKGGVFDDDQIDAYIELKMEENMRYELHPHPVEFDMYYKN

SEQ ID NO: 15536 - protein, 620 aa, Helicobacter pylori 26695
MGKVIGIDLGTTNSAMAVYEGNEAKIIANKEGKNTTPSIVAFTDKGEILVGESAKRQAVTNPEKTIYSIKRIMGLMFNEDKAKEAEKRLPYKIVDRNGACAIEISGKVYTPQEISAKILMKLKEDAESYLGESVTEAVITVPAYFNDSQRKATKEAGTIAGLNVLRIINEPTSAALAYGLDKKESEKIMVYDLGGGTFDVTVLETGDNVVEVLATGGDAFLGGDDFDNRVIDFLASEFKSETGIEIKNDVMALQRLKEAAENAKKELSSAMETEINLPFITADATGPKHLVKKLTRAKFESLTEDLMKETISKIESVIKDAGLTKNEISEVVMVGGSTRIPKVQERVKAFINKDLNKSVNPDEVVAVGASIQGGVLKGDVKDVLLLDVTPLSLGIETLGGVMTKVIDRGTTIPAKKSQVFSTAEDNQPAVSIMVLQGERELARDNKSLGKFDLQGIAPAPRGVPQIEVTFDIDANGILTVSAQDKNTGKSQEIKISGSSGLSDSEIEKMVKDAELHKEEDAKKKEVIEARNHADSLAHQTQKSLDEHKTNLNENDANEIQNAINALKDCVKNDNATKAELEDKTKLLAQAAQKLGEAMANKNNAEQPKKKDDDVIDAEVE

SEQ ID NO: 15537 - protein, 126 aa, Salmonella enterica
LCQNRCSAITVLVCTATCRWRRTAPTCSLATNMPVCLSRRCTTSAASSNTAKAINALANPTTNSYKRLVPGYEAPVMLAYSARNRSASIRIPVVASPKARRIEVRFPDPAANPYLCFAALLMAGLD

SEQ ID NO: 15538 - protein, 308 aa, Pseudotsuga menziesii
DGATDKTYNFAEVELISRKVAAGLAKLGLKKGQVVMLLLQNCIEFAFVFMGASILGAIVTTANPFYKPGEIAKQAKAADARIIVTQAAYADKLADLQRDDVTVVTMDGVPKEGCQHISVLTEADETQCPSVEIHPDDVVALPYSSGTTGLPKGVMLTHKSLVSSVAQQVDGENPNLYFHSEDVILCVLPLFHIYSLNPVLLCALRAGAATLIMQKFNLTMLLELIQRYKVTVAPIVPPIVLDITKNPIVSQYDVSSVRIIMSGAAPLGKELEDALRERFPKAIFGQGYGMTEAGPVLAMNLAFAKEPF

SEQ ID NO: 15539 - protein, 359 aa, Arabidopsis thaliana; identical to SEQ ID NO: 13841

SEQ ID NO: 15540 - protein, 546 aa, Zea mays
MGLGAAMALALGDPPADYASIAAVGLFVALMCVCIVVGHLLEENRWMNESITALFIGLGTGAVILFASSGKHSRVLVFSEDLFFIYLLPPIIFNAGFQVKKKQFFRNFITITLFGAVGTLISFTVISLGALGLISRLNIGALELGDYLALGAIFSATDSVCTLQVLSQDETPFLYSLVFGEGVVNDATSVVLFNAIQNFDPGNISSAKLLNFIGSFLYLFGSSTILGVASGLLSAYTIKKLYFGRHSTDREVSIMMLMAYLSYMLAELLDLSGILTVFFCGIVMSHYTWHNVTESSRVTTKHAFATLSFISETFLFLYVGMDALDIEKWKIVGQTYSPVKSIALSSTILALVLVSRAAFVFPLSFVSNLTKKTPNGKISFRQQVIVWWAGLMRGAVSIALAYNKFTRSGHTQQPSNAIMITSTISVVLFSTIVFGLLTKPLIRLLIPSRHLSREPSALSEPSSPKSFFEQLAANSPGHPDLENGISLRRPASLRFLLVSPARSVHHYWRKFDDSFMRPVFGGRGFVPFVPGSPTESSLPLLPGNEN

SEQ ID NO: 15541 - protein, 1129 aa, Avena sativa; identical to SEQ ID NO: 8576

SEQ ID NO: 15542 - protein, 190 aa, Agathis dammara; identical to SEQ ID NO: 8579

SEQ ID NO: 15543 - protein, 1129 aa, Avena sativa; identical to SEQ ID NO: 8578

SEQ ID NO: 15544 - protein, 495 aa, Avena sativa; identical to SEQ ID NO: 8580

SEQ ID NO: 15545 - protein, 239 aa, Pseudotsuga menziesii
IAKQAKAADARIIVTQAAYVDKLADLQSDDVIVISIDGAPKEGCQHISVLTEADETQCPSVEIHPDDVVALPYSSGTTGLPKGVMLTHKSLVSSVAQQVDGENPNLYFHSEDVILCVLPLFHIYSLNSVLLCALRAGAATLIMQKFNLTMLLELIQRYKVTVAPIVPPIVLDITKNPIVSQYDVSSVRIIMSGAAPLGKELEDALRERFPKAIFGQGYGMTEAGPVLAMNLAFAKEPFP

SEQ ID NO: 15546 - protein, 146 aa, Triticum aestivum
RVRHRFLSPSSAAPVPSPPRPKQWASSLQSDAPIHENPRATIRSCRPRMSLPDVVYSCGSCGYALNLSSSNRSTSDVDEISCFPFLTWRSYRPKTKLLCRKCGSSIGYGYGEPPVLCSFDPASSSSGTSQNYLIKIQSLRLSDGTQ

SEQ ID NO: 15547 - protein, 510 aa, Vitis vinifera
MSLAELLDESKVVPVSVYGDLEVEITGIQHDSRVVSSGDLFVCCVGRKTDGHLYLSEADKRGAVAVVASKEIDIEETLGCKALVIVEDTSLVLPALAAAFYGHPSKNMAVIGIVGTNGKTTTAYLIRAMYEAMGLRTGMLSTVAYYVHGKNKLEAPYTTPDAVLIQKLMAKMLHNGTEAVVMEASSHGLALGRCNEVDFDIAVFTNLTRDHMDFHESEEDYRNAKAKLFSRMVDPDRHRKIVNIDDPNAPFFIAQGNPDVPVVTFAMENKDADVHPLKFELSLFETQVLVQTPKGILEISSGLLGRHNIYNILAAVAVGIAVGAPLEDIVRGIEEIDAVPGRCELIDEEQAFGVIVDYAHTPDALSRLLDSVRELGARRIITVFGCAGESDRGKRPIMTKIATDKSDVVILTSDNPKNEDPCMYSIKKKCNDQSELKLFLHDIRRVAVRAAVAMGEEGDIVVVAGKGHETYQIEGDKKEFFDDREECREALQYVDELHQAGIDTSEFPWR

SEQ ID NO: 15548 - protein, 270 aa, Zea mays
MGLGAAMALALGDPPADYASIAAVGLFVALMCVCIVVGHLLEENRWMNESITALFIGLGTGAVILFASSGKHSRVLVFSEDLFFIYLLPPIIFNAGFQVKKKQFFRNFITITLFGAVGTLISFTVISLGALGLISRLNIGALELGDYLALGAIFSATDSVCTLQVLSQDETPFLYSLVFGEGVVNDATSVVLFNAIQNFDPGNISSAKLLNFIGSFLYLFGSSTILGVASGLLSAYTIKKLYFGRHSTDREVSIMMLMAYLSYMLAELLD

SEQ ID NO: 15549 - protein, 221 aa, Larix occidentalis
KAAGARIVVTQAAYVEKLTDLQSDDVIVITIDGVPKEGCQHISVLTEADGTQCPSVEIHPDDVVALPYSSGTTGLPKGVMLTHKSQVSSVAQQVDGENPNLYFHSEDVILCVLPLFHIYSLNSILFCALRAGAAILIMQRFNLTTLLELIQRYKVTVAPFVPPIVLDITKNPIVSQYDVSSVRIIMSGSAPLGKELEEALKNCFPKAIFGQGYGMTEAGPV

SEQ ID NO: 15550 - protein, 513 aa, Fucus serratus
DPRVRAYFNDSQRQATKDAGSIAGLNVMRIINEPTAAAIAYGLDKKGEEKNVLIFDLGGGTFDVSVLTIEEGIFEVKATAGDTHLGGEDFDNRMVDYFLQEFKRKFRKDMRSNSRALRRLRTACERAKRTLSASTQAHIEIDSLFEGIDFNSTITRARFEDMNQDYFQKCLAPVEKVVKDAKMSKGQIHEVVLVGGSTRIPKIQQMLVDYFNGKEPCKSINPDEAVAYGATVQAGILSGQDKSDKLNSLLLLDVTPLGLGLETAGGVMTTLIKRNTTVPAKKSQVFSTYADNQPGVLIQVYEGERTMTRDNNLLGKFNLDGIPPMPRGQPQIEVTFDIDANGILNVHAVEKSTGKETKITITNDKGRLSADEIERMVEEAERYKAEDDVQKQRVEGKNALENYAYSMRNTINEEKVASQLDAADKSAIESKISETIAWLDTNQNAEKEEYEEKQKELEGVCTPIIQKMAAAGGGGMPGGMGGMPDMGGAGFPGAGAPTPEADADAGPKIEEID

SEQ ID NO: 15551 - protein, 221 aa, Larix occidentalis
KAAGARIIVTQAAYVDKLADLQSDDMIVIAIDGAPKEGCQHISILTEADETQCPSVEIHPDDVVALPYSSGTTGLPKGVMLTHKSLVSSVAQQVDGENPNLYFHSEDVILCVLPLFHIYSLNSVLLCALRAGAATLIMQKFNLTTLLELIQRYKVTVAPIVPPIVLEISKNPIVSQYDVSSVRIIMSGAAPLGKELEDALRERFPRAIFGQGYGMTEAGPV

SEQ ID NO: 15552 - protein, 221 aa, Larix occidentalis
KAAGARIVVTQAAYVEKLTDLQSDDVIVITIDGVPKEGCQHISVLTEADETQCPSVEIHPDDVVALPYSSGTTGLPRGVMLTHKSQVSSVAQQVDGENPNLYFHSEDVILCVLPLFHIYSLNSILFCALRAGAAILIMQRFNLTTLLELIQRYKVTVAPFVPPIVLDITKNPIVSQYDVSSVRIIMSGSAPLGKELEEALKNCFPKAIFGQGYGMTEAGPV

SEQ ID NO: 15553 - protein, 158 aa, Malus x domestica
MEGKVFTEEQETLVVKSWGVMKKNAAELGLKFFLKIFEIAPSAQKLFSFLRDSDIPLEKNPKLKPHAMSVFVMTCESAVQLRKAGKVTVRESTLKRLGGVHFKSGVVDEHYEVTKFALLETIKEALPEMWSPEMKNAWGEAYDQLVAAIKSEMKPPLN

SEQ ID NO: 15554 - protein, 436 aa, Gloeobacter violaceus PCC 7421
MTVPLSELAREKGIRYFLISFTDLFGTQRAKLVPTQAIDAIAASGAGFAGFAAWMDMSPADPDMFAHPDAGSVFQLPWQPEVAWMPADLFTPEGTAIAQTPRLVLKRVLKLALELGYRVRTGVECEYFLLAADEVQIADSRDFQSKPCYDQQALMRRYAVISEICDAMNALGWGAYQNDHEDANGQFEMNWTYADALVTADRHAFFKYMVKTVAEKHSLRATFMPKPFMHLTGNGCHTHLSVWDSEGKVNRFDDPRGELGLSPLAYHFIGGVQHSAEALCAFANPTVNSYKRINAPITASGATWSPNTISYSGNNRTHAIRIPEPGRFELRLADGAANPYLLPAALTAVGLDGIAHQRDAGPRRDNNSYTNPLPPESAKPLPANLLDALRALESDTVLSEAMGADFVASYLKLKHREWQDYCARVTPWELEHTLDC

SEQ ID NO: 15555 - protein, 221 aa, Larix laricina
KAAGARIIVTQAAYVDKLADLQSDDMIVIAIDGAPKEGCQHISILTEADETQCPSVEIHPDDVVALPYSSGTTGLPKGVMLTHKSLVSSVAQQVDGENPNLYFHSGDVILCVLPLFHIYSLNSVLLCALRAGAATLIMQKFNLTTLLELIQRYKVTVAPIVPPIVLEISKNPIVSQYDASSVRIIMSGAAPLGKELEDALRERFPKAIFGQGYGMTEAGPV

SEQ ID NO: 15556 - protein, 271 aa, Synechocystis sp. PCC 6803; identical to SEQ ID NO: 196

SEQ ID NO: 15557 - protein, 374 aa, Euonymus europaeus; identical to SEQ ID NO: 8601

SEQ ID NO: 15558 - protein, 873 aa, Synechocystis sp. PCC 6803; identical to SEQ ID NO: 195

SEQ ID NO: 15559 - protein, 445 aa, Leifsonia xyli subsp. xyli str. CTCB07
MDKQRDFVLRTIEERGIKFVRLWFTDVVGTLKSVAIAPAEVEGAFYEGLGFDGSAIEGLTRAYESDLLAHPDPTTFQILPWRGEIDPTARMFCDITTPDGQPAVSDPRNVLKRTLEKAADRGFTFYTHPEIEFYLLTSSRFGENGPEPVDSAGYFDNVPGGTAHDFRRRSVRMLEDLGISVEFSHHEAGPGQNEIDLRYADALTTADNIMTFRTVVKEVAIEQGVYATFMPKPLSGHPGSGMHTHMSLFEGDTNAFFEAGAQYQLSKVGRQFIAGLLKHAPEITAVTNQFVNSYKRLWGGDEAPSFVCWGHNNRSALVRVPLYKPNKGQSSRVEYRAIDSAANPYLAFSLMLAAGLAGIEGGYELPPEAEDNVWALSDAERRALGYSQLPASLDHAIALMEGSELVAETLGEQVFNYALLNKRREWAQYRAQVTPFELRSNLEIL

SEQ ID NO: 15560 - protein, 374 aa, Euonymus europaeus; identical to SEQ ID NO: 8603

SEQ ID NO: 15561 - protein, 750 aa, Vitis vinifera
MPIVVDPLLVRFLRPHQREGVQFMFDCVSGLSSTANISGCILADDMGLGKTLQSITLLYTLLRQGFDGKAMVKKAIIVTPTSLVSNWEAEIKKWVGERVQLVALCESTRDDVVFGIDSFTSPHSPLQVLIVSYETFRMHSSKFSHSGSCDLLICDEAHRLKNDQTLTNRALAALACKRRVLLSGTPMQNDLEEFFAMVNFTNPGILGDATYFRRYYETPIICGREPTAAEEEKKLGAERSAELSSTVNQFILRRTNALLSNHLPPKIVEVVCCRLSPLQSELYNHFIHSKNVKKVINEEMKQSKILAYITALKKLCNHPKLIYDTVKSGNQGTSGFEDSWTGGEGIWVELSGKMHVLARLLAHLRQKTDDRIVLVSNYTQTLDLFAQLCRERRYPYLRLDGTTSINKRQKLVNRFSDPLKDEFVFLLSSKAGGCGLNLIGGNRLVLFDPDWNPANDKQAAARVWRDGQKKRVYIYRFLSTGTIEEKVFQRQMSKEGLQKVIQQEQKDSLKTQGNFLSTEDLRDLFSFHENVRSEIHEKMNCNRCQNYDERPESVREEDGFESKNEGCQSYQMDCDDIGGFAGITGCLHKLKRSEKQVGTALEEDLGSWGHHFFSTSVPDAIFQASAGDEVTFVFTNQVDGKLVPVESKVRANMQGVEANKNQSDKRGKLLQKPTLLSKHQQSAPPVSNKGDSITSISSSSSKPFHLAGIKSMRTSKGTPSVTLKPKLSIGSQLPLKRLSPDSVQHDDDFE

SEQ ID NO: 15562 - protein, 374 aa, Gyminda tonduzii; identical to SEQ ID NO: 8604

SEQ ID NO: 15563 - protein, 159 aa, Zea mays
  misc_feature (67)..(67): Xaa can be any naturally occurring amino acid
PAQELVEKPFFETIARALRPGGVLCNQAESMWLHTHLIQDMLSICRETFKGSVRYAWASVPTYPMGXIGFLLCAKDGPPVNFLTPVNPIEEVEGATKAGREIRFYNSEMHMAAFVLPTFAKRELEAYCASTETEQAEEVAATAPQKLTAAPKRGITTAS

SEQ ID NO: 15564 - protein, 458 aa, Deinococcus radiodurans R1
MWTWVCFRLEAPRVTDMLTAFALLLSVTAVLAFLNERFFRLPTTVGVTLAGALSSMLLIALDALGLTGPRGWAAGLLETLDFTDFVLNGILSILLFAGALGLDARQLLRQRFSILTLAVFSTLLSTFLIGFAAYGIFGLVGLNVPLLWSLLFGALISPTDPVAVLDLLKRAAVPKRIETLIAGESLFNDGVGVVIFLVIAGMAGIGHSHGTGSVVGALELFGREALGGMAFGALLGAIGFLMLREIEQHAVEVLITLALVVGGYVAASALGVSGPLAMVVAGLVISAGRDVAFGEETREHIESFWETTDQVLNILLFAFIGLDVLLTETTGPQIVAGLLLVVASLLARWISVALPFPLIRRHEDYGPYTVRLLTWGGLRGGIAISLVLGLPQTPYRTHLVTATYIIVLFSIAVQGLTIMPLVHKAVAASPDSAGPDSAGPGGGQEDGENAGRQLSSET

SEQ ID NO: 15565 - protein, 448 aa, Streptococcus pneumoniae TIGR4
MPITAADIRREVKEKNVTFIRLMFSDILGTMKNVEIPATDEQLDKVLSNKVMFDGSSIEGFVRINESDMYLYPDLDTWTVFPWGDENGSVAGLICDVYTTEGEPFAGDPRGNLKRALRHMEEVGFKSFNLGPEPEFFLFKLDENGDPTLEVNDKGGYFDLAPTDLADNTRREIVNVLTKMGFEVEASHHEVAVGQHEIDFKYDEVLRACDKIQIFKLVVKTIARKHGLYATFMAKPKFGIAGSGMHCNMSLFDAEGNNAFFDPNDPKGMQLSETAYHFLGGLIKHAYNYTAIMNPTVNSYKRLVPGYEAPVYIAWAGRNRSPLVRVPASRGMGTRLELRSVDPMANPYVAMAVLLEVGLYGIENKIEAPAPIEENIYIMTAEERKEAGITDLPSTLHNALKALTEDEVVKAALGDHIYTSFLEAKRIEWASYATFVSQWEIDNYLDLY

SEQ ID NO: 15566 - protein, 393 aa, Desulfitobacterium hafniense DCB-2
MQESRWKEYLKNLGWVLAIGSLIFTVVVGGFIVTNLDHLGRLARVVKLVESDYLEEVSVDTLIEGATKGIVDSLGDPYSSYMNAQENEELMQQIEGKFGGVGIILSLKDPQKLVVLRPIKNTPAAKAGLQPGDVIIKIDDVDATTIDQEKAVSLMRGNPGTNVTLVVYRESIKQNVTVPLTRENIAVPTVEGLALPGNSDIAYIGISQFSSHTALELNEVLRNMDISKYKGMILDLRYNHGGELESAVGVASYFVQPGPIVYIVDKGGNAVTKASEGNYLGIPFVVLVNEESASAAEIVSGAIKDRGTGTLVGTKTFGKGIVQTIYQLDRGTSVKLTTAKYLTPNKIDIHKKGIEPDVEVKLKDGEEATLSPTTKAFDTQLTEALKVLRQQMK

SEQ ID NO: 15567 - protein, 92 aa, Salmonella enterica
SLAKNGTNLFSGDKYAGLSEQALYYIGGVIKHAKAINALANPTTNSYKRLVPGYEAPVMLAYSARNRSASIRIPVVASPKARRIEVRFPDPA

SEQ ID NO: 15568 - protein, 245 aa, Gymnosporia mossambicensis; identical to SEQ ID NO: 8606

SEQ ID NO: 15569 - protein, 921 aa, Bacillus licheniformis ATCC 14580
MASLKEIVIHVEQSEDYTFILSCHDGDHQFLTRNEMERHLFQWHESSFYGTFLEEAGLDTPAVLLSPWMAVEFLGKNSFNSFSDIILTEETEPLMKTASTIYEFIADEDFLPDYEAWKQEMLRWKDKEGILEGYTAEWFSHAVEDYINYNDELKAKWESIVAHSPAVTTFQGHFLDEDDFLETIGWHENPVPFTVGLRLNEPDFDGDDWKIELFLRDKKSGAIQFFEGLNRLKKSWQAYADKIDREQDRFRQIVPWLTIESGTSLLTEEEAWIFLSEASETLVSMGIEILLPSWWQIVRDSNMLLKAKVSSAPRGESFVGMNALMDFNWRFATNGIELTEEEFEQLVANKRRLVNIRGQWIKIDPNFIKQMKKLMERAETEGLHMSDILARELTERSETREDDDLFDASAFSDVRFELSYQLKNMIRKLSQRDDLPSYPVSKYFHGTLRAYQEDGLNWLIFLRNCGFGACLADDMGLGKTIQMIAYFAYLKEQGQQTPSLIIAPTSVLGNWQRELETFAPGLTAALHYGPKRPKGEAFQTSYKDADIVLTSYGLAQSDFDDLSSVAWNCICLDEAQNIKNAHTKQSRSIRKLKGLHHIALSGTPMENRLTELWSIYDFMNKGYLGSLGSFHKRFVLPIEKDRDEKRIEQLQQLIKPFLLRRTKQDKEVALNLPEKQEEKEFVPLSAEQASLYEQLVKDTFEHMSSLAGMQRKALILSMLGKLKQICGHPALYLKETGSELLNGRSVKLEKLLELTKTIRESDESCLIFTQYLGMGDMMKRLLEKSFGEPVKFLNGSLSKLERDKMVEQFQNKEFPILILSLKAGGTGLNLTAANHVIHYDRWWNPAVENQATDRAYRIGQKRFVHVHKLITTGTIEEKIDQMLESKQSLNDQIIQSENWITELSEHELEELFTLNASAITG

SEQ ID NO: 15570 - protein, 182 aa, Arabidopsis thaliana
  misc_feature (134)..(134): Xaa can be any naturally occurring amino acid
MASSMLSSAAVVTSPAQATMVAPFTGLKSSAAFPVTRKTNKDITSIASNGGRVSCMKVWPPIGKKKFETLSYLPDLSDVELAKEVDYLLRNKWIPCVEFELEHGFVYREHGNTPGYYDGRYWTMWKLPLFGCTXDSAQVLKEVEECKKEYPGAFIRIIGFDNTRQVQCISFIAYKPPSFTEA

SEQ ID NO: 15571 - protein, 896 aa, Pseudomonas fluorescens PfO-1
MPPPLSKPLASSWVSRFKEQSLERGRRYALENRVRFVQVGDATITASCEGSGGNVYRQTIHLRESAKGTLLMVDATCTCPVHSNCKHCAAVLLQVQETLEYPAAAKDAELLEKLQAVLENRSPKSPPQVLVDNVQPVPRLWLASVEFSAFEPRNGKMQRYIQHRAALSFSYLDEYVSGQKNSDILIRQEAQTLRVKRHPDVEQSYREQLRILGFRIATRQSKALPESAGELYEMVNDSAWLTFTLNDLPKLRTQGWELLVDDEFGFDLTAVDDWYATVEQTPERDWFDLELGIIVNGERLSLLPILLNLMRSHTEILNPERLARRRDDELILVNIPQRNSEHGPLQVALPLGRLKPVLATLGEFYLQEPGETTLRLSKADATRLNSLEGIPLLWEGGEQIRSFAQRLRDIRDYSAKAPKGLNATLRPYQLEGLSWMQSLRQLEVGGILADDMGLGKTLQTLAHILSEKNAGRLDRPCMVVMPTSLIPNWLDEAAHFTPQLKVVALYGASRKKHFEHLADYDLILTTYALLPKDVERLAQQPLHVLVLDEAQYIKNPNSKAAQAARELNARQRLCLSGTPLENHLGELWSLFHFLLPGWLGDLKSFNADYRVPIEKRASEVRLQHLNGRIKPFLLRRTKEQVATELPPKTEIIHWVELNEAQRDVYETMRLAMDKKVRDEITRKGVARSQIIILEALLKLRQVCCDLRLVNDATLPARGSTSGKLDSLMEMLEELFEEGRRILLFSQFTSMLSLIEDELKKRNVAYALLTGQTRDRRTPVKEFQSGKRQIFLISLKAGGVGLNLTEADTVIHYDPWWNPATENQATDRAYRIGQEKPVFVYKMIARGTVEEKIQLLQREKSDLAAGVLDGRKAGDWKLQSDDIEALFAPLPDKFEKR

SEQ ID NO: 15572 - protein, 245 aa, Gymnosporia mossambicensis; identical to SEQ ID NO: 8609

SEQ ID NO: 15573 - protein, 253 aa, Zea mays
  misc_feature (54)..(54): Xaa can be any naturally occurring amino acid
  misc_feature (198)..(198): Xaa can be any naturally occurring amino acid
  misc_feature (215)..(215): Xaa can be any naturally occurring amino acid
  misc_feature (246)..(246): Xaa can be any naturally occurring amino acid
MQLNKKSRLLQLPHFSSFTTTTTSSLISSSRPFSLSSIKMSNEEITHPTIVDGXFREISDMWPGHAMTLRVEKVLVHEKSKYQDVLIFKSTDFGNVLVLDNVIQCTERDEFSYQEMIAHLALNSHPNPKKVLVIGGGDGGVLREIVKHDCVEEATLCDIDEAVIRLSKEHLPSMACGFDHPKSKTHVGDGFKFLNDYXNEFDVIITDSSDPDGPXEALFQKSYFQLPHDALREGGVITTQAESPWXHLPLIAR

SEQ ID NO: 15574 - protein, 880 aa, Lentisphaera araneosa HTCC2155
MELDFILLANQHLQTDWRKPSKRLGKAQEELQQKTNTHFDLSPQEALFHLAFVDEFSQLSSNLHFWRRFALYFVETLRMTPSLEEFRDKQVIAPDQTQLSKLIDSAPFFSGSEYLNSDCLEFHWQALNNYFSDKIKKFKGSCSEFFQQFNPDIHLIGKIYFHLVENKKGASPFAFMATYSAGLNDQGTVRHRPLSYALTEYEKDQEKLIELLSTVQNAAEESPYLKTVLESGELFYPLGLSPEDCFTFLSEIPLYEAQGIQCRVPNWWRSGQKGASLNVSFGEKKKSLVGIESLIDFHASIHLDGLELTLEEAQEILKSSQGLSFIKGKWVTVDHDKLSKALQNWQDANELMDGDLRLGDALRLVLSNGDNLLGATVADEEVEVSCGTWLNEVLEKMRSPELLKEAKVHKDFQATLRPYQQLGLNWLTVLDSLQFGACLADDMGLGKTVQVIALLNGLRRKKTSSTSLLVVPASLIHNWAGELLKFAPKIKFAIAHPGGGDFLLGKDENIEDFNLIITTYGLVKRDKRLKEQLWHYVILDEAQAIKNAGTAQTKAVKALQSKNRLALTGTPIENSLGDLWSLFDFLNPGLLGNKKEFTRLAKSKDLSRIRQVISPYILRRLKTDKSIIVDLPDKVEINSFAELSKEQLVHYKSEVDKLREAIADSEGIQRKGLVLSSLMKFKQICNHPDQFLGGGPYKTTESGKFQRLMEICETIKEKREKVLVFTQFKEITEELAKFMESYFGHSGLVLHGSISVKKRKEMVARFQSDEYVPFFILSIKAGGTGLNLTAANHVVHFDRWWNPAVENQATDRAFRIGQKKNVMVHKFVCKGTIEEKISTMLEDKQKISDEVLSSSGEAAFITEMENDELIELFSLSGEPS

SEQ ID NO: 15575 - protein, 476 aa, Campylobacter jejuni subsp. jejuni NCTC 11168
MGKFVNNIDDFFKFCKQNEVLFVDFRFTDMIGTWHHITYNLHAINEETFQTGIPFDGSSIHGWQPIEKSDMILKPDAQSAFLDPFTADPTIIVFCDVYDIYKGQMYEKCPRSIAKKAIEHLKNSGIADTAYFGPENEFFVFDSVKIVDTTHCSKYEVDTEEGEWNDDREFTDSYNTGHRPRNKGGYFPVQPIDSLVDIRSEMVQTLEKVGLKTFVHHHEVAQGQAEIGVNFGTLVEAADNVQIYKYVVKMVAHLNGKTATFMPKPLYGDNGNGMHVHMSLWKNGVNLFYDKDGYSGLSQTAINYIGGILKNARSVAAFTNPSSNSYKRIVPGFEAPCILTYSCQNRSASCRVPYGIGKNSARIEIRFPDSTANPYLAFVSLLMAGLDGIKNKTIPVGPMDENLFDLTLDEIREKGIEQLPHTLRGSLEALIRHNSYLKPVMSDIFIDDYQHLKFETQVWPVEARPTAYEFKTCYSC

SEQ ID NO: 15576 - protein, 214 aa, Brassica napus
MEIDREDGRTSNQLRPLACSRNILHRPHGSASWSQGDTKVLAAVYGPKPGTRKNENPEKACFEVIWKPKSGQIGKAEKEFEMILKKTIQSICVLTVNPNTTTSVIIQVVHDDGSLLPCAINAACAALVDAGIPMKHLAVAICCCLADSGYVVLDPNKLEEKKMTAFAYLVFPNTTLSVLPEVEGEPVEHGIITSVTHGVMSVDDYFLCIETGRA

SEQ ID NO: 15577 - protein, 159 aa, Synechococcus sp. WH 7803
MAPSVSNVSVRTPDGSEKTLGSYAGQVLLIVNVASRCGFTKQYAGLQSLQDTFGPRGLQVLGFPCNDFGAQEPGTLDEIKSFCSTTYGASFELFDKVHATGSTTEPYTTLNQTEPAGAVEWNFEKFLVGKDGTVLARFKSGVAPEDAGLNAAIEAALQA

SEQ ID NO: 15578 - protein, 469 aa, Erythrobacter sp. SD-21
MASAKDVLERIKDEEIEWVDLRFTDPKGKWQHLTMVAKTLDEDQLEDGLMFDGSSIAGWKVINESDMILKPDLERVYVDPFSAEPMLIMFCDIVEPSTGEWYARDPRTTAKRAEAFLKSTGLGDTIYVGPEAEFFMFDDVRFEDGYAGSGYAIDDIELPTNSGKEYESGNLAHRPRAKGGYFPVAPVDSAVDIRGEMVSTMIEMGLNCDKHHHEVAAAQHELGLTFGTLVETADNMQIYKYVVHQVAHIYGKTATFMPKPIKDDNGSGMHTHMSIWDGGKPTFAGNQYGGLSENCLYYIGGVIKHAKALNAFTNPTTNSYKRLVPGFEAPVLLAYSARNRSASCRIPYGAGDKAKRVEFRFPDAMANPYLAYAALLMAGLDGIQNKIHPGEAMDKNLYDLPPAELADVPTVCGSLREALEALEADHEFLLKGDVFTKDQVDAYAELKWDEVLRVETTPCPAEFDMYYSA

SEQ ID NO: 15579 - protein, 250 aa, Oryza sativa Japonica Group; identical to SEQ ID NO: 14454

SEQ ID NO: 15580 - protein, 315 aa, Pseudotsuga menziesii
IDGATDKTYNFAEVELISRKVAAGLAKLGLKKGQVVMLLLQNCIEFAFVFMGASILGAIVTTANPFYKPGEIAKQAKAADARIIVTQAAYADKLADLQRDDVTVITMDGVPKEGCQHISVLTEADETQCPSVEIHPDDVVALPYSSGTTGLPKGVMLTHKGLVSSVAQQVDGENPNLYFHSEDVILCVLPLFHIYSLNSVLLCALRAGAATLIMQKFNLTTLLELIQRYKVTVAPIVPPIVLDITKNPVVSQYDVSSVRMIISGGAPLGKKLEDALRDRFPKAIFGQGYGMTEAGPVLAMNLAFAKEPFPVKSGS

SEQ ID NO: 15581 - protein, 229 aa, Candida albicans SC5314
MVKSNVESAWETMEDTFSEIQNKFHQIYKPIDTGKPDEDDETTKKESLDITDDSTLSVSPITQLLYLARSKFYDLTPLDNQKSPFPFKNLRGKVVLIVNVASRCGFSFQYNGLEQLNKRFANDDFVLLGVPCNQFLWQEPGTNDQIVTKCKKKYDVSFQILDKINVNGEQADPVYKFLKAQKEGLWGTNRVKWNFEKFLIDKNGRVVERYSTFTRPVAIIPKIEQLLES

SEQ ID NO: 15582 - protein, 105 aa, Robinia pseudoacacia
HYTWHNVTESSRITTKHAFATLSFVAEIFIFLYVGMDALDIEKWRFVSDSPGTSVAASSVLLGLILVGRAAFVFPLSFLSNLAKKSSSDKITFREQVIIWWAGLM

SEQ ID NO: 15583 - protein, 1867 aa, Saccharomyces cerevisiae
MTSRVSRLDRQVILIETGSTQVVRNMAADQMGDLAKQHPEDILSLLSRVYPFLLVKKWETRVTAARAVGGIVAHAPSWDPNESDLVGGTNEGSPLDNAQVKLEHEMKIKLEEATQNNQLNLLQEDHHLSSLSDWKLNEILKSGKVLLASSMNDYNVLGKADDNIRKQAKTDDIKQETSMLNASDKANENKSNANKKSARMLAMARRKKKMSAKNTPKHPVDITESSVSKTLLNGKNMTNSAASLATSPTSNQLNPKLEITEQADESKLMIESTVRPLLEQHEIVAGLVWQFQGIYELLLDNLMSENWEIRHGAALGLRELVKKHAYGVSRVKGNTREENNLRNSRSLEDLASRLLTVFALDRFGDYVYDTVVAPVRESVAQTLAALLIHLDSTLSIKIFNCLEQLVLQDPLQTGLPNKIWEATHGGLLGIRYFVSIKTNFLFAHGLLENVVRIVLYGLNQSDDDVQSVAASILTPITSEFVKLNNSTIEILVTTIWSLLARLDDDISSSVGSIMDLLAKLCDHQEVLDILKNKALEHPSEWSFKSLVPKLYPFLRHSISSVRRAVLNLLIAFLSIKDDSTKNWLNGKVFRLVFQNILLEQNPELLQLSFDVYVALLEHYKVKHTEKTLDHVFSKHLQPILHLLNTPVGEKGKNYAMESQYILKPSQHYQLHPEKKRSISETTTDSDIPIPKNNEHINIDAPMIAGDITLLGLDVILNTRIMGAKAFALTLSMFQDSTLQSFFTNVLVRCLELPFSTPRMLAGIIVSQFCSSWLQKHPEGEKLPSFVSEIFSPVMNKQLLNRDEFPVFRELVPSLKALRTQCQSLLATFVDVGMLPQYKLPNVAIVVQGETEAGPHAFGVETAEKVYGEYYDKMFKSMNNSYKLLAKKPLEDSKHRVLMAINSAKESAKLRTGSILANYASSILLFDGLPLKLNPIIRSLMDSVKEERNEKLQTMAGESVVHLIQQLLENNKVNVSGKIVKNLCGFLCVDTSEVPDFSVNAEYKEKILTLIKESNSIAAQDDINLAKMSEEAQLKRKGGLITLKILFEVLGPSILQKLPQLRSILFDSLSDHENEEASKVDNEQGQKIVDSFGVLRALFPFMSDSLRSSEVFTRFPVLLTFLRSNLSVFRYSAARTFADLAKISSVEVMAYTIREILPLMNSAGSLSDRQGSTELIYHLSLSMETDVLPYVIFLIVPLLGRMSDSNEDVRNLATTTFASIIKLVPLEAGIADPKGLPEELVASRERERDFIQQMMDPSKAKPFKLPIAIKATLRKYQQDGVNWLAFLNKYHLHGILCDDMGLGKTLQTICIIASDQYLRKEDYEKTRSVESRALPSLIICPPSLTGHWENEFDQYAPFLKVVVYAGGPTVRLTLRPQLSDADIIVTSYDVARNDLAVLNKTEYNYCVLDEGHIIKNSQSKLAKAVKEITANHRLILTGTPIQNNVLELWSLFDFLMPGFLGTEKMFQERFAKPIAASRNSKTSSKEQEAGVLALEALHKQVLPFMLRRLKEDVLSDLPPKIIQDYYCELGDLQKQLYMDFTKKQKNVVEKDIENSEIADGKQHIFQALQYMRKLCNHPALVLSPNHPQLAQVQDYLKQTGLDLHDIINAPKLSALRTLLFECGIGEEDIDKKASQDQNFPIQNVISQHRALIFCQLKDMLDMVENDLFKKYMPSVTYMRLDGSIDPRDRQKVVRKFNEDPSIDCLLLTTKVGGLGLNLTGADTVIFVEHDWNPMNDLQAMDRAHRIGQKKVVNVYRIITKGTLEEKIMGLQKFKMNIASTVVNQQNSGLASMDTHQLLDLFDPDNVTSQDNEEKNNGDSQAAKGMEDIANETGLTGKAKEALGELKELWDPSQYEEEYNLDTFIKTLR

SEQ ID NO: 15584 - protein, 190 aa, Triticum aestivum
PRVRYVGGSQLQTSEWFNTAGRSVKTGLIASVIVSQWTWAATILQSSNVAWQYGVSGPFWYASGATVQVLLFGVMAIEIKRKAPNAHTVCEIVRARWGARAHLVFLAFCLATNVIVTAMLLLGGSAVVHALTGVNVYAASFLIPLGVIVYTLAGGLKATFLASYIHSVVVHAVLLVFVFLVYTSSSSLGS

SEQ ID NO: 15585 - protein, 343 aa, Datura metel
MEVISTNTNGSSLLKNGVITMNGHHNGNSDHRNGGTTAHDNGRKLLGNSNSIKPGWFSEFSALWPGEAFSLKIEKLLFQGKSDYQDVMLFESATYGKVLTLDGAIQHTEDGGFPYTEMIVHLPLGSIPNPKKVLIIGGGIGFTLFEVLRYSTVEKIDIVEIDDVVVDVSRKFFPYLAANFNDPRVTLVLGDGAAFVKAAQAGYYDAIIVDSSDPIGPAKDLFERPFFEAVAKALRAGGVVCTQAESIWLHMHIIKPIIANCRQVFKGSVDYAWTTVPTYPTGVIGYMLCSTEGPDVDFKNPVDPIDKDETHANSELGPLKFYNADIHKAAFILPSFARSMIES

SEQ ID NO: 15586 - protein, 208 aa, Sagittaria montevidensis
MGRGKIEIKRIENSANRQVTYSKRRNGIIKKAREISVLCGCEVSLVIFSSSGKMSEFHSTTLSKILETFQQNQGQTLWGAKHESLKAEIDRMKKENDNMRIQLRHMKGEDLTSMEPRDLYTIETALINGIANVRGKQMEIFKKKAKNQKALEEENKQLAYILHQQSLAMNGNLREMPQDYHQKDRDFTAPVPFGFRVQPMQPNLQENK

SEQ ID NO: 15587 - protein, 221 aa, Pseudotsuga menziesii
KAADARIIVTQAAYADKLADLQRDDVTVITMDGAPKEGCQHISVLTEADETQCPSVEIHPDDVVALPYSSGTTGLPKGVMLTHKGLVSSVAQQVDGENPNLYFHSEDVILCVLPLFHIYSLNSVLLCALRAGAATLIMQKFNLTTLLELIQRYKVTVAPIVPPIVLDITKNPVVSQYDVSSVRMIISGGAPLGKKLEDALRDRFPKAIFGQGYGMTEAGPV

SEQ ID NO: 15588 - protein, 688 aa, Arabidopsis thaliana
MVTLCATLLILLSIFLATPSNVRGNAELKALMELKSSLDPENKLLRSWTFNGDPCDGSFEGIACNQHLKVANISLQGKRLVGKLSPAVAELKCLSGLYLHYNSLSGEIPQEITNLTELSDLYLNVNNFSGEIPADIGSMAGLQVMDLCCNSLTGKIPKNIGSLKKLNVLSLQHNKLTGEVPWTLGNLSMLSRLDLSFNNLLGLIPKTLANIPQLDTLDLRNNTLSGFVPPGLKKLNGSFQFENNTGLCGIDFPSLRACSAFDNANNIEQFKQPPGEIDTDKSALHNIPESVYLQKHCNQTHCKKSSSKLPQVALISSVITVTITLIGAGILTFFRYRRRKQKISNTPEFSEGRLSTDQQKEFRASPLVSLAYTKEWDPLGDSRNGAEFSQEPHLFVVNSSFRFNLEDIESATQCFSEANLLSRNSFTSVFKGVLRDGSPVAIRSINISSCKNEEVEFMNGLKLLSSLSHENLVKLRGFCCSRGRGECFLIYDFASKGKLSNFLDLQERETNLVLAWSARISIIKGIAKGIAYLHGSDQQKKPTIVHRNISVEKILLDEQFNPLIADSGLHNLLADDMVFSALKTSAAMGYLAPEYVTTGKFTEKTDIFAFGVIILQILSGKLMLTSSLRNAAENGEHNGFIDEDLREEFDKPEATAMARIGISCTQEIPNNRPNIETLLENINCMKSE

SEQ ID NO: 15589 - protein, 221 aa, Pseudotsuga menziesii
KAADARIIVTQAAYVDKLADLQSDDVIVISIDGAPKEGCQHISVLTEADETQCPSVEIHPDDVVALPYSSGTTGLPKGVMLTHKSLVSSVAQQVDGENPNLYFHSEDVILCALPLFHIYSLNSVLLCALRAGAATLIMQKFNLTMLLELIQRYKVTVAPIVPPIVLDITKNPIVSQYDVSSVRINMSGAAPLGKELEDALRERFPKAIFGQGYGMTEAGPV

SEQ ID NO: 15590 - protein, 474 aa, Leifsonia xyli subsp. xyli str. CTCB07
MFRDSSEVLKYIKETDVKFLDIRFTDLPGVQQHFNIPAATVDEEFFSVGQLFDGSSIRGFASIHESDMQLIPDVSTAYIDPFRHERTLIMVFDIYNPRNGDIYAKDPRQVAKKAEKYLATAGIADTAFFAPEAEFYIFDDVRYEVKQNAIFYAVDSSEGAWNSGREEEGGNLANKTPYKGGYFPVSPVDQHADLRDDIVLKLVEAGLEVERSHHEVGTAGQGEINYKFDTMVSAADDILKFKYIVKNTANEWGKTATFMPKPLFGDNGSGMHTHQSLWNDGKPLFYDEAGYGALSNIARWYIGGLLKHAPAVLAFTNPTVNSFHRLVPGFEAPVNLVYSAGNRSASIRIPITGSNPKAKRIEFRAPDASGNPYLAFAAQLMAGIDGIKNRIEPHEPVDKDLYELPPEEARNIPQVPASLGEALDALEADHDFLTAGGVFTPELIETWIEYKREKEIKPLAQRPHPFEYELYYGV

SEQ ID NO: 15591 - protein, 221 aa, Pseudotsuga menziesii
KAADARIIVTQAAYVDKLADLQSDDVIVISIDGAPKEGCQHISVLTEADETQCPSVEIHLDDVVALPYSSGTTGLPKGVMLTHKSLVSSVAQQVDGENPNLYFHSEDVILCVLPLFHIYSLNSVLLCALRAGAATLIMQKFNLTMLLELIQRYKVTVAPIVPPIVLDITKNPIVSQYDVSSVRIIMSGAAPLGKELEDALRERFPKAIFGQGYGMTEAGPV

SEQ ID NO: 15592 - protein, 688 aa, Oryza sativa
  misc_feature (179)..(179): Xaa can be any naturally occurring amino acid
MAASRLVAAAAIVVVVLVLAGAGAAGAAGAGEVRALLDLAAGLDPTGRLLPSWAPGRDPCGREGGGGFEGVACDGATGAVANVSLQGKGLAGTLPPAVAGLTALTGLYLHYNRLTGALPRELAALSRLTDLYLNVNNFSGPIPPEIAAMPSLQVVQLCYNQLTGGVPTQLGLLKRLTVXELQSNHLSGAIPASLGELPQLVRLDLSFNNLFGSIPVRLALLPRLLVLDVRNNTLTGSVPSELAKLQGGFQYANNTDLCGTGLPALRPCTPGELISPDMPQPFSAGISPQITPGSSSDGHGHCSGTHCPPSTKALAAVVVVADLLAVSGAGMFAFSWYRWRKQRVVAGSPVAVGGQCSTDAAGKDSFRKSASSTLVSLEYSNGWDPLADGRGGIGFSQEVAQSFRFNMEDVESATQYFSELNILGKNGNFAATYRGTLRDGTSVVVKRLGKTCCKQEEAEFLKGLKLLAELQHENIVGLRGFCCSRARGECFLVYDFVPNGSLSQFLDIDADDVARSNGRVLEWSTRISIIRGIAKGIEYLHSTRANKPPLVHQNISADKVLVDYTYRPLISGSGLHKLLVDDLVFSTLKASAAMGYLAPEYTTTGRFSEKSDVYAFGVIVFQILTGKSKIMQLPLESSNDEDLIDGNLRGCYSAAEAAKLAKIASACTSENPDHRPTMEELIQELCTF

SEQ ID NO: 15593 - protein, 498 aa, Myxococcus xanthus DK 1622
MNKTLLYITVIVIATCGLIYELVVGALASYLLGDSITQFSTVIGGYLFAMGIGSYLSRYIERGVAQRFVEVELAVALLGGICAPVLFLTFTLTDLFQVALYGSVIAIGALVGMEIPLLLRILKDQVKFKDLISQVLSLDYVGALAASVAFPLLLVPKLGLVRTSLLFGVLNAAVALWSTWLLAPLLGNPLRLRIKAVGLTVLLLAGFVMGDRLTTFYEDQLYADDVVHASSSPYQRIILTRGKRGFSLFLNGNLQFASLDEYRYHESLVHPAMVRAGKVENVLILGGGDGLAAREVLRYPEVRSVTLVDLDPVITGLATNYGELAKLNRHAMTDPRMRVVNGDAMQFLTEGGAQYDVVVVDFPDPNNFALGKLYTTGFYKLLKKRIAPDGVAVVQSTSPLFARRSFWCVETTLKAAGFWTEPYHALVPSFGEWGYVLIAHEPPARHRPLPEGLLFLDDATMASLTQFPPDMGPLPVEVNRLNNQVLVHYYEAEWQRWN

SEQ ID NO: 15594 - protein, 263 aa, Oryza sativa Japonica Group
MEAEAAAKRARESGDAAAAGAGEQAGISAVIPGWFSEISPMWPGEAHSLKVEKVLFQGKSDYQNVMVFQSSTYGKVLVLDGVIQVTERDECAYQEMITHLPLCSIKDPKKVLVIGGGDGGVLREVSRHSSVEQIDICEIDKMVVDVSKQFFPHLAVGFEDPRVSLHIGDGVAFLKNAPEGTYDAVIVDSSDPIGDLLIIGVIGFMLCSTEGPTVDFQHPIFNIEDNEFSTKSKGPLKFYNSEIHSASFCLPSFAKRVIGSKAN

SEQ ID NO: 15595 - protein, 197 aa, Neptuniibacter caesariensis
MNWINSSMLIMAFAAALLLSKPLHADATSPSSVSSSCPDTLNYSFRRLGEDKLENLCDTYKGKLILVVNTASKCAFTPQYDGLESLYRQYKAKGLVVLGFPSNDFAGQEPGTEKEILSFCRLTYSVEFPMFEKIHAAQGKADPFFVTLADSTGEYPGWNFHKYLIAPDGKVIRSFRSFVKPTDPELVRIIEENLPHG

SEQ ID NO: 15596 - protein, 168 aa, Xylella fastidiosa Dixon
MTSIYTFTFTRLDGRPQALADWRGQVLLLVNVASHCGFTPQYAGLEMLWQRYRDAGLIVIGFPCDQFAGQEPGDEAKIAEFCTLTYGVDFPMAAKIKVNGADAHPLWQWLKHRRRGLFGVAAIKWNFTKFLIGRNGQPIARYSPIKSPEQLEVHIVRALGEEGGGNTH

SEQ ID NO: 15597 - protein, 470 aa, Ehrlichia chaffeensis str. Arkansas
MFLSIEDTLNYIKKNAINFIDLRFTDSNGKWHHITRSAETINAQVLLAGVNFDSSSIPGWQSIEKSDMILLPDVSTAFMDPFSAQSTLVILCNIVDPYKQSQYSKDPRYIAQKAYKYMLSTGIADKCYFGPEVEFFIFDNAQFYAGMYNSYFKIDSAEHDILFQKREFSNNSHRPKVKGGYMPTPPIDSLHDIRSEMLTMFKEVGIIPLIHHHEVAASQCEVGFQHDELLLSADNVQKCKYIVHGVASSYGKTATFMPKPVIKDNGSGMHCHQSLWKDNVNIFVNPDGSISETCLYYIGGIIKYGKAINAFTNPSTNSYKRLVPHFEAPTWLTYSYENRSSAIRIPYVPKNDLNAKRIEARFPDPLANPYLCFSAQLMAGLYGIQNKIHPGPAIDKNLYSLDKEELQQFTSVASSLEEALDSLDNNREFLLVGDVFTNDQIDAYINLKMLEVKDLQLHPHPIEFINYYSS

SEQ ID NO: 15598 - protein, 158 aa, Pyrus communis
MEGKVFTEEQETLVVKSWGVMKQNAADLGLKFFLKIFEIAPSAQKLFSFLRDSNIPLEKNPKLKPHAMSVFVMTCESAVQLRKAGKVTVRESTLKRLGGVHFKSGVVDEHYEVTKFALLETIKEAVPEMWSPEMKNAWGEAYDQLVTAIKLEMKPPLN

SEQ ID NO: 15599 - protein, 508 aa, Arabidopsis thaliana
  misc_feature (110)..(110): Xaa can be any naturally occurring amino acid
  misc_feature (212)..(212): Xaa can be any naturally occurring amino acid
  misc_feature (241)..(241): Xaa can be any naturally occurring amino acid
  misc_feature (499)..(499): Xaa can be any naturally occurring amino acid
MSSELQISPAIHDPQGQEKQQQAAGVGILLQIMMLVLSFVLGHVLRRHKFYYLPEASASLLIGLIVGGLANISNTETSIRFTWFNFHDEFFFLFLLPPIIFQSGFSLQPXYLGGVMFLMYRLPFVECLMFGSLISATDPVTVLSIFQELGSDVNLYALVFGESVLNDADEIMAISLYRTMSLVRSHSSGQNFFMVIVRFLETFVGSMSAAMXIFYSDVLSPSFSLQNLECCLFVLFPYFSXKTLLFYTSYVSIYFTLIEIVQFVMKHYTYSNLSANSQRFVSAFFHLISSLAETFVFIYMGFDIAMEKHSWSHLGFIFFSILFIVIARAANVFGCGYLVNLARPAHRKIPMTHQKALWYSGLRGAMAFALALQSVHDLPEGHGQTIFTATTAIVVLTVLLIGGSTGTMLEALEVVGDSHDTSLGDGFEVVNSRYMTSYDDEDTPPGSGFRTKLREFHKSAASFTELDRNYLTPFFTSNNGDYDDEGNMEQHHGNNIILXRRGNLNNRG

SEQ ID NO: 15600 - protein, 161 aa, Shewanella sp. ANA-3
MTSTIYSHSANDIQGNPTALAQYQGKVILIVNTASECGFTPQYKGLEALYQKYKSQGLVVLGFPCNQFGAQEKADEKGIQSFCELNFGVSFPLFSKIEVNGEHTHPLYQYLKKAAPGVLGTERIKWNFTKFLINRQGEVVARFAPTTKPEAISDKIEALLK

SEQ ID NO: 15601 - protein, 143 aa, Salmonella enterica
PKPMFGDNGSGMHCHMSLAKNGTNLFSGDKYAGLSEQALYYIGGVIKHAKAINALANPTTNSYKRLVPGYEAPVMLAYSARNRSASIRIPVVASPKARRIEVRFPDPAANPYLCFAALLMAGLDGIKNKIHPGEAMDKNLYDL

SEQ ID NO: 15602 - protein, 791 aa, Hebeloma cylindrosporum
MVDQPADLEDGASSWRQGPAGRITFSRIIDFITEEVTFFRIHIAAFTFIPLIFSCIFYASNGRFHVSFLDSMFLCYSAMTVTGLSTVNLSTITPWQQAILYTLMTIGDFTVVSWIMVLIRKRFFRTHCEYIVLKDAKQRTNKSKASIKKTISSPIATFKQREAAPRQEKEPIGPTTETHNSEPQVHFVGPTPGVTLSSIPTHGHDPANLGGETHIISDEAFSSSPKSEEIPLTTMSEPVPVSSPMAVEFALSTTIPPRFAHYHPMMTMRNGRAVPKRGATMLSASRVPDVPGAPNTNNAKYQGFGGFPGPTKLLTQVVKITAPQTYQKLERSMTITTMTTLHASSAPWLNFSGLVVGRNSDFRTDSLTDEQLEDIGGAEYKALRLLSYLVPAYIVGTQLIAVLLFLPWLYVTKSYDEVFAAQPRLVSKAWFSFFQVMGAFTGGGLSLVDASMVPFQGAYLMIVALMFMILAGNFALPIFLRFIIWIASRILPEESDAQEALSFLLHHPRRCFLYLFPSHQTWFLVICLVVFSAMEWTGFAVLNLGLPAYESIPKGPRIIAGLFQGLAARASGLAIVPVASLAPALQFLYVVMMYIAVYPVALSIRSTNVYEERSLGVFEVPPIDENEEPNDVNSLVSRKERVGRYLGWHLRRQMSMDIWWLVWAIFIVAIIERKNILDDSKKWFDLFRILFELVSAFGGIGLSLGFPSDNFSFSGAMHPLSKLVIIVIMVRGRHRGLPVAVDRAVLLPSELVISNASGNGVTMNDNSEALKSGDIYDDKRPHSPNLPPLRI

SEQ ID NO: 15603 - protein, 515 aa, Oryza sativa Indica Group
MGLDLGALVLKSGGLSVSDYDSIVAINIFVALLCSCIVIGHLLEGNRWVNESITALVMGLITGGVILLVSGGKNSHILVFSEDLFFIYLLPPIIFNAGGLGDDWIQVCLIILTFLLNVSKLVSSKEKTILPQFYDNYFIWCCGDIDILCDNLSSTKKPAGQFFSVVELDVKVLNQDETPLLYSLVFGEGVVNDATSVVLFNAIEDIDIANFDSLVLLAFIGNFLYLFFTSTLLGVVAGLLSAYIIKKLCFARHSTDREVAIMILMAYLSYMLSMAHFATLSFIAEIFLFLYVGMDALDIEKWKLASSSPKKPIALSATILGLVMVGRAAFVFPLSFLSNLSKKETRPKISFKQQVIIWWAGLMRGAVSIALAYHKFTASGHTELRINAIMITSTVIVVLFSTMVFGFFTKPLLNLLIPPRPDIAADLSSQSIIDPLLGSLLGSDFDVGQPSPQNNLQLLLTIQTRSVHRVWRKFDDRFMRPMFGGRGFVPFVPGSPVERSIHGSQLGTVTEAEHS

SEQ ID NO: 15604 - protein, 172 aa, Oryza sativa
GFLEGGAGMADAGHDESGSPPRSGGVREQDRFLPIANISRIMKKAVPANGKIAKDAKETLQECVSEFISFVTSEASDKCQKEKRKTINGEDLLFAMGTLGFEEYVDPLKIYLHKYREMEGDSKLSSKAGDGSVKKDTIGPHSGASSSSAQGMVGAYTQGMGYMQPQYHNGDT

SEQ ID NO: 15605 - protein, 492 aa, Vitis vinifera
  misc_feature (15)..(15): Xaa can be any naturally occurring amino acid
  misc_feature (60)..(60): Xaa can be any naturally occurring amino acid
  misc_feature (317)..(317): Xaa can be any naturally occurring amino acid
MATDEGNHQMMSTDXGLEDLWQEFDLAVKSSKDIAVDPEEDQKEGGEECEHSFVLKDDIXSVCHICVLVDKSIESIIEYKYPKNCIEVYLSKLMAFKIVLNYTLISWGHETLPSAVRATQIAKPKTNFBGVQVKRSKSHIHEHCYTKDGKPTDDHSDGLRFSENDSSVTVIHAHPRHGRQMKPHQVEGFNFLVSNLVADDPGVCILANAPGSGKTFMIISFMQSFLTKHPEVRSLVVLPKSILATWKKEFLTWQVEDIPLYDFYSVKADRPSQHLDVLKQWVVEKSFLFLGHTQFTAIVSGDGASEAELTCQEVLLXTPQILILDEDHTPRTIKMELHYCLEKVQTPRKVILSGPLYQNHVKELKTSLAVVKRIMSKMDIMGVRNQLKSSHADAFYSVVETTLQKDDNFWRKITLIQDLREITCKVLHYCKGDFLNELPGLFEFTVLLDLCSRQKQEIENLKVYESKFKRNCVGSAVYVHPQLNVGLSTGYM

SEQ ID NO: 15606 - protein, 435 aa, Oryza sativa Indica Group
MATRIPGTVAASGVYYNDQYRMPCKLKGIHCMALNCIPQKAKVRKCMNGYQSTFRFCVNEKNGQTTGQSNGSLIQQGQNFRCHSYGSHNSSETKECSLEDGTDSYRDFEEHSRGASQFSDNQVAAKKKSVKSSQGLAEACKFVYNDAKFVNERAQNDILLLSRGITRLNKRACQDVAVLGSGFLKLDACYLCMHIQILKEQAQSDLKKAADQHWSDGALEADLRRADSVVRRRAMEDAFMALKFVRDIHDMMANRLQEQFAKDGSSSPANSRSFITLEKNGNTFELFPHEVSTDQITAIEQAYWSMASALSEADGIDYTDPEELELLVATLIDLDAMDGKKSVSLLAECSSSPDVNTRKALANALAAAPSMWILGNAGMGALQRLAQDSNYAVARAATRAINELTKQWELEEGDSLSAKLPKKLGTGVKINVFLQ

SEQ ID NO: 15607 - protein, 542 aa, Ipomoea tricolor
MAFGLSSLLQNSELFTSDHASVVSMNLFVALLCACIVLGHLLEENRWVNESITALIIGLCTGVVILLLSRGKSSHLLVFSEDLFFIYLLPPIIFNAGFQVKKKQFFVNFMTIMLFGAIGTLISCSIISFGAVKIFKHLDIDFLDFGDYLAIGAIFAATDSVCTLQVLSQDETPLLYSLVFGEGVVNDATSVVLFNAIQSFDMTSFDPKIGLHFIGNFLYLFLSSTFLGVGIGLLCAYIIKKLYFGRHSTDREVALMMLMSYLSYIMAELFYLSGILTVFFCGIVMSHYTWHNVTESSRVTTRHSFATLSFVAETFIFLYVGMDALDIEKWKFVKNSQGLSVAVSSILVGLILVGRAAFVFPLSFLSNLAKKNSSDKISFRQQIIIWWAGLMRGAVSIALAYNKFTTSGHTSLHENAIMITSTVTVVLFSTVVFGLMTKPLINLLLPPHKQIASGHSSMTTSEPSSPKHFAVPLLDNQHDSESDMITGPEVARPTALRMLLRTPTHTVHRYWRKFDDSFMRPVFGGRGFVPFVAGSPAEQSPR

SEQ ID NO: 15608 - protein, 791 aa, Hebeloma cylindrosporum
MVDQPADLEDGASSWRQGPAGRITFSRIIDFITEEVTFFRIHIAAFTFIPLIFSCIFYASNGRFHVGFLDSMFLCYSAMTVTGLSTVNLSTITPWQQAILYTLMTIGDFTVVSWIMVLIRKRFFRTHCEYIVLKNAKQRTNKSKASIKKTISSPIAAFKQREAAPRQEKEPIRPMTETPNSEPQVHFVGPTPGVTLSSIPTHGHDPANLGGETHIISDEAFSSSPKSEEIPLTTMSEPVPVSSPMAVEFALSTTIPPRFAHYHPMMTMRNGRAVPKRGATMLSASKVPDVPGAPNTNNAKYQGFGGFPGPTKLLTQVVKITAPQTYQKLERSMTITTMTTLHASSAPWLNFSGLVVGRNSDFRTDSLTDEQLEDIGGAEYKALRLLSYLVPAYIVGTQLIAVLLFLPWLYVTKSYDEVFAAQPRLVSKAWFSFFQVMGAFTGGGLSLVDASMVPFQGAYLMIIALMFMILAGNFALPIFLRFIIWIASRILPEESDAQEALSFLLHHPRRCFLYLFPSHQTWFLVICLVVFSAMEWTGFAVLNIGLPAYESIPKGPRIIAGLFQGLAARASGLAIVPVASLAPALQFLYVVMMYIAVYPVALSIRSTNVYEERSLGVFEVPPIDENEEPNDVNSLVSRKERVGRYLGWHLRRQMSMDIWWLVWAIFIVAIIERKNILDDSKKWFDLFRILFELVSAFGGIGLSLGFPSDNFSFSGAMHPLSKLVIIVIMVRGRHRGLPVAVDRAVLLPSELVISNASGNGVIMNDNSEALKSGDIYDDKRPHSPNLPPLRI

SEQ ID NO: 15609 - protein, 311 aa, Pseudotsuga sinensis
IDGSTNKTYNFAEVELISRKVAAGLAKLGLKKGQVVMLLLQNCIEFAFVFMGASVLGAVVTTANPFYKPGEIAKQAKAADARIIVTQAAYVDKLADLQSEDVIVISIDGAPKEGCQHISVLTEADETQCPSVEIHPDDVVALPYSSGTTGLPKGVMLTHKSLVSSVAQQVDGENPNLYFHSEDVILCVLPLFHIYSLNSVLLCALRAGAATLIMQKFNLTTLLELIQRYKVTVAPIVPPIVLDITKNPIVSQYDVSSVRIIMSGAAPLGKELEDALRERFPKAIFGQGYGMTEAGPVLAMNLAFAKEPFPV

SEQ ID NO: 15610 - protein, 427 aa, Oryza sativa Japonica Group
MSLCCKATRRSSGGLTTGHPISALPRAIKRILSSYPSLLTSLGGNLARGYKAAKPFLSIGFGRVVLGMVLVMSVSAATYTAPSSLALTEENLLFLEAWRAVDRAYYDKSFNGQSWFRYRENALRNEPMNTREETFSLLEHNCISDAAIKKMLSTLDDPFTRFLEPEKFKSLRCYLSKLFPYIFARGPEGSSVDLDIRSGSNTRHVVLKRQTVTLNPVRSRMCEIPGAKDNSKVGYIKLTTFNQNAAGSVKEALQKLRENNVKSFVLDLRNNSGGLFPEGIEIAKIWMDKGVIVYICDSQGVRDIYEADGISTVAASEPLVVLVNKGTASASEILAGALKDNKRAVIYGEPTYGKGKIQSVFALSDGSGLAVTVARYETPAHTDIDKVGVIPDRPLPASFPTDEDGFCSCLRDSNSACNLNAAQLFTR

SEQ ID NO: 15611 - protein, 139 aa, Brassica napus
  misc_feature (11)..(12): Xaa can be any naturally occurring amino acid
  misc_feature (129)..(129): Xaa can be any naturally occurring amino acid
EDNEALLDEAXXYMTTLQHQVQMMTMGNRFVTPATVLPLGPQYSQMGLAIGMQMGVPQLLPAPVLGAGLPLVGTQADVLRVLNHPVLMPIQDSAPFTPMENYLPQSVPPACAAFPNLIPNSTTSSNLDXARTHGGNLGK

SEQ ID NO: 15612 - protein, 193 aa, Millettia dura; identical to SEQ ID NO: 8639

SEQ ID NO: 15613 - protein, 189 aa, Leptospira interrogans serovar Lai str. 56601
MKEGASFMYSKYFIWFMTLGIFLPLAGIFAKGSFYDFKVKDIKGNEVSLSKYKGKVVMVVNVASKCGYTYQYEHLEKVYKKYKDQGFAVVGFPANNFGGQEPGTDQEIETFCRIQKGASFDMMSKISVKGKDIHPLYSYLIQNSPNPGEVEWNFEKILISKNGTIEARYRSSVEPDSSAVTQKIETLLK

SEQ ID NO: 15614 - protein, 301 aa, Sulfolobus solfataricus P2
MFGWHWLLEWQTPYEFHGHLIEKVLAEEKTPYQHVTLVEFTRFGKGLIIDGKVQSTLYDEHIYHELLVHPLLLSLTKPPKSVLILGGGEGATLREVLKYKSVEKAVMVDIDEKVIEFAKKYLYEWHQGAFEDKRTNLVITDGLKFIKETKEKYDAIILDLTDPIKNSTSYMLYTKEFYEKLREILNERGGIVTQATSPSFSLEVYVTIYNTIKEVFKEASASYTYMASFDGLWGFVYGGVRPDLLSEDEVDSKINERIDGQLRFYDGYSHKISFSLPKNIKSEFQKITKISTEKDPIYVPA

SEQ ID NO: 15615 - protein, 470 aa, Ehrlichia ruminantium str. Gardel
MFLSAEDTLNYIKKNTINFVDLRFTDSTSRWHHITRNAETIDTYVLSSGVNFDSSSIPGWQSVEKSDMILLPDVSTAFVDPFTAQPTLVIICNVINPYDKSEYPKDPRYTAHKASQYMLSTGIADKCYFGPEVEFFVFDNATFYNGMYHSYFKIESSEHISQFQKREHINNSHCPKIKGGYMPTPPVDSLHDLRSEILTMLKEVGITPLIHHHEVAASQCEVGFQHDELIRSADNVQKCKYIIHGVASSYGKTATFMPKPVIGDNGSGMHCHQSLWKDNINIFVNSDGSMSEICLYYIGGIIKYGKAINAFTNPSTNSYKRLVPNFEAPTWLTYSYENRSSAIRIPYVPNTDLNAKRIEVRFPDPLANPYLCFSAQLMAGLYGIKNKIHPGPSIDKNLYTLDKKELQSFISVANSLEESLYALDNNREFLLEGDVFTNDQIDTYIKLKSSEARDLHLHPHPIEFINYYSS

SEQ ID NO: 15616 - protein, 377 aa, Pereskia zinniiflora; identical to SEQ ID NO: 8647

SEQ ID NO: 15617 - protein, 469 aa, Sinorhizobium meliloti
MTTANEVLKQIKENDVKFVDLRFTDPKGKLQHVTMDVVCVDEDMFADGVMFDGSSIGGWKAINESDMVLMPDPETAHMDPFFAQSTMVIFCDILDPVSGEAYNRDPRGTAKKAEAYLKASGIGDTVFVGPEAEFFVFDDVKYKADPYNTGFKLDSSELPSNDDTDYETGNLGHRPRVKGGYFPVPPVDSSQDMRSEMLTVLSEMGVTVEKHHHEVAAAQHELGVKFDALVRNADKMQIYKYVVHQVANAYGKTATFMPKPIFGDNGSGMHVHLSIWKDGKPTFAGDEYAGLSESCLYFIGGIIKHAKALNAFTNPSTNSYKRLVPGYEAPVLLAYSARNRSASCRIPFGTNPKPNGVEVRFPDPTANPYLAFAAMLMAGLDGIKNKLHPGKAMDKDLYDLPPKELKKIPTVCGSLREALESLDKDRKFLTAGGVFDDDQIDSFIELKMQEVMRFEMTPHPVEFDMYYSV

SEQ ID NO: 15618 - protein, 662 aa, Chlamydomonas reinhardtii
MVGLGLIATLVAASALASIPQAKAASPTTDKLGTVIGIDLGTTYSCVGVYKNGRVEIIANDQGNRITPSYVAFTDEERLIGDAAKNQATVNPKRTIYDVKRLIGRKFSDADVQRDRKLVSYDIVDRQGKPYVAVDVKGEQKVFSPEEISAMILQKMKDTAEAYLGKTVKHAVVTVPAYFNDAQRQATKDAGTISGLNVVRIINEPTAAAIAYGLDKKGGEKNILVFDLGGGTFDVSILTIDNGVFEVISTNGDTHLGGEDFDQRVMEYFIKLIKKKYKKDISGDARALQKLRREAERAKRALSSQHQVRVEIEALYEGIDLSEPLTRARFEELNMDLFKKTMGPVKKAMDDANLKKTEIDEIVLVGGSTRIPKVQDLLREWFGGKEPNKGVNPDEAVAYGAAVQGAILSGEEEESTEGLIVIDRTPLSLGIETTGGVMTNLIPRNSVIPTKKSQTFSTAADNQPTVSIQVYEGERALTKDNHKLGQFDLNGIPPAPRGTPQIEVTFEVDANGILTVSAQDKGTGKKEKITITAEKGRLSQDDIERMVKEAEEFAEQDKAVKAKIDARNQLETYCYNMKNTVEDKMKDKIEEEDKEKITAAVKEALEWLDENPDADTSEYKDRLKEVEDVCNPIIAEVYKKSGGPSGGGDSHEDEDLADHDEL

SEQ ID NO: 15619 - protein, 377 aa, Pereskia guamacho; identical to SEQ ID NO: 8649

SEQ ID NO: 15620 - protein, 68 aa, Zea mays
MTTSRRLADRKTAKFQKNITRRGSVPETTVKKGNDYPVGPLVLGFFIFVVIGSSLFQIIRTATSGGVA

SEQ ID NO: 15621 - protein, 636 aa, Yersinia pestis CO92
MGKIIGIDLGTTNSCVAIMDGTKARVLENSEGDRTTPSIIAYTQDGETLVGQPAKRQAVTNPQNTLFAIKRLIGRRFQDEEAQRDKDIMPYKIIAADNGDAWLEVKGQKMAPPQISAEVLKKMKKTAEDYLGEPVTEAVITVPAYFNDAQRQATKDAGRIAGLEVKRIINEPTAAALAYGLDKEVGNRTIAVYDLGGGTFDISIIEIDEVDGEKTFEVLATNGDTHLGGEDFDSRLINYLVEEFKKDQGMDLRTDPLAMQRLKEAAEKAKIELSSAQQTDVNLPYITADGSGPKHMNIKVTRAKLESLVEDLVNRSIEPLKVALQDAGLSVSDIQDVILVGGQTRMPMVQKKVADFFGKEPRKDVNPDEAVAIGAAVQGGVLSGEVKDVLLLDVTPLSLGIETMGGVMTPLITKNTTIPTKHSQVFSTAEDNQSAVTIHVLQGERKRAQDNKSLGQFNLDGIQPAPRGMAQIEVTFDIDADGILHVSAKDKNTGREQKITIKASSGLNEEEIQKMVRDAEANAEADRKFEELVQTRNQADHLIHGTRKQLEEAGDKLPAEDKTAIEEAMKGLEAALKGEDKAEIEAKTQALVQVSGKLLEMAQQQQAAAGGDAGDTSAKKEDDVVDAEFEEVKDKK

SEQ ID NO: 15622 - protein, 494 aa, Staphylococcus aureus subsp. aureus MW2
MDASTLFKKVKVKRVLGSLEQQIDDITTDSRTAREGSIFVASVGYTVDSHKFCQSVADQGCKLVVVNKEQSLPANVTQVVVPDTLRVASILAHTLYDYPSHQLVTFGVTGTNGKTSIATMIHLIQRKLQKNSAYLGTNGFQINETKTKGANTTPETVSLTKKIKEAVDAGAESMTLEVSSHGLVLGRLRGVEFDVAIFSNLTQDHLDFHGTMEAYGHAKSLLFSQLGEDLSKEKYVVLNNDDSFSEYLRTVTPYEVFSYGIDEEAQFMAKNIQESLQGVSFDFVTPFGTYSVKSPYVGKFNISNIMAAMIAVWSKGTSLETIIKAVENLEPVEGRLEVLDPSLPIDLIIDYAHTADGMNKLIDAVQPFVKQKLIFLVGMAGERDLTKTPEMGRVACRADYVIFTPDNPANDDPKMLTAELAKGATHQNYIEFDDRAEGIKHAIDIAEPGDTVVLASKGREPYQIMPGHIKVPHRDDLIGLEAAYKKFGGGPVGQ

SEQ ID NO: 15623 - protein, 1062 aa, Prochlorococcus marinus subsp. marinus str. CCMP1375
MTLLHATWISTNWHPSNLGQSELFLWADQWRVVTPKQIIQTPSPHPFSLSSDELKEWLNSKKLLPNESINTSACLTLPSKPIHKKNNQKSKNQKTGIESEWKGLPLQAHEEIATQYECWPWKVDGISLTTVEATEWLTKLPLSKKDSDLSEELLWWAHLERWSLNLIASGLWLPQVKLHKKEGNEYRASWIPLLNQENERNRLEEFAKNIPLVAICAVPWIEAKGQIVNTEQVSNSNNNTLSLYRPRHNRVEVMDLLEELIDAQLRKDFQPRTKNLDPLLKAWQEALGTKDGIINLSNENAKRLEKASKNWKRGLSSNVQPAKTCLELIAPIDDLDLWDLNFSLQSESDPSIRLAADQIWEAGVEVTKVGGITIDNPSEILLEGLGRSLEIFPPIEKGLESPTPHTMKLSASEAFVLIRTAAAKLRDMGIGVILPNSLSKGFASRLGLAIQAELPESSLGVMLGESLNWDWELMIGGINLSMKELEMLAKKNSPLLNHKGTWIELRPNDLKNASKFFANTPELNLDKALRLSANKGNTFMKLPVHHFESGPRLQSVLEQYHHQKAPEPLPAPNGFHGQLRPYQERGLGWLAFLYRFKQGACLADDMGLGKTIQLLCFIQHLKVQNELTKPVLLIAPTSVLTNWKREAATFTPELCIHEHYGSKRHSSIPKLQNYLKKVDIMITSYGLLYRDGELLQEIDWQGIVIDEAQAIKNSKSKQSIITRAISKNLISNPFRIALTGTPVENRISELWALMDFLNPKVLGEEDFFNQRYKLPIEHYGDISSLKDLKTQVSPFILRRLKTDQSIISDLPQKIELNEWVGLSQEQELLYKQTVEKSLDELASLPIGQRQGKTLGLLTRLKQICNHPAIALKETQVEKNFLLRSSKLQRLEEILQEVKESHDRALLFTQFAEWGHLLQAYLQTKWESEVPFLHGGTPKGKRQEMIDRFQDDPRGPNIFLLSLKAGGVGLNLTRANHVFHIDRWWNPAVENQATDRAYRIGQKKSVIVHKFITTGTIEEKINQMILEKTELAENIVGSGESWLGQLSLEKLSELVALDSNPEF

SEQ ID NO: 15624 - protein, 607 aa, Streptococcus pneumoniae TIGR4
MSKIIGIDLGTTNSAVAVLEGTESKIIANPEGNRTTPSVVSFKNGEIIVGDAAKRQAVTNPDTVISIKSKMGTSEKVSANGKEYTPQEISAMILQYLKGYAEDYLGEKVTKAVITVPAYFNDAQRQATKDAGKIAGLEVERIVNEPTAAALAYGLDKTDKEEKILVFDLGGGTFDVSILELGDGVFDVLSTAGDNKLGGDDFDQKIIDHLVAEFKKENGIDLSTDKMAMQRLKDAAEKAKKDLSGVTSTQISLPFITAGEAGPLHLEMTLTRAKFDDLTRDLVERTKVPVRQALSDAGLSLSEIDEVILVGGSTRIPAVVEAVKAETGKEPNKSVNPDEVVAMGAAIQGGVITGDVKDVVLLDVTPLSLGIETMGGVFTKLIDRNTTIPTSKSQVFSTAADNQPAVDIHVLQGERPMAADNKTLGRFQLTDIPAAPRGIPQIEVTFDIDKNGIVSVKAKDLGTQKEQTIVIQSNSGLTDEEIDRMMKDAEANAEADKKRKEEVDLRNEVDQAIFATEKTIKETEGKGFDAERDAAQAALDDLKKAQEDNNLDDMKTKLEALNEKAQGLAVKLYEQAAAAQQAQEGAEGAQATGNAGDDVVDGEFTEK

SEQ ID NO: 15625 - protein, 744 aa, Arabidopsis thaliana
HFIMPMLFDNHDQFNEWFSKGIENHAEHGGTLNEHQLNRLHAILKPFMLRRVKKDVVSELTTKTEVTVHCKLSSRQQAFYQAIKNKISLAELFDSNRGQFTDKKVLNLMNIVIQLRKVCNHPELFERNEGSSYLYFGVTSNSLLPHPFGELEDVHYSGGQNPIIYKIPKLLHQEVLQNSETFCSSVGRGISRESFLKHFNIYSPEYILKSIFPSDSGVDQVVSGSGAFGFSRLMDLSPSEVGYLALCSVAERLLFSILRWERQFLDELVNSLMESKDGDLSDNNIERVKTKAVTRMLLMPSKVETNFQKRRLSTGPTRPSFEALVISHQDRFLSSIKLLHSAYTYIPKARAPPVSIHCSDRNSAYRVTEELHQPWLKRLLIGFARTSEANGPRKPNSFPHPLIQEIDSELPVVQPALQLTHRIFGSCPPMQSFDPAKLLTDSGKLQTLDILLKRLRAGNHRVLLFAQMTKMLNILEDYMNYRKYKYLRLDGSSTIMDRRDMVRDFQHRSDIFVFLLSTRAGGLGINLTAADTVIFYESDWNPTLDLQAMDRAHRLGQTKDVTVYRLICKETVEEKILHRASQKNTVQQLVMTGGHVQGDDFLGAADVVSLLMDDAEAAQLEQKFRELPLQVKDRQKKKTKRIRIDAEGDATLEELEDVDRQDNGQEPLEEPEKPKSSNKKRRAASNPKARAPQKAKEEANGEDTPQRTKRVKRQTKSINESLEPVFSASVTESNKGFDPSSSAN

SEQ ID NO: 15626 - protein, 422 aa, Vitis vinifera
MASEFRHANWLKPLMQVTFLMLKVLNQEETPFLYSVVFGEGVVNDATSIVLYNAVQSLDLSNIDALTALKLLGTFLYLFFTSTILGVVAGLLSAYIIKTLYFGRHSTDREVALMMIMAYLSYMLAELLSLSGILTVFFCGIVMSHYTWHNVTESSRITTKHAFATISFIAETFIFLYVGMDALDIDKWRSSKASAGTSVSVSSAFLALVLIGRAAFVFSLSNLLNFFKSAESTKVEFRQQVIFQTSNNVAVYSYQFSSCTNYLKSQFIIWWAGLMRGAVTIALSYSEFSDSETTSTQDSALMITSTIIVVLFSTVVFGSITKPLIGAVLLRHAKPTVSDATDIASLEDLRLLFLENGDPSDGGNNQPSPKASNLRLLMRYPTSTAHYFWRKFDDKYMRPMFGGRGFVPYVPGSPTGAQDETS

SEQ ID NO: 15627 - protein, 229 aa, Arabidopsis thaliana
MGKKKCELCCGVARMYCESDQASLCWDCDGKVHGANFLVAKHMRCLLCSACQSHTPWKASGLNLGPTVSICESCLARKKNNNSSLAGRDQNLNQEEEIIGCNDGAESYDEESDEDEEEEEVENQVVPAAVEQELPVVSSSSSVSSGEGDQVVKRTRLDLDLNLSDEMIKKSETILFEMQEENQSRPLKRLSRDEGLSRSTVVMNSSIVKLHGGRRKAEGCDTSSSSSFY

SEQ ID NO: 15628 - protein, 183 aa, Triticum aestivum
  misc_feature (92)..(92): Xaa can be any naturally occurring amino acid
  misc_feature (181)..(181): Xaa can be any naturally occurring amino acid
MSDEAASPPGGGGGGGGGGSDDGGGGGGFGGVREQDRFLPIANISRIMKKAIPANGKIAKDAKETVQECVSEFISFITSEASDKCQREKRKXTINGDDLLWAMATLGFEEYIEPLKVYLQKYRETEGDSKLAGKSGDVSVKKDALGPHGGASGTSAQGMGQQVAYNPGMVYMQPQYHNGDXSN

SEQ ID NO: 15629 - protein, 563 aa, Salmonella enterica subsp. enterica serovar Paratyphi A str.
MMPLSIIKNIANRERMEIFFTILIMTLVVSLSGVFTRVLPFQLPLPLMQIAVGALLAWPTFGLHVEFDPELFLVLFIPPLLFADGWKTPTREFLEHGREIFGLALALVLVTVVGIGFLIYWLVPGIPLIPAFALAAVLSPTDAVALSGIVGEGRIPKKIMGILQGEALMNDASGLVSLKFAVAVAMGTMVFTVGGATLEFFKVAIGGILAGFVVSWLYGRSLRFLSCWGGDEPATQIVLLFLLPFASYLIAEHIGVSGILAAVAAGMTITRSGVMRRAPLAMRLRANSTWAMLEFVFNGMVFLLLGLQLPGILESSLAAAEADPNVETWMLFTDIVLIYAALMLVRFGWLWTMKKFSLRFLKKKPMEFASWTSREILIASFAGVRGAITLAGVLSIPLLLPDGSGFPARYELVFLAAGVILFSLFVGVIMLPLLLQHLEVADHAQQLKEERIARAATAEVAIVAIQKMEERLAADTEENIDNQLLTEVSSRVIGNLRRRADGRNDVESSIQEENLERRFRLAALRSERAELYHLRATREISNETLQKLLHDLDLMEALLIENQ

SEQ ID NO: 15630 - protein, 745 aa, Cupriavidus taiwanensis
MSIIVDILILAGVLLAIVAVVQVAAARLVLPESTLLSAIGIAIGAGYVAIDAAHPDFARHFLHPLIDPALPPEAYLWIFLPPLLFHAALTADVRGMLPDAAPILLLAVIAVVVATGVIGVATAAASGMPLAVCLLLGAVVATTDPAAVIAIFRDVGAPARLIRLVEGESLLNDAAAIAIVGVLVAMLTGHGAQATLAAGLRELAWAFAGGVLCGALAGRLVSDLLPRLAGLAMAESALTLALPYPLYLLAEQLLGVSGVVAVVCAGLMVSALGPTRLAPPNWRHLRMMWEQFAGIAGAVVFLLAAVRVPSMLAGVTGHHGWLLLALVLAALAARLVTLFGLLPLLSWLRLSAPIDGAFKLAIAWGGLRGAVTLVLALGIAENSDLPYETRHFVAILATGFVLVSLLLNGTTLRGLIHRLGLDQLSPQERALQLQAIRLSTEEVEAMLARVAESFDLPPAIAREAAQKYRHGIELGSAEFDFDTALSERDRLSIGLVTLATRERELIPEYGDGVISVANLDAMMRNTAQMIDAAREHGRIGYNRAARHILDYHLGFKVALFLHRRLGFDRPLARALADRFELLICRQTVLDRLRRYNRSMLTPVFGARMATVLDGVLEDRSRAAAEGLADMRGKFGAYTVALERRLLMLFALRKGRLSLEAMREEAVISKQAFNQIAQVIQQAWHANLQRPPLRGVTDYAGGPGAAPGPRPSGGILGAGTRNGGHDADAEHNQAGNADIDRRQPGR

SEQ ID NO: 15631 - protein, 467 aa, Arabidopsis thaliana
  misc_feature (14)..(14): Xaa can be any naturally occurring amino acid
  misc_feature (17)..(17): Xaa can be any naturally occurring amino acid
  misc_feature (72)..(72): Xaa can be any naturally occurring amino acid
  misc_feature (112)..(112): Xaa can be any naturally occurring amino acid
  misc_feature (118)..(118): Xaa can be any naturally occurring amino acid
  misc_feature (205)..(205): Xaa can be any naturally occurring amino acid
  misc_feature (241)..(241): Xaa can be any naturally occurring amino acid
  misc_feature (286)..(459): Xaa can be any naturally occurring amino acid
ACFSTVIPGWFSEXSPXWPGEAHSLKVEKVLFQGKSDYQDVIVFQSATYGKVLVLDGVIQLTERDECAYQEXITHLPLCSIPNPKKVLVIGGGDGGVLREVARHASIEQIDXCEIDKXVVDVSKQFFPDVAIGYEDPRVNLVIGDGVAFLKNAAEGSYDAVIVDSSDPIGPAKELFEKPFFQSVARALRPGGVVCTQAESLWLHXDIIEDIVSNCREIFKGSVNYAWTSVPTYPSGVIGFXLCSTEGPDVDFKHPLNPIGPLKFYNAEIHSAAFCLPSFAKKVIEXXXXXXXXXXXXXXXXXXXXXXXXXXXXXXXXXXXXXXXXXXXXXXXXXXXXXXXXXXXXXXXXXXXXXXXXXXXXXXXXXXXXXXXXXXXXXXXXXXXXXXXXXXXXXXXXXXXXXXXXXXXXXXXXXXXXXXXXXXXXXXXXXXXXXXXXXXXXXXXXXXXXXXXXXXXXXXDESSSKSN

SEQ ID NO: 15632 - protein, 191 aa, Millettia richardiana; identical to SEQ ID NO: 8654

SEQ ID NO: 15633 - protein, 430 aa, Arabidopsis thaliana
  misc_feature (11)..(11): Xaa can be any naturally occurring amino acid
  misc_feature (14)..(14): Xaa can be any naturally occurring amino acid
  misc_feature (69)..(69): Xaa can be any naturally occurring amino acid
  misc_feature (109)..(109): Xaa can be any naturally occurring amino acid
  misc_feature (115)..(115): Xaa can be any naturally occurring amino acid
  misc_feature (202)..(202): Xaa can be any naturally occurring amino acid
  misc_feature (238)..(238): Xaa can be any naturally occurring amino acid
  misc_feature (291)..(427): Xaa can be any naturally occurring amino acid
STVIPGWFSEXSPXWPGEAHSLKVEKVLFQGKSDYQDVIVFQSATYGKVLVLDGVIQLTERDECAYQEXITHLPLCSIPNPKKVLVIGGGDGGVLREVARHASIEQIDXCEIDKXVVDVSKQFFPDVAIGYEDPRVNLVIGDGVAFLKNAAEGSYDAVIVDSSDPIGPAKELFEKPFFQSVARALRPGGVVCTQAESLWLHXDIIEDIVSNCREIFKGSVNYAWTSVPTYPSGVIGFXLCSTEGPDVDFKHPLNPIDESSSKSNGPLKFYNAEIHSAAFCLPSFAKKVIEXXXXXXXXXXXXXXXXXXXXXXXXXXXXXXXXXXXXXXXXXXXXXXXXXXXXXXXXXXXXXXXXXXXXXXXXXXXXXXXXXXXXXXXXXXXXXXXXXXXXXXXXXXXXXXXXXXXXXXXXXXXXXXXXXXXXXXXXXACF

SEQ ID NO: 15634 - protein, 309 aa, Pseudotsuga sinensis
GATDKTYNFAEAELISRKVAAGLAKLGLKKGQVVMLLLQNCIEFAFVFMGASILGAIVTTANPFYKPGEIAKQAKAADARIIVTQAAYADKLADLQSDDVIVITMDGAPKEGCQHISVLTEADETQCPSVEIHPDDVVALPYSSGTTGLPKGVMLTHKGLVSSVAQQVDGENPNLYFYSEDVILCVLPLFHIYSLNSVLLCALRAGAATLIMQKFNLTTLLELIQRYKVTVAPIVPPIVLDITKNPIVSQYDVSSVRMIISGAAPLGKKLEDALRDRFPKAIFGQGYGMTEAGPVLAMNLAFAKEPFPV

SEQ ID NO: 15635 - protein, 1004 aa, Oryza sativa Japonica Group
MAAAGRDPPATPSSRMYYCRQRKASSEVNANVFVPGGQNGISFPASNRAHDWGYGGVREEWEASYARKLQLINFLSSLHQRTANSLITTRMDANMDTPLEQKQKDSSAIIVLDSDDEDEAERCEQLASENNKQQAPSGPTSPCTTWIVSSAKDQVNGTLHVDGVQSTQIVPYGQNAPLINQSPLQTSWQPSIQYERVILQRRPEEQRVQDLVAASHAEKIAETQVFLTLPTLPNERKRRKSEPTTLVDGDGGTNLGKGKRKNHQNQAAVDSILDLQQTVVPLQQNDVPSQSYRTMIEEEKPVKESDGLEDLWKDFSLAAECTKLDTNEDMSNEKDVDDENEMDDDCNHDIRIHEDLGHVCRICGMIVRKAETIIDYQWKKKNLLWGIFSLLKYFLKWESVFITNYIDIDTALEYIASRTRTNYYESRSKDADDIDTGAVKVSEDFIVSDIAIHPRHAKQMRPHQLEGFSFLVKNLVGDKPGGCILAHAPGSGKTFMLISFIQSFLAKYPSARPLVVLPKGILGTWKREFQRWQVEDIPLYDFYSVKADKRTEQLEVLKSWEARMSILFLGYKQFSRIICGDGDGNIAAACRDRLLMVPNLLILDEGHTPRNRETDVLASLKRVQTPRKVVLSGTLFQNHVSEVFNILDLVRPKFLKMESSRPIARRIMSQVAISGIRSLKGVHDSAFTESVEDTLLNDDNFTRKSHVIRSLRELTKDVLHYYKGDILDELPGLVDFSVFLKLSTKQKEIVHKIEAYEKFKRSAVGTALYIHPCLSEISEGDAADRATNLTDATVDSLIESIIIKDGVKAKFFFNILSLANSAGEKLLAFSQYILPMKFLERLLVKRLGWHVGKEIFMISGDTSADDREVAMDQFNNSADAKVLFGSIKACGEGISLVGASRVIILDVHLNPSVTRQAIGRAFRPGQQKKVFVYRLVAADSPEVKFHETAFKKEVIPKLWFEWSELCTTEDFKLNQVDIDDSEDELLEANAIRQDIKALYRRVWQ

SEQ ID NO: 15636 - protein, 317 aa, Pseudotsuga sinensis
LIDGSTNKTYNFAEVELISRKVAAGLAKLGLKKGQVVMLLLQNCIEFAFVFMGASVLGAVVTTANPFYKPGEIAKQAKAADARIIVTQAAYVDKLADLQSEDVIVISIDGAPKEGCQHISVLTEADETQCPSVEIHPDDVVALPYSSGTTGLPKGVMLTHKSLVSSVAQQVDGENPNLYFHSEDVILCVLPLFHIYSLNSVLLCALRAGAATLIMQKFNLTTLLELIQRYKVTVAPIVPPIVLDITKNPIVSQYDVSSVRIIMSGAAPLGKELEDALRERFPKAIFGQGYGMTEAGPVLAMNLAFAKEPFPVKSGSC

SEQ ID NO: 15637 - protein, 136 aa, Escherichia coli
SGMHCHMSLSKNGVNLFAGDKYAGLSEQALYYIGGVIKHAKAINALANPTTNSYKRLVPGYEAPVMLAYSARNRSASIRIPVVSSPKARRIEVRFPDPAANPYLCFAALLMAGLDGIKNKIHPGEAMDKNLYDLPP

SEQ ID NO: 15638 - protein, 1492 aa, Oryza sativa; identical to SEQ ID NO: 15439

SEQ ID NO: 15639 - protein, 377 aa, Echinocactus platyacanthus; identical to SEQ ID NO: 8673

SEQ ID NO: 15640 - protein, 449 aa, Synechococcus sp. CC9605
MVRSQRLRSLVRSTPLLLILGVGGVVTAMGISSPGLSLPSASGGSIYDSPKEVIDQVWQIVYRDYLDSTGSYDEATWRQLRSNLLSKSYGGSAESYEAIRGMLASLDDPYTRFLDPKEFKEMQIDTSGELMGVGIQLSLDKDTKELIVVSPIEGTPASRAGVQPKDVIVSIDGASTKGMTTEDAVKLIRGPEGTDVLLGLRRQGQVLNVPLKRARIEIHAVKAMLNTAPNGRKVGYIRLKQFNANATREMRAAIKDLESQAAEGYVLDLRSNPGGLLEASVDIARQWLNEGTIVSTRTREGIRDVRRATGSAVTDKPLVVLIDQGSASASEILSGALQDNSRAQLVGQKTFGKGLVQAVRGLADGSGLTVTIAKYLTPKGTDIHKNGIQPDIEAAMSKKESKNFSVEDLGTQKDSQYKTAEGTLLNQLKKSQAGTTYQPGRANLSFALQ

SEQ ID NO: 15641 - protein, 259 aa, Oryza sativa Indica Group
MSEGFDGTENGGGGGGGGGVGKEQDRFLPIANIGRIMRRAVPENGKIAKDSKESVQECVSEFISFITSEASDKCLKEKRKTINGDDLIWSMGTLGFEDYVEPLKLYLRLYREGDTKGSRASELPVKKDVVLNGDPGSSEGEPSFLGKERSSILLCCLKTAVTVFWSVTVLTEEQTAAACSKADVTYVDHGEDEAKPVTVKIIETVYVEADTADDFKSVVQRLTGKDAVAGDAPELNSAQRFGSGREASRHGDHKVRIYE

SEQ ID NO: 15642 - protein, 377 aa, Pereskia stenantha; identical to SEQ ID NO: 8678

SEQ ID NO: 15643 - protein, 185 aa, Vitis vinifera
  misc_feature (102)..(102): Xaa can be any naturally occurring amino acid
  misc_feature (143)..(143): Xaa can be any naturally occurring amino acid
MKECELCSFPARMFCESDQARLCWDCDEKVHGANFLVARHSRSLLCHACQAPTPWKASGTRLAPTVSVCEACVLRCDKDRHRSSGEDRESEGGNTDDEEDDXDDHDDDDENDGDEGDEDDDVEEEEDGENQVVPLSSSAASLXLPPDASSSSSEDGEASSRFSARGRGVMVAQSFFAVSKKLRNM

SEQ ID NO: 15644 - protein, 541 aa, Medicago sativa
MAIEMTSIVSKLSMLSTSDHASVVSMNLFVALLCACIVLGHLLEENRWMNESITALLIGICTGVVILLFSGGKSSHILVFSEDLFFIYLLPPIIFNAGFQVKKKQFFVNFMTITSFGAIGTLISCVIITTGATFAFKRMDIGPLEIGDYLAIGAIFAATDSVCTLQVLNQDETPLLYSLVFGEGVVNDATSVVLFNAIQSFDLNQLNPSIALHFLGNFLYLFVASTLLGVVTGLLSAYVIKKLYIGRHSTDREVALMMLMAYLSYMLAELTYLSGILTVFFCGIVMSHYTWHNVTQSSRITTKHSFATLSFVAEIFIFLYVGMDALDIEKWKFVSDSPGTSIAASSVLLGLILLGRAAFVFPLSFLSNLTKKSQHQKISFRQQVIIWWAGLMRGAVSMALAYNQFTMSGHTQLRSNAIMITSTITVVLFSTVVFGLLTKPLIRLLLPHPKITSSMTTTESTTPKSFIVPLLGDSRDSEADLEGHEIHRPNSLRALLSTPTHTVHRLWRKFDDSFMRPVFGGRGFVPVEPGSPSERNGNQWG

SEQ ID NO: 15645 - protein, 167 aa, Citrus sinensis
MASQSKTSVHDFTVKDAKGQDVDLSIYKGKLLLIVNVASQCGLTNSNYTELSQLYDKYKNQGLEILAFPCNQFGAQEPGDNEQIQEFACTRFKAEFPIFDKVDVNGDNAAPLYKHLKSSKGGLFGDSIKWNFSKFLVDKEGNVVERYAPTTSPLSIEKDIKKLLETA

SEQ ID NO: 15646 - protein, 491 aa, Bacillus anthracis str. Ames
MKLHTLVSCLHDFPVVPKENPEITSIEADSRKVKEGSLFVCMKGYTVDSHDFAKQAAAQGAAAIVAERPIDVDVPVVLVKNTFRSLAVLADYFYGQPTHKLHLIGITGTNGKTTTSHIMDEIMRAHGHKTGLIGTINMKIGDETFEVKNTTPDALTLQQTFAKMVEHGVDSTVMEVSSHALDLGRVHGCDYDVAVFTNLTQDHLDYHKTMEEYKHAKGLLFAQLGNSYNHNREKYAVLNNDDAVTVEYMRSTAATVVTYGIDTTSDVMAKDIAMTSGGTTFTLVTPYESVNVTMKLIGKFNVYNVLAATAAGLVSGVSLETIIDVIKELAGVPGRFEVVDGGQNYTVIVDYAHTPDSLENVLKTAKQFAKGDVYCIVGCGGDRDRTKRPIMASVATQYATHAIYTSDNPRSEDPAAILDDMVHGANGNNYEVIIDRKEAIHHAITKAKADDIIIIAGKGHETYQIIGKDVHHFDDREVAKEAITERLNNEE

SEQ ID NO: 15647 - protein, 171 aa, Spinacia oleracea
MASDSSAQPKSVHEFVVRDARGNDVDLSIYKGKVLLIVNVASQCGLTNSNYTEMTELYEKYRELGLEILAFPCNQFGNQEPGSNEEVLEFACTRFKAEYPIFDKVDVNGSNAAPIYKFLKSSKGGLFGDGLKWNFTKFLVDKDGNVVDRYAPTTSPKSIEKDVKKLLGIQK

SEQ ID NO: 15648 - protein, 169 aa, Solanum lycopersicum
MATQTSNPQSVYDFTVKDAKGKDVDLSIYKGKVLIIVNVASQCGLTNSNYTDMTELYKKYKDQGLEILAFPCNQFGGQEPGNIEDIQQMVCTRFKAEYPIFDKVDVNGDNAAPLYRFLKSSKGGFFGDGIKWNFSKFLIDKEGHVVDRYSPTTSPASMEKDIKKLLGVA

SEQ ID NO: 15649 - protein, 638 aa, Shigella flexneri 2a str. 301
MGKIIGIDLGTTNSCVAIMDGTIPRVLENAEGDRTTPSIIAYTQDGETLVGQPAKRQAVTNPQNTLFAIKRLIGRRFQDEEVQRDVSIMPFKIIAADNGDAWVEVKGQKMAPPQISAEVLKKMKKTAEDYLGEPVTEAVITVPAYFNDAQRQATKDAGRIAGLEVKRIINEPTAAALAYGLDKGTGNRTIAVYDLGGGTFDISIIEIDEVDGEKTFEVLATNGDTHLGGEDFDSRLINYLVEEFKKDQGIDLRNDPLAMQRLKEAAEKAKIELSSAQQTDVNLPYITADATGPKHMNIKVTRAKLESLVEDLVNRSIEPLKVALQDAGLSVSDIDDVILVGGQTRMPMVQKKVAEFFGKEPRKDVNPDEAVAIGAAVQGGVLTGDVKDVLLLDVTPLSLGIETMGGVMTTLIAKNTTIPTKHSQVFSTAEDNQSAVTIHVLQGERKRAADNKSLGQFNLDGINPAPRGMPQIEVTFDIDADGILHVSAKDKNSGKEQKITIKASSGLNEDEIQKMVRDAEANAEADRKFEELVQTRNQGDHLLHSTRKQVEEAGDKLPADDKTAIESALTALETALKGEDKAAIEAKMQELAQVSQKLMEIAQQQHAQQQTAGADASANNAKDDDVVDAEFEEVKDKK

SEQ ID NO: 15650 - protein, 445 aa, Pseudomonas syringae pv. tomato str. DC3000
MLHLSRLTSLALAIAIVIGAPLAQAAEKTAPATPAAVAPAKPNANAKPPLPLDELRTFAEVMDRVKAAYVEPVDDKTLLENAIKGMLSNLDPHSAYLGPEDFQELQESTSGEFGGLGIEVGVEDGLVKVVSPIDDTPASKAGIEAGDLIVKINGTPTQGQNMQEAVDKMRGKIGEKITLTLVRDGGTPFDVTLARATIQVKSVKAQMLENGYGYIRITQFQVKTGDEVGKALAKFRKDNGKKMSGLILDLRNNPGGVLQSAVQVADHFLTKGLIVYTKGRIANSELRFSADPADASEGVPLVVLINGGSASASEIVAGALQDQKRGILMGTDTFGKGSVQTVLPLNNDRALKITTALYYTPNGRSIQAQGINPDIVVRRAKVTSEADGENYKEADLMGHLGNGNGGADKPTVKGSAAAKARPQDDDFQLSQALSLLKGLSITRGN

SEQ ID NO: 15651 - protein, 430 aa, Arabidopsis thaliana
MEHQGWSFEENYSLSTNRRSIRPQDELVELLWRDGQVVLQSQTHREQTQTQKQDHHEEALRSSTFLEDQETVSWIQYPPDEDPFEPDDFSSHFFSTMDPLQRPTSETVKPKSSPEPPQVMVKPKACPDPPPQVMPPPKFRLTNSSSGIRETEMEQYSVTTVGPSHCGSNPSQNDLDVSMSHDRSKNIEEKLNPNASSSSGGSSGCSFGKDIKEMASGRCITTDRKRKRINHTDESVSLSDAIGNKSNQRSGSNRRSRAAEVHNLSERRRRDRINERMKALQELIPHCSKTDKASILDEAIDYLKSLQLQLQVMWMGSGMAAAAASAPMMFPGVQPQQFIRQIQSPVQLPRFPVMDQSAIQNNPGLVCQNPVQNQIISDRFARYIGGFPHMQAATQMQPMEMLRFSSPAGQQSQQPSSVPTKTTDGSRLDH

SEQ ID NO: 15652 - protein, 642 aa, Chlorella vulgaris
MTTPAIGIDLGTTYSCVGLWQHDRVEIIPNEQGNRTTPSYVAFTDTERLIGDAAKNQVAMNPINTVFDAKRLIGRKFSDPTVQHDISHWPFKVVSGPGDKPMIQVSHKGEEKTFAPEEISSMVLVKMKEIAQAYVGADKEVKKAVVTVPAYFNDSQRQATKDAGVIAGLEVMRIINEPTAAAIAYGLDKKGTTSGEQNVLIFDLGGGTFDVSLLTIEEGIFEVKATAGDTHLGGEDFDNRLVNFFVQEFKRKHRKDISSNPRALRRLRTSCERAKRTLSSSTQASIEIDSLYEGIDFYSSITRARFEELNMDLFRKCMEPVEKVLRDAKMDKGQVNEVVLVGGSTRIPKVQQLLQDFFNGKELCKSINPDEAVAYGAAVQAAILNGETHEKVQDLLLLDVIPLSLGLETAGGVMTVLIARNTTIPTKKEQVFSTYSDNQPGVLIQVYEGERSRTKDNNLLGKFELTGIPPAPRGVPQINVTFDVDANGILNVSAEDKTTGNKNKITITNDKGRLSKDEIERMVQEAEKYKSEDEQARRKVEAKNGLENYAYSMRNTLKDTNIAAKIDASDKERLEKMVEDAIEWLDHNQLAEEEEFEHKRQDLESACNPIIAKLYQGGAPPEAAAADSGAASGPGPKIEEVD

SEQ ID NO: 15653 - protein, 156 aa, Francisella tularensis subsp. tularensis SCHU S4
MSIYDFKLTANDGSEYHLPKNKVLLIVNVASKCGFTKQYRGLQHLHKIYPDLEIVAFPCNSFGGQEPGSDEEIKNFCETNYNVTFPIMKKTKVNGKDAEPLFEYLKERAKGVLGTEAIKWNFTKFLVSKDGETIVRYAPKTIPEDLIPDIDNFLKD

SEQ ID NO: 15654 - protein, 283 aa, Prochlorococcus marinus str. MIT 9301
MTNIQTWIDEYHKGSRFGLNGDVLIKQKSQYQEIIVIENEYYGRALMLDGCWMTSLKDEKYYHECLVHPALSSIDEKSNVLIIGGGDGGTVRECVKYAQISKIDLVEIDEEVIKISKKFLKEIGGEAWHDKRLEIHVDDGVKWVKKTRDNYYDVIFIDCSDPSEFSNLLFSDSFYKECKRILTPKGILATQSESPESFKNIHINILKTLKNIFKVSETMYSFVPIYPSGIWSWTFASSEDLNLSKQNYDEILKIEKGCEIWNLNFQNAAFKMMPNKIIKELDS

SEQ ID NO: 15655 - protein, 170 aa, Gossypium hirsutum
MASQSSKPQSIYDFTVKDAKGNDVDLSIYKGKVLIIVNVASQCGLTNSNYTDLTEIYKKYKDQGLEILAFPCNQFGGQEPGSIEESIQNMVCTRFKAEYPIFDKVDVNGDNAAPLYKFLKSSKGGFFGDSIKWNFSKFLVDKEGNVVDRYSPTTTPASMEKDIKKLLGVA

SEQ ID NO: 15656 - protein, 263 aa, Triticum aestivum
  misc_feature (226)..(226): Xaa can be any naturally occurring amino acid
HSRTSLYKKAGWYRSGIPGISSTHASGAPPQGAPTVEEQEEAAGVGILLQISMLVLAFVLSHLLRRRRVYYLPEASASLLIGLIVGGLASVSNAQKSTRRWFNFREELFFLFLLPPIIFQSGFSLAPKPFFSNFGAIITFAIVGTLIASIVTGVLVYLAGLIHLVYRMPLVECMMFGALVSATDPVTVLSIFQELGTDVNLYALVFGESVLNDAMAISLYRTMGIXRTNASSPNIFVVILRFLENFFGSMSTGAWSWILFLLP

SEQ ID NO: 15657 - protein, 192 aa, Piscidia piscipula; identical to SEQ ID NO: 8689

SEQ ID NO: 15658 - protein, 688 aa, Arabidopsis thaliana; identical to SEQ ID NO: 15588

SEQ ID NO: 15659 - protein, 141 aa, Escherichia coli
GDNGSGMHCHMSLSKNGVNLFAGDKYAGLSEQALYYIGGVIKHAKAINALANPTTNSYKRLVPGYEAPVMLAYSARNRSASIRIPVVSSPKARRIEVRFPDPAANPYLCFAALLMAGLDGIKNKIHPGEAMDKNLYDLPPE

SEQ ID NO: 15660 - protein, 609 aa, Rhodopirellula baltica SH 1
MDSPRPAIPLQRHSRWNRRMDLLTTINRCLAFDKQADQSNEGKAIAKHARRRRVAGRMRTFALVVGAIAVGGSSMPAFAQGFVPSRGPTVSAPTNDAERKLEEQERARALTDGIELEDAGQWSDAIDHYESATRRFPQDRILYQRLLISRLRFDVNRRYQDQTYLRSLRDMTTSQSLDLYSEILANLQTHYVDTIEWSRVLLHGTAALETALDDETFVQTMLPNATPEQIEKFRMEIHHRISQRSTQSRFDLRATVSQVASMAQQELGLSGTATVLEFVSGAVSTLDTYTRLLSPGQLDDMFSTIDGNFVGLGVELKPGEDCLNILSVIPGGPADEAGIVAGDRIMGVDAISAADRDPDYVADLLRGPEGSLVSLEIASVDQQPRSIRVARRRVDVPCVENIHLVDTDAKIGYFRLTNFQKSTPAEVEKALWALSRQGMRSLIIDLRDNPGGLLPASVEVADRFIDNGRILTTRGRNARENFDYSAHRANTWNVPLAVLIDRNSASASEIFSGAIRDSNRGTVVGEKSYGKGSVQGIFRMQAAQFGLCLTTAKFYSPSGRAISRNGVEPHLSVPPTYIAARPDENGRLVTELEDDVLQRAIEHLAQPAH

SEQ ID NO: 15661 - protein, 265 aa, Saccharomyces cerevisiae; identical to SEQ ID NO: 336

SEQ ID NO: 15662 - protein, 135 aa, Escherichia coli
GSGMHCHMSLSKNGVNLFAGDKYAGLSEQALYYIGGVIKHAKAINALANPTTNSYKRLVPGYEAPVMLAYSARNRSASIRIPVVSSPKARRIEVRFPDPAANPYLCFAALLMAGLDGIKNKIHPGEAMDKNLYDL

SEQ ID NO: 15663 - protein, 228 aa, Larix gmelinii
EIAKQAKAAGARIIVTQAAYVDKLADLQSDDMIVIAIDGAPKEGCQHISILTEADETQCPSVEIHPDDVVALPYSSGTTGLPKGVMLTHKSLVSSVAQQVDGENPNLYFHSEDVILCVLPLFHIYSLNSVLLCALRAGAATLIMQKFNLTALLELIQRYKVTVAPIVPPIVLEISKNPIVSQYDVSSVRIIMSGAAPLGKELEDALRERFPKAIFGQGYGMTEAGPVL

SEQ ID NO: 15664 - protein, 140 aa, Escherichia coli
GDNGSGMHCHMSLSKNGVNLFAGDKYAGLSEQALYYIGGVIKHAKAINALANPTTNSYKRLVPGYEAPVMLAYSARNRSASIRIPVVSSPKARRIEVRFPDPAANPYLCFAALLMAGLDGIKNKIHPGEAMDKNLYDLPP

SEQ ID NO: 15665 - protein, 113 aa, Escherichia coli
SLSKNGVNLFAGDKYAGLSEQALYYIGGVIKHAKAINALANPTTNSYKRLVPGYEAPVMLAYSARNRSASIRIPVVSSPKARRIEVRFPDPAANPYLCFAALLMAGLDGIKNK

SEQ ID NO: 15666 - protein, 223 aa, Larix gmelinii
AKAAGARIIVTQAAYVDKLADLQSDDMIVIAIDGAPKEGCQHISILTEADETQCPSVEIHPDDVVALPYSSGTTGLPKGVMLTHKSQVSSVAQQVDGENPNLYFHSEDVILCVLPLFHIYSLNSVLLCALRAGAATLIMQKFNLTALLELIQRYKVTVAPIVPPIVLEISKNPIVSQYDVPSVRIIMSGAAPLGKELEDALRERFPKAIFGQGYGMTEAGPVL

SEQ ID NO: 15667 - protein, 147 aa, Escherichia coli
KPMFGDNGSGMHCHMSLSKNGVNLFAGDKYAGLSEQALYYIGGVIKHAKAINALANPTTNSYKRLVPGYEAPVMLAYSARNRSASIRIPVVSSPKARRIEVRFPDPAANPYLCFAALLMAGLDGIKNKIHPGEAMDKNLYDLPPEEA

SEQ ID NO: 15668 - protein, 678 aa, Pichia pastoris
MLSLKPSWLTLAALMYAMLLVVVPFAKPVRADDVESYGTVIGIDLGTTYSCVGVMKSGRVEILANDQGNRITPSYVSFTEDERLVGDAAKNLAASNPKNTIFDIKRLIGMKYDAPEVQRDLKRLPYTVKSKNGQPVVSVEYKGEEKSFTPEEISAMVLGKMKLIAEDYLGKKVTHAVVTVPAYFNDAQRQATKDAGLIAGLTVLRIVNEPTAAALAYGLDKTGEERQIIVYDLGGGTFDVSLLSIEGGAFEVLATAGDTHLGGEDFDYRVVRHFVKIFKKKHNIDISNNDKALGKLKREVEKAKRTLSSQMTTRIEIDSFVDGIDFSEQLSRAKFEEINIELFKKTLKPVEQVLKDAGVKKSEIDDIVLVGGSTRIPKVQQLLEDYFDGKKASKGINPDEAVAYGAAVQAGVLSGEEGVDDIVLLDVNPLTLGIETTGGVMTTLINRNTAIPTKKSQIFSTAADNQPTVLIQVYEGERALAKDNNLLGKFELTGIPPAPRGTPQVEVTFVLDANGILKVSATDKGTGKSESITINNDRGRLSKEEVDRMVEEAEKYAAEDAALREKIEARNALENYAHSLRNQVTDDSETGLGSKLDEDDKETLTDAIKDTLEFLEDNFDTATKEELDEQREKLSKIAYPITSKLYGAPEGGTPPGGQGFDDDDGDFDYDYDYDHDEL

SEQ ID NO: 15669 - protein, 105 aa, Candida albicans SC5314; identical to SEQ ID NO: 344

SEQ ID NO: 15670 - protein, 199 aa, Triticum aestivum
  misc_feature (131)..(131): Xaa can be any naturally occurring amino acid
  misc_feature (163)..(163): Xaa can be any naturally occurring amino acid
MPESDNDSGGPSNTGGEGELSSPREQDRFLPIANVSRIMKKALPANAKISKDAKETVQECVSEFISFITGEASDKCQREKRKTINGDDLLWAMTTLGFEDYVDPLKHYLHKFREIEGERAAATSTSTTPDXQETTTTMPAGYADAPGGMMMMGQPMYGSPPPXTQQQHQHQIAMGGRAGFPYLGGGGGSSSSSGFGRKE

SEQ ID NO: 15671 - protein, 121 aa, Arabidopsis thaliana
MCRGLNNEESRRSDGGGCRSLCTRPSVPVRCELCDGDASVFCEADSAFLCRKCDRWVHGANFLAWRHVRRVLCTSCQKLTRRCLVGDHDFHVVLPSVTTVGETTVENRSEQDNHEVPFVFL

SEQ ID NO: 15672 - protein, 377 aa, Blossfeldia liliputana; identical to SEQ ID NO: 8718

SEQ ID NO: 15673 - protein, 152 aa, Casuarina glauca
MALTERQEALLKQSWEVLKQNIPGHSLRLFALIIEAAPESKYVFSFLKDSNEIPENNPKLKAHAAVIFKTICESATELRQKGQAVWDNNTLKRLGSIHLKNKITDPHFEVMKGALLGTIKEAVKENWSDEMGCAWTEAYNQLVATIKAEMKE

SEQ ID NO: 15674 - protein, 297 aa, Vitis vinifera
MSSVIPGWFSEISPMWPGEAHSLKVEKILFQEKSDYQNVMVFQSATYGKVLVLDGVIQLTERDECAYQEMITHLPLCSIPNPKKVLVIGGGDGGVLREVARHSSVEQIDICEIDGMVVDVSKKFFPDVAIGYDDPRVNLHIGDGVAFMKNAPEGTYDAVIVDSSDPIGPAQELFEKPFFASVARALRPGGVVCTQAESIWLHMHIIEDIVTNCRQIFKGSVNYAWTTVPTYPSGVIGFMLCSTEGPAVDFKHPVNPIDANESACKSSRPLKFYNSEIHAAAFCLPSFAKKVIDSKTT

SEQ ID NO: 15675 - protein, 496 aa, Staphylococcus aureus subsp. aureus COL
MDDKQHTSSSDDERAEIATSNQDQETNSSKRVHLKRWQFISILIGTILITAVITVVAYIFINQKISGLNKTDQSNLNKIENVYKILNSDYYKKQDSDKLSKAAIDGMVKELKDPYSEYLTKEQTKSFNEGVSGDFVGIGAEMQKKNDQIMVTSPMKGSPAERAGIRPKDVITKVNGKSIKGKALDEVVKDVRGKENTEVTLTVQRGSEEKDVKIKREKIHVKSVEYKKKGKVGVITINKFQNDTSGELKDAVLKAHKDGLKKIVLDLRNNPGGLLDEAVKMANIFIDKGKTVVKLEKGKDTEAIQTSNDALKEAKDMDISILVNEGSASASEVFTGALKDYNKAKVYGSKTFGKGVVQTTREFKDGSLLKYTEMKWLTPDGHYIHGKGIKPDVTIDTPKYQSLNVIPNTKTFKVGDDDKNIKTIKIGLSALGYKVDNESTQFDKALENQVKAFQQANKLEVTGEFNKETNNKFTELLVEKANKHDDVLDKLINILK

SEQ ID NO: 15676 - protein, 428 aa, Arabidopsis thaliana
MEHQGWSFEENYSLSTNRRSIRPQDELVELLWRDGQVVLQSQTHREQTQTQKQDHHEEALRSSTFLEDQETVSWIQYPPDEDPFEPDDFSSHFFSTMDPLQRPTSETVKPKSSPEPPQVMVKPKACPDPPPQVMPPPKFRLTNSSSGIRETEMEQYSVTTVGPSHCGSNPSQNDLDVSMSHDRSKNIEEKLNPNASSSSGGSSGCSFGKDIKEMASGRCITTDRKRKRINHTDESVSLSDAIGNKSNQRSGSNRRSRAAEVHNLSERRRRDRINERMKALQELIPHCSKTDKASILDEAIDYLKSLQLQLQVMWMGSGMAAAAASAPMMFPGVQPQQFIRQIQSPVQLPRFPVMDQSAIQNNPGLVCQNPVQNQIISDRFARYIGGFPHMQAATQPMEMLRFSSPAGQQSQQPSSVPTKTTDGSRLDH

SEQ ID NO: 15677 - protein, 496 aa, Microcystis aeruginosa PCC 7806
MKLQELLANITPVSPISSPIASITEITGISTNSHACQPGDLFIGLPGTRVDGGEFWRSALETGALAALISPAAAAKFPPPEDACVIVVADLVTATAAIAAKFYHYPALTLKLIGVTGTNGKTTTTHLIEYFLSQAGIPTALFGTLYTRWQGFQETANHTTPFANELQASLAKAVSAGNEIAVMEVSSHALAQGRVQGCTFPVTVFTNLTRDHLDYHLDMEDYFAAKAKLFSPDYLQGKAIINLDDAYGQRLAASLSPQQVLTYSVCDARADFYTKDLHYQSTGVEGVMVTPQGEIAFASPLVGQYNLANLLAAVAAVLECGVDLETVIGQIPQFSGVPGRMERVSIAPDQDISVIVDYAHTPDSLENVLKATRPFISGRMICVFGCGGDRDRTKRPLMGKIAAELADLAIVTSDNPRTEAPERILEDIIAGIPPEITVQVISDRALAIDTAIQTAQPGDGVIIAGKGHEDYQILGTEKIHFDDREQARAALMKGKK

SEQ ID NO: 15678 - protein, 476 aa, Oryza sativa Indica Group
MAGSGRPPAAQKKILQSLRPPLPFAASSRSPFAAPNDYHRFPSGGAAAAAASGSGGIGAGGAGGGGGDIEEGLVIRTPQKRKAPEESDVAESSDCMITSPGFTVSPMLTPVSGKAVKTSKSKTKNNKAGPQTPTSNVGSPLNPPTPVGTCRYDSSLGLLTKKFINLLKQAPDGILDLNNAAETLEVQKRRIYDITNVLEGIGLIEKTLKNRIRWKGLDDSGVELDNGLSALQAEVENLSLKEQALDERISDMREKLRGLTEDENNQRWLYVTEDDIKGLPCFQNETLIAIKAPHGTTLEVPDPDEAGDYLQRRYRIVLRSTMGPIDVYLVSQFDEKFEDLGGGATPSGHANVPKHQPTEVFNTTNAGVGQCSNSVAVDNNIQHSQTIPQDPSASHDFGGMTRIIPSDIDTDADYWLISEGDVSITDMWKTAPDVQWDEGLDTDVFLSEDVRTPSSHNQQPSAVGGPQMQVSDMHKP

SEQ ID NO: 15679 - protein, 375 aa, Nicotiana tabacum
MEVISTNTNGSTIFKNGAIPMNGHQNGTSEHLNGYQNGTSKHQNGHQNGTFEHRNGHQNGTSEQQNGTISHDNGNELLGSSDSIKPGWFSEFSALWPGEAFSLKVEKLLFQGKSDYQDVMLFESATYGKVLTLDGAIQHTENGGFPYTEMIVHLPLGSIPNPKKVLIIGGGIGFTLFEMLRYPSIEKIDIVEIDDVVVDVSRKFFPYLAANFNDPRVTLVLGDGAAFVKAAQAGYYDAIIVDSSDPIGPAKDLFERPFFEAVAKALRPGGVVCTQAESIWLHMHIIKQIIANCRQVFKGSVNYAWTTVPTYPTGVIGYMLCSTEGPEVDFKNPVNPIDKETTQVKSKLGPLKFYNSDIHKAAFILPSFARSMIES

SEQ ID NO: 15680 - protein, 141 aa, Zea mays
  misc_feature (74)..(74): Xaa can be any naturally occurring amino acid
  misc_feature (91)..(91): Xaa can be any naturally occurring amino acid
  misc_feature (100)..(100): Xaa can be any naturally occurring amino acid
  misc_feature (102)..(103): Xaa can be any naturally occurring amino acid
  misc_feature (124)..(124): Xaa can be any naturally occurring amino acid
MASSMLSSAAVVTSPAQATMVAPFTGLKSSAAFPVTRKANNDITSIASNGGRVSCMKVWPPVGKKKFETLSLPXLTLPKLNWVKEVDYLLXHKWIPLCEXRXXSTDLCTVSTEAPRNTTMPGTXTWGKASLGPDALTLLQG

SEQ ID NO: 15681 - protein, 147 aa, Zea mays
  misc_feature (118)..(118): Xaa can be any naturally occurring amino acid
MHISFFWQFTGKDHERPERNHFGQDGHVLDLSFFEICDPEFSKIKESGNVWASITDLEPKLLAHQKKAFEFIWKNLAGSLQLEEMDGSTSRGGCAVAHTPEAGKTLLLILFLVSYLKXSHPRSRPLVLIGMLMESIVSRAWSPLMIW

SEQ ID NO: 15682 - protein, 161 aa, Pseudomonas aeruginosa PAO1
MSDSLLSIPCTTIKGEQKTLADFGGKALLVVNTASKCGFTPQYQGLEALWEKYRERGLVVLGFPCNQFGKQEPGDEGEISQFCELNYGVSFPLFRKIEVNGAGAHPLFVSLKKRAPGLLGSQGIKWNFTKFLIGRDGQVVKRYAPTTKPEELSSAIEALLE

SEQ ID NO: 15683 - protein, 544 aa, Populus tomentosa
MDLNVSSIGSRLQMLTTSDHASVVSMNLFVALLCVCIVIGHLLEENRWMNESITALIIGLCTGVVILLISGGKSSHLLAFSEDLFFIYLLPPIIFNAGFQVKKKQFFRNFMTIMLFGAVGTLISCFIISVGAMQFFKKLDIGPLDIGDYLAIGAIFAATDSVCTLQVLNQDETPLLYSLVFGEGVVNDATSVVLFNAIQSFDLTNINAAIAWDFARNFFYLFLASTLPGVVTGLISAYIIRRLYFGRHSTDREVALMMLMAYLSYMLAELFYLSGILTVFFCGIVTSHYTWHNVTESSRVTTKHAFATLSFVAETFIFLYVGMDALDIEKWRFVSHSPGTSVAVSSILLGLVMVGRAAFVFPLSFLSNLAKKSPNEKISFKQQFIIWWAGLMRGAVSMALAYNKFTSAGHTHLRGNAIMITSTITVVLFSTVLFGLMTKPFIKILLPHPKRQSRSMAISSDPTTPKSFTIPLLGEGQDSLDDLGGHDIDHPSSIRALLTTPTHNVHHYWRQFDDAFMRPMFGGRGFVPFVPGSPTEHNPPNQWH

SEQ ID NO: 15684 - protein, 124 aa, Glycine max
IFVVHQNETGQTHAPLAHQLSLPNTSAEIAAIEKFLQFSDSVPCKIRAKRGCATHPRSIAERVRRTKISERMRKLQDLVPNMDKQTNTADMLDLAVDYIKDLQKQVQTLSDCHAKCTCSHEKQQ

SEQ ID NO: 15685 - protein, 196 aa, Tephrosia villosa; identical to SEQ ID NO: 8729

SEQ ID NO: 15686 - protein, 276 aa, Glycine max
  misc_feature (116)..(116): Xaa can be any naturally occurring amino acid
MIEPTVTSSSGGSSQLRRRSTGIGRTCSLSTRDHGQKRKGTEEEALEEQSEDTELKSADGNKASQRTRSSRRNRAAEVHNQSERRRRDRINEKMRTLQQLIPNSNKTDKASMLEEXIEYLKSLQFQLQVMWMGGGMTPVMFPGIQHYMSQMGMGMGAPSLPSIHNPMQLPKVPHDQAMSVPQMPNQNLMCQNQVLGAFNYQTHMQNPCLPEQYAPYMGYHFMRSASQPMNVFRYGSQAVQHSQTMIAPGNNSSGPMSGTANIDDAVSGKAGSSTFN

SEQ ID NO: 15687 - protein, 573 aa, Coprinopsis cinerea okayama7#130
MEFLPQPNVPLPHLPDDLTLPQFILDAEHPTKPKRNEDIPWLIDDETGRRLGGAELKRRTLGLSNALHLRYGIGRDDVVLVYSRNHTDYPVAIWATQQLGGVISGANPDFSKQELVYQIQEAKARLLIAHPQSFDTALAAARETGIPDQNVILFDVPGVQPPSTRQTVEGLVQYGLSQPISFTELKLRPGEGKTKLAFLSFSSGTTGRPKAVAIQHHSVIVNIIQWAVHNKVNDDYAPWSEQRFRPGDVATAVLPFYHIYGLVLNLHALLHAGMSVVVTARFNIDSMMKSIAKYRITHLYLVPPMVVQFCKYPGINESPIRKQIRLVFCGAAPLTHELNAQMFELFPNAQIGQGYGMTESGPLTMAFPISQKRGVPGSSGHLLPGTVARVVKFDGTLAGYDEPGELWIKTPAITLGYANNEEATRETFIDGWVRTGDEVVIDKAGEEIMKVRGFQVAPAELEGCLLEHPDVSNACVVGIPDDYSGEVPLAFVALSPSAATRAKDPMEAERIKASITKHVADQKVHYKRLAGGVEFIAQIPVSPSGKLLRRVLRDQAKTLAANRSKPNGRTAKL

SEQ ID NO: 15688 - protein, 562 aa, Gemmata obscuriglobus UQM 2246
MTAWASIRRLLAAGTLAFAAFAIPLPASGAPEPRPVRPSKPTPTQLRELAEKAEKTGDWEAAFNNYCLLFVADRSALDVREKLNTALRHTQQLRRHRDPAFQQFVTGMPLDGGLDLLAEVFQKLPGMYADRDKATAQNLWAHAIRELDRAFGSPAFKQAFLDNPRSDKVDQFRAQLREHWARRPIADHKEARSGMRRLIAVAQDHFTLKAPAALAVEAASGACSGLDEYTVFLTPATGTEANAVPDLAAAGLYLGAIHDAVVIEGVTPNSWFALTYPHVRRGDRVVRANNRTIDPVTLPAVAGALRAPIEGAHHLDLRGAEDDAKIQVRIPVTIPSVYGTRMLPDKPVGYTRIGHFQASTPRDLDEALNALKTAGARAAVIDLRGNHGGSFLAAVETARRLLPTGLIVTTQGQVGEVANRAFSSVTGMAAHDVPIVLLIDAETASAAEVLAAALKDNNRATLVGVPSFGKGSVQYPLRLVTLDDVEPGSGKSGKAPKAGTVRVTIARLIAPTSGPITGTGVGPHLVEADPVLQLELAAEKAEELGHMPPGTPLPSPGAPMSP

SEQ ID NO: 15689 - protein, 109 aa, Escherichia coli
NGVNLFAGDKYAGLSEQALYYIGGVIKHAKAINALANPTTNSYKRLVPGYEAPVMLAYSARNRSASIRIPVVSSPKARRIEVRFPDPAANPYLCFAALLMAGLDGIKNK

SEQ ID NO: 15690 - protein, 430 aa, Coprinopsis cinerea okayama7#130
MLSFFENKTPLPAVPDDITLSHFMLDYRHEIQPERPSSVACLVDASSSRKLYLDELKHRTTSLASTLQYIYGIGSEDVVLIASPNHVDYPVVIWAVHQIGGIVTCTNPQFTAEELSYQIGICKPSLIVVHSGNLKAMLIASSMAGLASNGRVVLMDDAEPFECDNRTAPPIFPTLSGLVHEGAARSAPLVPYTMQQGEAKDKVAFFCWSSGTTGNPKAVAISHYAIMCNIIQMAVHNGLRGHPDQMGSPRSWHPGDIALGDVAGLVIALHLSLFSAMSVVVIPKYELRSMVASIQQYSISHLLLVPPQAIALSKHSFLSDRSVDSHVKYILIGAAPVSPHVQQSLVKLFPRAQIGQAYGLTEMTTTVALVSSCQRRGPLGSAGRLLPGIKARVLKSDGRLAAHGERGELFVKGLEKPSSMGGFPPLITVV

SEQ ID NO: 15691 - protein, 473 aa, Xylella fastidiosa Temecula1
MVLLSFSLSAKNPSGVVMSPPVEEMEMPESNDVNVPLDEIRRFVSVYNAIKQAYVDPVNDRKLMHSAVRGLLSDLDPHSTYFDKEDADAFDEQTSGVYDGIGVELQEQSDNTLKVIAPIDDTPAARAGLRPGDLIVAINGKPLANVDAMKPLRGAPGSQVTLTIVRDKNGKPFDMTIKRETIHIASVRSRMLEPGYGYIRISVFQADTGNDFHKHLGQLKQQAGGKLRGLLLDLRSNPGGLLTAAVQVADALLDKGNIVSTRGRISASDTRFDATLGDLLDGLPLVVLVDAGSASASEVLVGALSDNHRARVIGSCTFGKGSVQTLLPLDNGDSVKLTTARYYTPSGRSIQARGIVPDLLLKPDGVGAADLSGSGIDRSEAGLPGHLRGTDEGVPGCTSSDPLPGDTPIMTALLELKQPGSAVQAKKAIPVKVVSDVKSATKSPLSVFGKDRAVKRVPVVSPTSEQVDGQPSK

SEQ ID NO: 15692 - protein, 308 aa, Abies firma
DGATGKTYCFAEVELISRKVAAGLVNLGLEQGQVVMLLLQNCVEFAFVFMGAALRGAIVTTANPFYKPGEIAKQAKAAGARIIVTQAAYVEKLADLQSDDVIVITIDGAPKDGCKHISVLTEADETQCPSVQIQPDDVVALPYSSGTTGLPKGVMLTHKSQVSSVAQQVDGENPNLYFHSEDVIMCALPLFRIYSLNSVLLCALRAGAATLIMQKFNLMSFLELIQRYKVTVAPIVPPIVLDITKSPVVSQYDVSSVRLIISGSAPLGKELEDALRDLFPQAIFGQGYGMTEAGPVLAMNLAFAKEPF

SEQ ID NO: 15693 - protein, 535 aa, Robinia pseudoacacia
MAFEISSVVSKLQMLSTSDHASVVSMNLFVALLCACIVIGHLLEENRWMNESITALLIGVCTGVVILLFSGGKSSHILVFSEDLFFIYLLPPIIFNAGFQVKKKKFFVNFMTIMMFGAIGTLISCTVITLGVTQVFKRLDIGPLEIGDYLAIGAIFAATDSVCTLQVLNQDETPLLYSLVFGEGDVNDATSVVLFNAIQSFDLNQIDPSIALHFLGNFLYLFITSTLLGVLTGLLSAYVIKKLYIGRHSTDREVALMMLMAYLSYMLAELTYLSGILTVFFCGIVMSHYTWHNVTESSRITTKHAFATLSFVAEIFIFLYVGMDALDIEKWRFVSDSPGTSVAASSVLLGLILVGRAAFVFPLSFLSNLAKKSSSDKIDHLVGWSYERCCLNGTCLYQFTMSGHTQLRCNAFMITSTITVVLVSTVVFGLMTKPLTRLLLPHPKVTTSMISTDPSTPKSVIVPLLGNAQDSEADLDGHEIHRPSSLRALLSTPTHTVHRLWRKFDDSFMRPVFGGRGFVPVEPVSPTERNGQQWH

SEQ ID NO: 15694 - protein, 583 aa, Synechococcus sp. PCC 7335
MTYPSVLFINCTLKQSPEVSNTDALWRCVAHFYCQQGCQIRSLRTADLQILSGTTLDEGTGDDFPQVLSQIQQADILILGTPLIWGNRTSECQRLIERLYGTLSAQVDAATGQPILYGKVFGLVAVGDQDSCGQGGAIAHTCQDFSRLGCIHPPHNWVTWFRPIDTEADFIEAEGKHAVSVNKAAKVLVENSIALLEMLRNEPLSTNLHAATQTAKKLSQAATVETGTFILPKTITTKDSPSQNEISYRHVTKRIWTVMQAGAQRGFKFKVVSLEDRTFLAERAGKGFIYKIYPGHFSFRIRYQDYDAEQLKSHKLSLLAQQGLAVPISYGTFKSAVDIPDDLPSPIVAKPESGSLSQNVFPNLKTPEQLQQAAATIEASGDVIKLESHISGRDYRVLVINHQYAGCVERRPANVVGDGRRTIRELFHLRNQEPGRGDRYETHTTIHKLVFDRTSRQRLESAGYSLETVLLEGEVFYLQEKITASTGSDYIDCSDQLHKSIAEDCVAFSHRFKTLTLGFDVITTDITRPLTEVGGAFNEYNFLPYVDLHENCNIGKKRSVCALIWDYVEANADRIVTERFDPF

SEQ ID NO: 15695 - protein, 158 aa, Arabidopsis thaliana; identical to SEQ ID NO: 13571

SEQ ID NO: 15696 - protein, 377 aa, Maihuenia patagonica; identical to SEQ ID NO: 8746

SEQ ID NO: 15697 - protein, 665 aa, Dichelobacter nodosus VCS1703A
MQLTANLLSKYHYRAQTQHEQLLDEISASVIDDYLHALDYSRIIFLQSDIEEFAHFRQSLRQNTRIGDLSAAITIFERYRERNIALNHWTLERLKQPFDLNTTQTITYPRDVYENRRAPWRKTLEEVHDFQEKRLTDELIRLVMSGRNEEKAVEMLVKRYQSVEKRLNQMTSDDVFDMYMNTIANNFDPHTNYLSPDNSEDFDINMSLALEGIGATLSYKDDKITIRELLPGGPAYKSGKLKINDQIIAVAQGKDGEMEDIVGMRLDKAVRLIRGKKGTLVRLLIEPANAAANLHEVTIERDRVKLEDQAAQAFVETLSENGTETKIGVIRLPSFYMDFQGAREGEKEYRSTSRDVERLLKELKAENVSAIIIDLRNDGGGSLYEAIRTVGLFIDQGPVVMVSDINGNVNVEKDKDAGAIYDGPLAVMINSASASASEIFAAAIQDYKRGLIIGTNSFGKGTVQTIIDLNRFVPDTAPKLGEVKFTIAMFHRINGSSTQKKGVQPDIAFPTIRALEEMGESKNPHALDWKAIPPADYVLYNNITDREIATLQQNHESRMLSLPVLNRFTDYIKRLGAENERNVWSLNVDVRRQQYDAWKKYTETYEYDQQDAIPPLNADAKRKKDVAERNAVADEEDKERFIPDIELYEALHVLKDFTQLRHSSH

SEQ ID NO: 15698 - protein, 455 aa, Nocardioides sp. JS614
MGSSPDSLCRMGKQEDFVLRALEERDVRFVRLWFTDVLGFLKSVAVAPAELDGAFSEGIGFDGSAIEGFARVYEADMLAMPDPSTFQILPWRGEGPSTARMFCDIMMPDGSSSYADPRHVLKRTLGKAADQGFTFYTHPEIEFYLFKDTPEAGADPEPVDRSGYFDHTATSSGADFRREAITMLESMGISVEFSHHEGGPGQQEIDLRYADALTTADNVMTFRTVIREVALGQGVWATFMPKPFTTHPGSGMHTHVSLFEGDRNAFFEAGAEYQLSKTGRQFIAGVLRHANEISVVTNQWVNSYKRLMFGGEAPSYICWGHNNRSAMIRVPMYKPNKGQSTRIELRTIDAACNPYLAFAVVLAAGMKGIAEGYDLPREAEDDVWALTERERQSLGIEPLPKSLSEAIAVAEHSELLAETLGEHVFDYFLRNKRAEWEEYRGQVSAFERDRMLPVL

SEQ ID NO: 15699 - protein, 1320 aa, Yarrowia lipolytica CLIB122
MSLDDEESEEDDEDSEEDDYAPTKKAKKSSSSRRKGGRNKSSAREPSPDYQNLRFSSRNAKVVNYNIDHDDDEFLEDEDEDALQDAYGDAAANDTYDYATTTSTEAVDMVLDHRRKEGDDDSQITDLFDAKRHLEFYIKWQNYSHLHNTWETYDSLAGFKGIKRVDNYIKLNVLEYAELQRDASPEDIEAMELRREREQEEYAEYKLVERIIASDRVAVDNGATQLQYLVKWKRLNYSDATWEDAEEIAKIAEDEVERFQDRLNSKINPSQSAVYPANSRPPFEKLTEQPGFIKGGELRDFQLTGINWMAFLWSRNENGILADEMGLGKTVQTVAFLSWLVYARKQHGPHLVVVPLSTVPAWQETFEFWAPGINYLAYLGNTESRKALRDHEFYNKTGNKKPKFNVLLTTYEYILKDRAELGSIKWQYLAVDEAHRLKNAESALYESLKEFRVANRLLITGTPLQNNIKELAALVDFLMPGKLTIDLEINFENPDEEQEGYIRELHKRLQPFILRRLKKDVEKSLPSKTERILRVEMSDMQQDYYKNIISKNYTALNAGATGGHQMSLLNIMTELKKASNHPYLFPTAESKFLSLAENGASRENVFRGMIMTSGKMVLLDKLLTQLKKDGHRVLIFSQMVRMLDILGDYLQIKGYQFQRLDGTVPSATRRIAIDHYNAPDSNDFVFLLSTRAGGLGINLMTADTVIIFDSDWNPQADLQAMARAHRIGQKNHVMVYRFVSKDTVEEQVLERARKKMILEYAIISLGITDKGSSNNKKTEPSTSELSEILKFGAGNMFKANDNQDKLENMNLDDVLNHAEDHITTPDLGESHLGGEEFLKQFEVTDYKADVDWDDIIPANELAKIKADDLRRKDEEYVKEQMDLMNRRRAASQRASTAALESSDENEESGGRRVVKRKKEDKFLNEREIRGLYRTILRYGDVSVMWDKLFNDGTLPQRKSDLIKEAYFDLIDQSKREVEEREKQIKEEAEAAAAAAAKAAASRGGGDTALDEKKPSNTKKAVLFTFQGVKNINAELLISRPADMKLIRSQVTDTFKFDEPLKSVHGWNCEWDEDCDARLLIGTKKYGYGAWTFIRDDPRLKFGDKFYLEEHRVDKKEAREKTGAKVPGAVHLGRRVDYLISVLKGEAVHTNNDGNKKRIAIKERVRKSESPAVSTPQPPKKAAIKRDPSIKRDPSIKRETPKRETPVPKKIPGPPTADDYSDYESMDDEACRTTLKPVKASLKRLKKGEDGLDKKAWLEVLKKELSTVGHHIDSEAQKVSDKKREKTLKHLWAFASFFWPSRVKSNRIRAMYEKVSGAAKK

SEQ ID NO: 15700 - protein, 377 aa, Austrocylindropuntia subulata; identical to SEQ ID NO: 8753

SEQ ID NO: 15701 - protein, 286 aa, Pseudomonas syringae pv. phaseolicola 1448A
MSDYQETLYEGYGQRFRMEKMLHEVRTEHQHLVIFQNPRMGRVMALDGVIQTTEADEFIYHEMLTHVPILAHGAAKRVLIIGGGDGGMLREVAKHLTVEHITMVEIDATVVEMCKEFLPNHSSGAFDDSRLNLVIDDGMRFVATTEEKFDVIISDSTDPIGPGEVLFSENFYQACHRCLNEGGILVTQNGTPFMQLSGVQTTAGRMNGLFADWHFYQAAIPTYIGGAMTFAWGATDKSYRKLPLETLRQRFTGSGIVTRYYNPEVHISAFALPQYVLQAVSKASND

SEQ ID NO: 15702 - protein, 275 aa, Glycine max
  misc_feature (57)..(57): Xaa can be any naturally occurring amino acid
  misc_feature (69)..(69): Xaa can be any naturally occurring amino acid
  misc_feature (132)..(133): Xaa can be any naturally occurring amino acid
  misc_feature (214)..(214): Xaa can be any naturally occurring amino acid
IVQTSRHGKVAIPDGYIQLTENDEFAYQEMLIHLALCSIPNPKKGFCSFFLFLACTXLSYLMKKETFVXTLQVLLVGGGDGGILREISRHSSGEHIDICEIDKMVIHVYKKFFPDIAVGYEDPRMHVHIRDXXAFINSVPEGTYDVVILDAFPAMGHSADVLADKCFLESIAKALRPRGVLLWHTNSEVADTIANCKIFKGSVNYAWATVPAYXAIGFMLCSTEGPPVNFKHPINKLNPEKNGVAKGPPKFYNSEIHATAFFCGQGWLIQQDIHK

SEQ ID NO: 15703 - protein, 608 aa, Geobacillus stearothermophilus
MSKIIGIDLGTTNSCVAVLEGGEPKVIPNPEGNRTTPSVVAFKNGERLVGEVAKRQAITNPNTVISIKRHMGTDYKVEIEGKKYTPQEISAIILQYLKSYAEDYLGEPVTRAVITVPAYFNDAQRQATKDAGRIAGLEVERIINEPTAAALAYGLDKEEDQTILVYDLGGGTFDVSILELGDGVFEVKATAGDNHLGGDDFDQVIIDYLVDQFKQEHGIDLSKDKMALQRLKDAAEKAKKELSGVTQTQISLPFISANENGPLHLETTLTRAKFEELFAHLVERTMGPVRQALQDAGLTPEDIDKIILVGGSTRIPAVQEAIKRELGKEPHKGVNPDEVVAIGAAIQGGVIAGEVKDVVLLDVTPLSLGIETMGGVFTKLIERNTTIPTSKSQIFTTAADNQTTVDIHVLQGERPMAADNKTLGRFQLTGYPPAPRGVPQIEVTFDIDANGIVHVRAKDLGTNKEQSITIKSSSGLSEEEIQRMIKEAEENAEADRKRKEAAELRNEADQLIFTTEKTLKEVEGKVDEAEVKKAREAKDALKAALEKNDLDEIRKKKEALQEAVQQLSIKLYEQAAKQAQNQQAGADGATKKDDNIVDAEFEEVKDDK

SEQ ID NO: 15704 - protein, 642 aa, Chlorella vulgaris
MTTPAIGIDLGTTYSCVGLWQHDRVEIIPNEQGNRTTPSYVAFTDTERLIGDSAKNQVAMNPINTVFDAKRLIGRKFSDPTVQHDISHWPFKVVSGPGDKPMIQVSHKGEEKTFAPEEISSMVLVKMKEIAQAYVGADKEVKKAVVTVPAYFNDSQRQATKDAGVIAGLEVMRIINEPTAAAIAYGLDKKGTTSGEQNVLIFDLGGGTFDVSLLTIEEGIFEVKATAGDTHLGGEDFDNRLVNFFVQEFKRKHRKDISSNPRALRRLRTSCERAKRTLSSSTQASIEIDSLYEGIDFYSSITRARFEELNMDLFRKCMEPVEKVLRDAKMDKGQVNEVVLVGGSTRIPKVQQLLQDFFNGKELCKSINPDEAVAYGAAVQAAILNGETHEKVQDLLLLDVIPLSLGLETAGGVMTVLIARNTTIPTKKEQVFSTYSDDQPGVLIQVYEGERSRTKDNNLLGKFELTGIPPAPRGVPQINVTFDVDANGILNVSAEDKTTGNKNKITITNDKDRLSKDEIERMVQEAEKYKSEDEQARRKVEAKNGLENYAYSMRNTLKDTNIAAKIDASDKERLEKMVEDAIEWLDHNQLAEEEEFEHKRQDLESACNPIIAKLYQGGAPPEAAAADSGAASGPGPKIEEVD

SEQ ID NO: 15705 - protein, 375 aa, Pereskiopsis porteri; identical to SEQ ID NO: 8759

SEQ ID NO: 15706 - protein, 300 aa, Yarrowia lipolytica CLIB122
MTVKQLEHASIKNSWFTEVSDSFPGQGLMLKVEEILHVSQSEFQDVLVFRSTEYGNVLVLDGVVQVSERDEFAYQEMICHVAMMSHECPKRVLVIGGGDGGVLREIVKHESVEAAHLCEIDESVIELSKKYLPNMAVGFDNTKVTVHIRDGFEFIREVARSDEKYDVIITDSSDPDGPAEKFFQREYFQLLHTALNDDGIVITQSSENVWLNFKFVKQLRDICKGVFASVEYCAALLPTYTSGQLGLMVCSKKPTNLKIPKRQWTQEEESSLVRYYNKEIHEASFVLPNWAKHFLEGTSL

SEQ ID NO: 15707 - protein, 473 aa, Exiguobacterium sibiricum 255-15
MKKSTTAVIAVSTFGLGLGAGAVGMLAAGGTDSVATSSSSNATGDWKKIDQVRQMISQNYLEDVTDQELLEGALTGMTEVLDDPYSVYMDESETASFNTNLSSSFEGIGATLEQKGESIVIVSPIKGSPAEKAGIKPGDIILEIDGKSTKGQKTDQAVKKIRGEKGTKVVLMIQRGGQDPMKISIVRDTIPIETVYSKTEKVNGKTIGVLQVTQFSDPTAKEFEKQLAALEEKNIDGLVIDVRGNPGGLLTAVSQMIAPFIPKDTPIFQVEDNKGERTQEFGKAEEKKPYKLVVLEDSGSASASEILAAGLKEGAGAEVVGTKSFGKGIVQSAYDLKDGSDLKLTTNKWLTPDGNWIHKKGVKPTVEVKQPDYFNVTKILTDNKTLASGDYGKPVENAHLVLEAIGFDPKGQDGYFGDTMKQAVERLQKDAKLEVTGKINQVTASEMETRLLKKLEDEKNDVQRIKALEVAAQ

SEQ ID NO: 15708 - protein, 997 aa, Cupriavidus taiwanensis
MPLTTHNASKSPPESASNESPPADWQQALEALRALAGTDPAAGAAGPARRLLWALTLDADGAPGTIEPLEQVRGAKGWGKPRPVPLARIAEDDRLEPWDARVARAIRRDASHNRRYVLDRAMAVMALAGHPGVVLAHAPTQTLEVVEDAPALEAVRSAGRYVLRLFPPVREAPALEALLPAAARQEAEALRQLTLLRDGPHRLRLIRYTPAQFEAARLIGNGLAIPEEGHARLDQTLRALAGQFQVQADAAAGSRTVEAEPRLRAEVAPVGRGISLRLVVTPLGPLGPRLAPGAGRERLMAAVRGETLSTQRDLDAELASVAEVFAALPQLVALSPPGGEYTWSLDDPEDALAVVEALPSLPAVQAVEWPRGKALRVLPADLPQLGVQIESRGAWYRLAGELRVAEGLVLELGKLIDWTAGHAGRFVPIGQGVYVALTQVLRGRLRDLAGVGERVPDGIRVPQMATPWLDDVLAGAGVDPDAHFRARIARLRAAREAEIALPATLAAELRPYQEAGYRWAMTLAASGLGACLADDMGLGKTLQALAVLVARAGGGAALVIAPTSVCGNWAAEARRFAPTLNVHVYAEGERDALLAQAGAHDLVIVSYTLLQQASQEFCAREWHTVVADEAQAFKNAVTRRAQAMFALPSGFRMALTGTPVENRLAELWSVMRFCNPGLLGSLARFNEHFANPIERAGSREARLRLRRMIAPFVLRRTKAQVLDELPPRTELVIRVEPGPVEAAHYEALRRQAQTEAEAALARLDAARKATRDAPAGARVPAQAQHQVRLHVLAQLMRLRRAACDPRLVTPEVAAQLSDQGGEGAKVRAFVELASGLAASGHKTLVFSQFVDFLQLLRQGLERAGLALQYLDGATPAAERTRRVAAFQAGEGDVFLISLKAGGFGLNLTAADYVIVADPWWNPAAEDQAMGRAHRIGQRRPVTVYRLINAGTIEERIVELHRDKRALADGLLEADDDHAAGTGAPLPDVDELVGLLRR

SEQ ID NO: 15709 - protein, 635 aa, Prochlorococcus marinus str. MIT 9301
MGKVVGIDLGTTNSCVAVMEGGKPTVIANAEGFRTTPSVVAYTKNQDQLVGQIAKRQAVMNPENTFYSAKRFVGRRVDEVNEESKEVSYSVEKSGSSVKLKCPILDKQFSPEEVSSQVLRKLADDAGKYLGEKVTQAVITVPAYFNDSQRQATKDAGKIAGLEVLRIVNEPTAAALAYGLDKENEKILVFDLGGGTFDVSVIEAGDGVTEVLSTSGDTHLGGDDFDRCIVDHLANTFKSNEGIDLRQDKQALQRLTEAAEKAKIELSNATQSEINLPFITATPEGPKHLDLNLTRAKFEELAASLIDRCKTPVERAISDAKISTSEIDEVVMVGGSSRIPAVLDLVKKIIGKEPNQTVNPDEVVAVGAAIQGGVLAGEVKDILLLDVTPLSLGVETLGGVMTKMINRNTTVPTKKSETYSTAVDGQTNVEIHVLQGEREMASDNKSLGTFRLDGIPSAPRGVPQIEVTFDIDANGILSVTAKDKGSGKEQSISITGASTLSDNEVEKMVKDAESNASADKEKREKIDLKNQAETLVYQTEKQLGELGDKIDAAAKSKVEEKSNALKEATSKEDFDSMKKLLEELQQELYAVGSSVYQQPGNQAPSPGAAGGPDESDSNEKGGDDVIDADFTETKD

SEQ ID NO: 15710 - protein, 103 aa, Brassica napus
  misc_feature (21)..(21): Xaa can be any naturally occurring amino acid
  misc_feature (33)..(33): Xaa can be any naturally occurring amino acid
  misc_feature (52)..(52): Xaa can be any naturally occurring amino acid
  misc_feature (54)..(56): Xaa can be any naturally occurring amino acid
  misc_feature (62)..(62): Xaa can be any naturally occurring amino acid
  misc_feature (64)..(65): Xaa can be any naturally occurring amino acid
  misc_feature (68)..(69): Xaa can be any naturally occurring amino acid
  misc_feature (74)..(74): Xaa can be any naturally occurring amino acid
  misc_feature (76)..(76): Xaa can be any naturally occurring amino acid
  misc_feature (79)..(82): Xaa can be any naturally occurring amino acid
  misc_feature (85)..(85): Xaa can be any naturally occurring amino acid
MDAVTDLKRPREEDDNAAAAXTACFSSVIPGWXSEMSPMWPGEAHSLKVEKXLXXXKSDYQXRXXVFXXANLWXKXSCXXXXIRXIGSKPRRLSVTDQPTLPL

SEQ ID NO: 15711 - protein, 313 aa, Glycine max
  misc_feature (255)..(255): Xaa can be any naturally occurring amino acid
  misc_feature (258)..(258): Xaa can be any naturally occurring amino acid
  misc_feature (261)..(262): Xaa can be any naturally occurring amino acid
  misc_feature (264)..(264): Xaa can be any naturally occurring amino acid
  misc_feature (269)..(269): Xaa can be any naturally occurring amino acid
  misc_feature (271)..(271): Xaa can be any naturally occurring amino acid
  misc_feature (274)..(275): Xaa can be any naturally occurring amino acid
  misc_feature (281)..(282): Xaa can be any naturally occurring amino acid
  misc_feature (286)..(286): Xaa can be any naturally occurring amino acid
  misc_feature (288)..(288): Xaa can be any naturally occurring amino acid
MASELEISPADARKAPGKEQQAAGVGILLQIMMLVLSFVLGHVLRRKKVYIIPEASASLLIGLIVGILANISDTETNIRAWFNFHEEFFFLFLLPPIIFQSGFSLAPKPFFSNFGAIVTFAIFGTFIASIVTGILVYLGGLLFLMYRLPFVECLMFGALISATDPVTVLSIFQELGTDVNLYALVFGESVLNDAMAISLYRTMSSVRADPSGQNLFMVVVPFLETFVGSMSAGVGVGLISAWLFNYARLDIDNLXNLXSWXXVXFPLSXYXLAXXLGLPGXXSILXTXETFYLLRLGLFDAAYGPLCQPFPSS

SEQ ID NO: 15712 - protein, 400 aa, Physcomitrella patens subsp. patens
MKRRNECEEHHVEMNGWNGYTNSDLSPAPTPTGPRGRGSRAKTVKQTKNGPQTPGPSGIGSPTSSAPTPTSTCRYDSSLGLLTKKFIDLIKQADDGVLDLNKAADTLHVQKRRIYDITNVLEGIGLIEKKLKNRIRWKGLGMVRNAEAKDDAAGLLAEVEDLRIKEKKLDESISEMRERLRSLSEDEHNKQWLYVTEDDIKNLHCFQNETLIAIKAPLGTTLEVPDPDEAVEYPHRRFQILLRSTLGPIDVYLVSRFEGRTEVPMETLPDSQEAGPSSSVDGMSHQENMVMVPEVGYGLSDLVPPVSHESASQAPEPTGSHPDFAGGIMRIAPAEVNTDTDYWLLSDAGVGISDMWRSDPSNAMWDEVVRLNPEFGSENIGSPRPHTPPSNNALEVDPVS

SEQ ID NO: 15713 - protein, 590 aa, Oryza sativa; identical to SEQ ID NO: 15254

SEQ ID NO: 15714 - protein, 682 aa, Shewanella oneidensis MR-1
MMRKLILATSIATVFVGFSAWAVPPTIQISELPTLKQEAQHKVASKRVTDLYTRSHYHRFALDDAFSAQIFDRYLQQLDYRRNVLTQADVDSFKPYINQFDDMLSSGELDPAYKMFDLVQKRRYEGFVYALSLLDKEMDFTAPGDVYDYDREDVAWPKDQAEINELWRQRVKYDALNLKLTGKKWLEIVDILQKRYNNAIKRLTQTNSEDVFQAVMNAFSRSIEPHTSYLSPRNAERFQMEMNLSLEGIGAQLQLEDDYTVIKSLIAGGPAAGSEKLSPEDKIVGVGQEGGEIVDVIGWRLDDVVELIKGPKGSKVVLQILPKKGGSNAKPFNVTLVRDKIRLEDRAATSKIIEPKDGVYANRKVGVIQIPGFYMNLSQDVEKELLKLNEAKVEGVVIDLRGNGGGALTEAVLLTGLFIDMGPVVQVRDADGRVSAHRDNDGKTTYTGPLTVMVDRYSASASEIFAAALQDYDRALIVGESSFGKGTVQQHKSLGRIYDMYEKPIGHVQYTIQKFYRINGGSTQLKGVTPNIAYPSALEPGEYGEAEEKNALPWDKVPMAQYGTLNDITPELVASLEKKHLARIQNSVEFNYINQDIADFKKHHKEKTVSLVESERIASREADEKKVLDRTNERRVANGLAPVKSMEDIKDDVVAPDAFLDETAYITLDMVDAKKLANAGTK

SEQ ID NO: 15715 - protein, 1364 aa, Debaryomyces hansenii
MNISSMLSNDSNTASQDVGGNFDDSQRNNDKGGSQDANSKKMGTGEAEDHANGNASVEGNGIANHGSATNGNTKGTDDSSNVNIVESIIPKPIRPTRSSIESDEEDVGKNYNSIISNDSEHISQRYLENFEDKVNAINKIDQVLIKGNNMRVLNQEEENLNILIRNSGEIAENYIDRVVTEDISSKANILNGKDSVGKEFKWGSTRDMKKRELELEVDNASKADTAAKKGGNKSKQGATKSTPAKKAKAKPKRKPSATDDTSEESQLGKKRKTRAGSVSGASQNDEKSANGKVKLKLTLKDQAEEDSASADAASKVTTKEQKIITKQYDNTFVSIWKDLSRKDGPKVSRLMQQSTQAKMINLKKTSILAAREAKRWQLKNNRNQKDLTTKARRAMREMFNFWKRNERIERELRKKHEKEILDKAKKEEEERESKRQSRKLNFLITQTELYSHFIGKKIKTDEFEGTDSDPNANFKSANHHYDKYSNIDGEGKDFNSIDFDNEDEESLNKAAAVNAQIALEAAKTKAQAFDNDPLKNPDTNGEEMNFQNPTLLGDINISQPDLLKCTLKEYQVKGLNWLANLYEQGINGILADEMGLGKTVQSISVLAYLAETHNIWGPFLVVTPASTLHNWQQEISRFVPEFKVIPYWGNAKDRKVLRKFWDRKNFRYGKDAPFHVLVTSYQLVVADAAYFQKMKWQYMILDEAQAIKSSQSSRWKSLLSFSCRNRLLLTGTPIQNSMQELWALLHFIMPSLFDSHDEFSDWFSKDIESHAQSNTELNEQQLRRLHVILKPFMLRRIKKNVQSELGDKLEIDVFCDLTHRQKKYYQMLTSQISIMDLLDSANNSSDDSAQSLMNLVMQFRKVCNHPDLFERADVKSSFAFGRFAETSSFLRETNELEMSYSTENLIKYNMPRIVYEEILQPTFDNDVGSRKKINNMFNIYHPSNIANDELENFSWLRFVDQSPQEMNNLSKQNIIERAINNREYSDINYERINRLKYTYDEDNESFLPNSKLLLINELQNNHALISNSTYLKELYSIKKKVYEDMVINNMKPAAEPLVKAPPVAVVCDNISFVHDLQDSLFDPKIRSSLMPLPFNRELELLKSSIPITEYPKSNMLPNAINKFIDYSNIRMPSMNRFITESGKLSKLDELLVDLRQNDHRVLIYFQMTKMMDLMEEYLTYRQHKYIRLDGSSKLDDRRDLVHDWQTKPEIFVFLLSTRAGGLGINLTAADTVIFYDSDWNPTIDSQAMDRAHRLGQTRQVTVYRLLTRGTIEERMRDRAKQKEQVQQVVMEGKSAIANKEESGNKKKDVAFLLLGNDDSSAAALNDDSEEKQNLQDSKKSQAKNLEDMYHEGEGEFSGNVTPSL

SEQ ID NO: 15716 - protein, 838 aa, delta proteobacterium MLMS-1
MGRFPLPGPVPGLEGDNWPTQLLLAPPHKGFGPWLVAVAIAIQRLARDPVGRGRVVDISARQIRLALPWQRKPLLVEALNLALNWLNLWLQPAKPAQLQQAKVRFAQWLQKAQAGGLAPNTVCFALAAQQLDIPVANLGGGVIQLGWGAGQRRLQSSFTDQTGVIATRLVRHKYVASHLMAGHGLPVAPAGLAANLEQAVKLAEQLGWPVVVKPVDQDQGVGVCPDIRDKERLERAFKAAAQATTKGVLIEKHLPGEDYRLLVYGDELLLATRRIPGGVVGDGKRSIAGLLERVNADPRRGTEKRSLLIALSLDEEALELLAEQGLNADSIPAAGRLVSLRRTANISTGGTAEDVTAVVHPANRALARRAARLMGLDLAGIDLLISDISRPWYEVNGVICEINAQPGFRPHWLAAGGLDINLEVVKRMVAGRTPRIPTAAITGTNGKSTVGQMLRRIWLTAGRTPGLCTTQGVWLGEDLINIKNLSGQPGGRILLSDPAVEVAIIEVSRKAQHLFGHPCDRYDVAALLNIRDDHIGDLGINSLDEMARFKARVLQRAGRAVVVNGDDPRCLAILESVGCDRRILVSANPQQPAVLSHLAAGGEALLRAEHHGAPWLVLQQGDRATPIMALTELNCTMDGLIAVNEENALFAAALAHAQGLAPERIASGLRLFGNNLQHNPYRYNLHETEKGRILIDYAHNPDGVGRLCEMVRRLPVRGRRLAYCGTVGNRGRRFLEECLPMLAATFEQFVLTCDHNRVTQCPDYQGDNPKEIMLGHFTAGLQKQGIAAARIQQDPDPVAAARLALAQLQPDDLLVMLADPHDVGMGDIMDTMGRVTGI

SEQ ID NO: 15717 - protein, 623 aa, Campylobacter jejuni subsp. jejuni NCTC 11168
MSKVIGIDLGTTNSCVAVYERGESKVIPNKEGKNTTPSVVAFTDKGEVLVGDSAKRQAVTNPEKTIYSIKRIMGLMINEDAAKEAKNRLPYHITERNGACAIEIAGKIYTPQEISAKVLMKLKEDAEAFLGESVTDAVITVPAYFNDAQRKATKEAGTIAGLNVLRIINEPTSAALAYGLDKKDSEKIVVYDLGGGTFDVTVLETGDNVVEVLATGGNAFLGGDDFDNKLIDFLANEFKDETGIDLKNDVMALQRLKEAAENAKKELSSANETEINLPFITADASGPKHLVKKLTRAKFEGMIDSLVAETITKINEVVSDAGLKKDEIKEIVMVGGSTRVPLVQEEVKKAFNKDLNKSVNPDEVVAIGAAIQGAVIKGDVKDVLLLDVTPLSLGIETLGGVMTKIIEKGTTIPTKKEQVFSTAEDNQSAVTINVLQGEREFSRDNKSLGNFNLEGIPPAPRGMPQIEVTFDIDANGILTVSAKDKATGKAQEIKITGSSGLSEEEINNMVKDAELHKEEDKKRKEAVDARNAADSLAHQVEKSLSELGEKVAAADKENIQKALDDLRETLKNQNASKEEIESKMKALSEVSHKLAENMYKKDEPNTANDKKKKDDDVIDAEVE

SEQ ID NO: 15718 - protein, 227 aa, Abies firma
IAKQAKAAGARIIVTQAAYVEKLADLQSDDVIVITIDGVPKDGCKHISVLTEADETHCPSVEIQPDDVVALPYSSGTTGLPKGVMLTHKGLVSSVAQQVDGENPNLYFHSEDVIICVLPLFHVYSLNSVLLCALRAGAATLIMQKFNLTSFLELIQRYKVTIAPIVPPIVLDITKSPIISQYDVSSVRTIMSGAAPLGKELEDALRDLFPQAIFGQGYGMTEAGPVL

SEQ ID NO: 15719 - protein, 476 aa, Borrelia hermsii DAH
MRKKFLVFAYFVLALSISSSVIVESIFAQSDSSKGKMSASSYGQMMMEAFNFIKRNYVEPVDDEAIFEGALKGMFKALNDPYSQYLTKEDLVEISKTTEGNYVGIGVSIVKKNVPVKSDSSISDASYVMIVTAFEEGPAYKAGVKSGDYITAIDGKSTTLMTIEQVGDLLRGKAGTKVKISVLRDKDLKLEFELVREKVDIQTVKHDVINRDVGYIKILSFNPNTNLFFKKAFEKLQSQNIKSLILDLRFNTGGYLQDAIEIADDILAEGIIVSTRARDSKVPMEYKASSSHIVPLDMPIVVLIDKHSASASEVLVGALKDNERVYVIGEKSYGKGVIQRILPFYTGGFKITNSKYYTPSGNSIHNIGIKPDLEIGEREFSETEVLAYRQIFDKKLVENFLNGRKNKKSITEEEIDAFVDKVIKEHSIQNIDKDILGHHVFLQFYQDTHSEMPIYNLHYDKPLRAAYEYLVKETKN

SEQ ID NO: 15720 - protein, 535 aa, Mycobacterium sp. MCS
MDTSDPTSDRWKDHPALAALTLCLALLAATVVLAPAAQRLSVPYPAVMLAFGLALAFIPGVPVLSPNPELILPLVLPPLLFAAARRTSWREFLDNRRPIALLAVALVGVTAVAVGATLHALVPTVPLIAAIALGAAVAPPDAVAATAVAQKLGIPRRLRTILEGEGLSNDATSLVLYEVAVAGTMTGAFSAWGAGEALGLAVVLGVLVGLAIAVATRWLINKLPAHPAGSGLVLVVPFAAYAAADAVHGSGVLAVVTVALAMSRYGDTQSSQTRLATGTTWEIVELLLTGSAFAFVGLQMRAVADSIDMTFWELLQQGLIITLVVIVVRFLWIFPVATIDERMHRRKAHVAEPIGWREMTVSSWAGMRGVVTLAAVLALPPQFPERERLVFYAFVVIVVTLLLQGLSLPTVVRRLGVRASPHEEDDAVQALIRRARDAGFERLDEIRAREEADPEVIEHARDNAERMWQSVGFAPPDAESHHAHTDHAMTLNALKDEILAAAREAVVKARSESGTDPTVVDRVLRRLDTRGSQPE

SEQ ID NO: 15721 - protein, 625 aa, Mycobacterium tuberculosis H37Rv
MARAVGIDLGTTNSVVSVLEGGDPVVVANSEGSRTTPSIVAFARNGEVLVGQPAKNQAVTNVDRTVRSVKRHMGSDWSIEIDGKKYTAPEISARILMKLKRDAEAYLGEDITDAVITTPAYFNDAQRQATKDAGQIAGLNVLRIVNEPTAAALAYGLDKGEKEQRILVFDLGGGTFDVSLLEIGEGVVEVRATSGDNHLGGDDWDQRVVDWLVDKFKGTSGIDLTKDKMAMQRLREAAEKAKIELSSSQSTSINLPYITVDADKNPLFLDEQLTRAEFQRITQDLLDRTRKPFQSVIADTGISVSEIDHVVLVGGSTRMPAVTDLVKELTGGKEPNKGVNPDEVVAVGAALQAGVLKGEVKDVLLLDVTPLSLGIETKGGVMTRLIERNTTIPTKRSETFTTADDNQPSVQIQVYQGEREIAAHNKLLGSFELTGIPPAPRGIPQIEVTFDIDANGIVHVTAKDKGTGKENTIRIQEGSGLSKEDIDRMIKDAEAHAEEDRKRREEADVRNQAETLVYQTEKFVKEQREAEGGSKVPEDTLNKVDAAVAEAKAALGGSDISAIKSAMEKLGQESQALGQAIYEAAQAASQATGAAHPGGEPGGAHPGSADDVVDAEVVDDGREAK

SEQ ID NO: 15722 - protein, 224 aa, Abies firma
QAKAAGARIIVTQAAYVEKLADLQSDDVIVITIDGVPKDGCKHISVLTEADETHCPSVEIQPDDVVALPYSSGTTGLPKGVMLTHKSQVSSVAQQVDGENPNLYFHSEDVIMCALPLFHIYSLNSVLLCALRAGAATLIMQKFNLMSFLELIQRYKVTVAPIVPPIVLDITKSPVVSQYDVSSVRLIISGSAPLGKELEDALRDLFPQAIFGQGYGMTEAGPVL

SEQ ID NO: 15723 - protein, 735 aa, Saccharomyces cerevisiae
MGEFKPPLPQGAGYAIVLGLGAVFAGMMVLTTYLLKRYQKEIITAEEFTTAGRSVKTRLSGCSVVSSWIWCSTLLTSSTKEYADGIFGGYAYAAGACFQIIAFAILAIKTKQMAPNAHTYLELVRTRYGKIGHGCYLFYAIATNILVTSMLLTSGSAVFSDLTGMNTIASCFLLPVGVVVYTLFGGIKATFLTDYMHTCVIIIIVLVFAFKVYATSDVLGSPGKVYDLVREAAKRHPVDGNYQGEYMTMTSKSAGILLIINLIGNFGTVFLDNGYWNKAISASPAASLKAYAIGGLAWFAVPSLISLTMGLACLAVETSPNFPTYPDPLTSFQANSGLVLPAAAIAIMGKGGAVASLLMIFMAVTSAMSAELIAVSSVFTYDIYREYIDPRASGKKLIYTSHVACIFFGLAMSGFSVGLYYGGISMGYIYEMMGIIISSAVLPVVLTLCSKDMNLVAAVVSPILGTGLAIMSWLVCTKSLYKELTVDTTFMDYPMLTGNLVALLSPAIFIPILTYVFKPQNFDWEKMKDITRVDETAELVQADPDIQLYDAEANDKEQEEETNSLVSDSEKNDVRVNNEKLIEPNLGVVISNAIFQEDDTQLQNELDEEQRELARGLKIAYFLCVFFALAFLVVWPMPMYGSKYIFSKKFFTGWVVVMIIWLFFSAFAVCIYPLWEGRHGIYTTLRGLYWDLSGQTYKLREWQNSNPQDLHVVTSQISARAHRQSSHFGQVDEII

SEQ ID NO: 15724 - protein, 76 aa, Glycine max
  misc_feature (2)..(2): Xaa can be any naturally occurring amino acid
SXTPGWISDITAMMPAQAHSSAVEERLLEGMSQYQNVVGFHGSTYGNVLDMEGGIQLTITGQCADHEMITHLPLVH

SEQ ID NO: 15725 - protein, 459 aa, Vitis vinifera
MSGPRAPTRSAPPPPSSGQILRPMKRHLPFTSTKPPFVPPDDYHRFSSADAHGVANHEPEGIVVKSPQLKRKSAMDDNEVGSSEWTASPGYADAGNSPFRTPVSGKGGRIYSKSKVSKGNVCGPQTPVSNAGSPSTLTPAGNCRYDSSLGLLTKKFINLIKHAEDGILDLNKAAETLEVQKRRIYDITNVLEGIGLIEKKLKNRIRWKGLDVSRPGEVDDDVTILQAEVENLSLEERRLDDHIREMQEKLRDLSEDENNQKWLFVTEDDIKGLPCFQVTPHGTTLEVPDPDEAVDYPQRRYRIVLRSTMGPIDVYLVSQFEEKFEEMNGTPPPLSFPLASSSGSNENPSTEVVIADSSGKELEPQDGYQMCSDLTASQEFIGGIMKIVPDVDSDADYWLRSDAEVSITDMWKTDSYVEWNGVDMLNAEFGMADVSTPLPQTPPSGLTEGPSTAVNPTHR

SEQ ID NO: 15726 - protein, 160 aa, Glycine max
MEPMDIVGKSKEDASLPKATMTKIIKEMLPPDVRVARDAQDLLIECCVEFINLVSSESNEVCNREDKRTIAPEHVLKALQVLGFGEYIEEVYAAYEQHKLETMQDSLRGGGGGGKWNNGAEMTEEEALAEQQRMFAEARARMNGGAIASKQPDADQSLDS

SEQ ID NO: 15727 - protein, 377 aa, Grahamia bracteata; identical to SEQ ID NO: 8781

SEQ ID NO: 15728 - protein, 377 aa, Maihuenia poeppigii; identical to SEQ ID NO: 8785

SEQ ID NO: 15729 - protein, 613 aa, Candida albicans
MADGVFQGAIGIDLGTTYSCVATYDSAVEIIANEQGNRVTPSFVAFTSEERLIGDAAKNQAALNPKNTVFDAKRLIGRAFDDESVQKDIKSWPFKVVESNGQPLIEVEYLDETKTFSPQEISSMVLTKMKEIAEAKIGKKVEKAVVTVPAYFNDAQRQATKDAGAIAGLNVLRIINEPTAAAIAYGLGAGKSEKERHVLIFDLGGGTFDVSLLNITGGVFTVKATAGDTHLGGQDFDTNLLEHFKKEFQKKTGNDISSDARALRRLRTACERAKRSLSSGTQTTVEIDSLFDGEDFSANITRARFEDINSALFKSTLEPVEQVLEDAKISKSQVDEVVLVGGSTRIPKVQKLLSDFFDGKQLEKSINPDEAVAYGAAVQGAILTGQSTNDDTKDLLLLDVIPLSLGVAMQGNVLAPVVPRNTTVPTIKRRTFTTVADHQTTVQFPVYQGERVNCSENTLLGEFDLKNIPPMQAGEPVLEAIFEVDANGILKVTAVEKSTGRSANITISNSIGRLSTEEIEKMISDAEKFKSSDDAFAKRHEQKQKLEAYVASVESTVTDPVLSAKLKKSAKDKIEAALSDALQTLEIEESSADDYRKAELALKRAVTKGMATR

SEQ ID NO: 15730 - protein, 466 aa, Amycolatopsis mediterranei
MPTTPDDIQRLIADEDVEVIDVQFCDLPGVMQHFTVPAKAFTEEAYEEGLAFDGSSVRGFQSIHESDMLLLPDAATARIDPFRKAKTLALNFFVHDPFTREAYSRDPRNIARKAEQYIAEYGVADNVYFGPEAEFYIFDSIRFDSAEHASFHEIDSVEGWWNTGADEVGGNQGYKTKFKGGYFPVPPVDHFADLRDDIVRNLQGSGFEIERAHHEVGTAGQTEINYKFNTLLHAADDLQLFKYIVKNTVFAAGKTATFMPKPLAGDNGSGMHCHQSLWKDGQPLFHDESGYAGLSDTARHYIGGLLKHAPSLLAFTNPTVNSYHRLVPGFEAPVSLVYSQRNRSACVRIPITGNNPKAKRAEFRCPDSSGNPYLAFSAMMMAGLDGIRNKIEPPEPIDKDLYELPPEEAKDVKLVPGDLGTVLNTLEGGVFTPDVIETWISYKRENEIDPLRLRPHPYEFSLYYDV

SEQ ID NO: 15731 - protein, 527 aa, Agrobacterium tumefaciens str. C58
MDGTHLFELVIAMFLAIIVLHYIAHRLGLPPSVALLAGGGTLAFVPGLPTISVNPELVLVIFLPPLLLDGAWSISVDRLKRHVFGIASLAIGAVLFTTVIVAVVVHFLMPSLPWAACAALGAIVSPPDAVSARAVLERIRIPRRLQILLEGESLLNDASGLVLFRFAVAAAAGGVFSTVDALGEFFFLAVGGAAVGAFVGLLWVKTVRHLGDEYLMIAATAVLSWAAYILAEQAQTSGVIATVTAGLIASWHQHTVLSAATRMRGTSFWNVLVFLMEAMVFILIGLSLRDVVERGGGFGSIASSMALPALAVLVTLVAARFVWIFASDLVIRLFHGLKLAHSKPLGPGAVTALGWAGMRGVVTLALALSLPEDFPGRDFILVMAFAVIMGTVLIQGTTLGRIIAWAGLGGIEPERAPMTMSEAEASMAQVQFTTVQGLAYDENGELIHPQLLKRYEHRLAASVKYAESTEKYSPLLHAHFDVVLKAVAAGRKELIRLRREGQIDDETLRELEHDLDLEELTAISAKA

SEQ ID NO: 15732 - protein, 110 aa, Glycine max
  misc_feature (78)..(78): Xaa can be any naturally occurring amino acid
ALAHQLSLPNTSAEMAAIEKFLQLSDSVPCKIRAKRGCATHPRSIAERVRRTKISERMRKLQDLVPNMDKQTNTADMXDLAVEYIKDLQNQVQILSDNRAKCTCSHKKQQ

SEQ ID NO: 15733 - protein, 117 aa, Arabidopsis thaliana; identical to SEQ ID NO: 14960

SEQ ID NO: 15734 - protein, 556 aa, Kineococcus radiotolerans SRS30216
MSGRGRRADAGSRPDTGPVLPQLLLVLVGALALTIVSVRRGWQAPLVLAVCGAAVSFVPGLPRLELPPDVILSVVLPPLLFSTTTGFSWRGFVRRWRSITNLGVLLVVVTTAAVGAVAAYAVPWLGLGTALVLAAVVSPPDAVTAVAIGGRLGLPTRVLTTLKGESLVNDAAALTLFSTATAAVAGTETLVENPVLFFLVEAAGGILLGAVLGRLVHLVRTRLHNPANMTALAVLTPFTAYAVAEALETSGVLAVVAAGFALSRRSVRTVYATRIAEREVWNLLDVLLEAFVFAYLGLQFRFLLADALDAGTSATGLLGAGLVVLAAVVAVRAVWVLGGGLLMRRVLHGRFSPGGRHYTAREDLVIAWTGMRGVVTLAAAAGIPATTSTGEPFPHRADLQVLAFGVAVGTLLLQGSTLPALIRRLHLEAPEEREWLDEQRRRARELSSRTARAELRAAHDEAGDPVQRHVAELVLERAEQLAALRAADDADQEAASEGRRAAETGVALRRRAIRAQRAALVAAQEEGRIAEEAVAEALEQLDLDEASLSHRSSPRL

SEQ ID NO: 15735 - protein, 160 aa, Arabidopsis thaliana
  misc_feature (132)..(132): Xaa can be any naturally occurring amino acid
MSNAFSIMPTLYKKAGCQFQLTTMAPSSPAGDGGESGGSVREQDRYLPIANISRIMKKALPPNGKIGKDAKDTVQECVSEFISFITSEASDKCQKEKRKTVNGDDLLWAMATLGFEDYLEPLKIYLARYREXGDNKGSGKSGDGSNRDAGGGVSGEEMPV

SEQ ID NO: 15736 - protein, 204 aa, Xanthobacter autotrophicus Py2
MARAPRQGIGGCASLRTDENSSRQDPMSQALFDIPLKRIDGTAATLGDFRGKVLLVVNVASKCGLTPQYAALEKLYEARHGDGLEILGFPANDFGAQEPGTESEIASFCSLTYGVTFPMFEKISVVGATRHPLYDALVAARPETTDEEGRRPSGRSASPSDVSWNFEKFVVGRDGRVIARFSPRVTPDDPRLTKALDAALEAKA

SEQ ID NO: 15737 - protein, 636 aa, Desulfovibrio vulgaris subsp. vulgaris str. Hildenborough
MGKIIGIDLGTTNSCVYVMEGKDPKCITNPEGGRTTPSVVAFTDKERLVGDIAKRQAVTNPERTVFAVKRLMGRRGDAPEVGRWKEHSPYRIVAGANGDAAVEVQGRPYSAPEISAMILGKLKADAEAYLGETVTEAVITVPAYFNDAQRQATKDAGRIAGLDVKRIINEPTAASLAYGFDRKANEKIAVFDLGGGTFDISILEVGDNVVEVRATNGDTFLGGEDFDQRIISYLVDEFRRENGGIDLARDRMALQRLKEAAEKAKKDLSTSMETEVNLPFITADQTGPKHLMMKLSRAKLEKLVEDLVERTVEPCRKALADAGLTAAQIDEVVLVGGMTRMPLVQKRVSEFFGKEPNRSVNPDEVVAMGAAIQGGILAGDVKDVLLLDVTPLSLGIETLGGVFTRLIERNTTIPTRKSQTFTTAADNQPSVSIHVLQGERPMASDNMTLGRFELTGIPPAMRGVPQIEVSFDIDANGIVNVAAKDLGTGKEQSIRITASSGLSEDEIQRLVKEAEAHADDDKKKQELIEARNQADGLIYGTEKSIRDLGDKLDAALKADIETKVTALRGLLESEDVDAIKKASDELAQASHKLAEQLYKQQAQAGGPEAGAQPEGDAGARKQDDDVVDADYTEVKK

SEQ ID NO: 15738 - protein, 490 aa, Bacillus halodurans C-125
MDFHTDTIILLAGLLFIVGVITAKFSTRLGVPALVLFILVGMLVGSDGLGLIHFDFSQAHFAQLIGIFALVIILFEGGLQTKWKTVQSVAVPSLSLATFGVLITSTLVAVAAKYVLGVSWLEAYLFGAIVGSTDAAAVFAVLKEQNIKDRLATTLEAESGTNDPMAVFLTLSLIELITIGSMNPLHLFGSFLWQMGAGLILGFGLGKLGSYSINKINLDSSGLYPVFALAFALLTYSVTAMIGASGLLAVYVAALVIGNQDLTYRHSIFRFNEGFAWMMQMLMFIILGLLVFPNQLFEASIFIKGILLSLILMLVARPVAVFLTTIKMRFDWKEKLFLSWAGLRGAVPIVLATFPMTAGLENSPLFFNVVFFVVLTSALIQGSTIAHFANKLQLTGPQKTTPLHSLELVSIGKANAEIVELEMKQDTPVIGKTLEEINLPKDVLVNAIIRDEQLITPYGKTTIQADDILYVLVSKKKKRQLKELFQAKES

SEQ ID NO: 15739 - protein, 180 aa, Arabidopsis thaliana
  misc_feature (35)..(35): Xaa can be any naturally occurring amino acid
  misc_feature (87)..(87): Xaa can be any naturally occurring amino acid
  misc_feature (96)..(96): Xaa can be any naturally occurring amino acid
  misc_feature (101)..(101): Xaa can be any naturally occurring amino acid
  misc_feature (144)..(144): Xaa can be any naturally occurring amino acid
MASSMLSSATMTASPDQATMNTPFDGLKSSDAFHXTRKANNDITSITSNDERVNCMQVWPPIGKKKFETLSYLPDLTDSELPKECDXLIRNKWIPXDEFEXEHGFVYRGHAKSPGYYEGRYWTMRKLHLFGSTDSARVLEEVQXCNNEYHNACIMIIGLDNTRQVQCIMIIAYKPPSFTG

SEQ ID NO: 15740 - protein, 874 aa, Synechocystis sp. PCC 6308
MKILKTQTLRGPNYWSIRRQKLIQMRLDLEDVAEKPSNLIPGFYEGLVKILPSLVEHFCSRDHRGGFLERVQEGTYMGHIVEHIALELQELAGMPVGFGRTRETSTPGIYNVVFEYVYEEAGRYAGRVAVRLCNSIITTGAYGLDELAQDLSDLKDLRANSALGPSTETIIKEAEARQIPWMLLSARAMVQLGYGANQQRIQATLSNKTGILGVELACDKEGTKTTLAEAGIPVPRGTVIYYADELADAIADVGGYPIVLKPLDGNHGRGITIDINSQQEAEEAYDLASAASKTRSVIVERYYKGNDHRVLVINGKLVAVSERIPAHVTGNGSSTIEELIQETNEHPDRGDGHDNVLTRISIDRTSLGVLKRQGFEMDTVLKKGEVAYLRATANLSTGGIAIDRTDEIHPQNIWIAERVAKIIGLDIAGIDVVTPDITKPLTEVDGVIVEVNAAPGFRMHVAPSQGLPRNVAAPVIDMLFPDNHPSRIPILAVTGTNGKTTTTRLLAHIYRQTGKVVGYTSTDGIYLGDYMVEKGDNTGPVSAGVILRDPTVEVAVLECARGGILRSGLAFESCDVGVVLNVAEDHLGLGDIDTIEQMAKVKGVIAESVNADGYAVLNADDPLVAQMAKNVKGKIAYFSMSKDNPIIIDHLRRNGMAAVYENGYLSIFEGEWTLRIEKAENIPVTMKAMAPFMIANALAASLAAFVHGIDIELIRQGVRSFNPGANQTPGRMNLFDMKDFSVLIDYAHNPAGYLAVGSFVKNWKGDRLGVIGGPGDRRDEDLMLLGKIASQIFDHIIIKEDDDNRGRDRGTVADLIAKGIVAENPNASYDDILDETEAIETGLKKVDKGGLVVIFPESVTGSIEMIEKYHLSSE

SEQ ID NO: 15741 - protein, 164 aa, Gemmata obscuriglobus UQM 2246
MSTTAASVYDISVKAIDGQQTTLEQYRGKVLLVVNVASKCGFTGQYKGLEELQRKYKDRGLVVLGFPCNQFMGQEPGNEEEIKSFCSLKYDVTFPMFAKVDVNGGAAHPLYQHLKDAARGTLGTRGIKWNFTKFLVDRNGNVVSRRGPTTTPQQLEAEIEKLLG

SEQ ID NO: 15742 - protein, 470 aa, Bordetella pertussis Tohama I
MASPKDVLKQIADNEVKFVDFRFTDTLGREHHVSVPTSAVDEDKLESGQAFDGSSIPGWKGIEASDMLLIPDLDTANLDPFREEPTLILSCDVVEPSDLKGYDRDPRSLAKRAEAYLKSSGLGDTAYFGPEPEFFVFDGVTWNTDMSGTFVKIKSEEAPWSSGLEFEGGNMGHRPGPKGGYFPVPPVDSFQDMRSEMCLLLEQMGVPVEVHHHEVAAPGQLEIGTKFSTLVQRADWNQVMKYVIHNVAHVYGKTATFMPKPIVGDNGSGMHVHQSIWKDGQNLFAGNGYAGLSEFALYYIGGIIKHARALNAITNPGTNSYKRLVPHFEAPVKLAYSARNRSASIRIPYVGNPKARRIETRFPDPLANPYLAFSALMMAGLDGVQNKIHPGDPADKNLYDLPPEEDAKIPTVCASLEEALAALDKDREFLTRGGVFSNDMLDAYIELKMGEVTRLRMTTHPVEFDMYYSL

SEQ ID NO: 15743 - protein, 236 aa, Lotus japonicus
MLCTRILFFSRTIRFAAPLSSSSLHSFVFSNSPITLSRSYHSSLLTTTSFPIKSLVSTSTTPFSFTLRPDHTMAAPTSVYDFTVKDARGNDVNLGDYKGKVLLIVNVASQCGLTNSNYTELSQLYEKYKSKGLEILGFPCNQFGAQEPGDNEQIQEFVCTRFKAEFPVFDKVDVNGDSAAPLYKYLKSSKGGLFGDKIKWNFSKFLVDKEGNVVERYAPTTSPLSIEKDLVKLLGA

SEQ ID NO: 15744 - protein, 493 aa, Vibrio salmonicida LFI1238
MMQLSELLLPWCELNQVVEISSMTLDSRKVTTGCLFVAIKGHAVDGRQFIPVAIKQGASAVLAQSDEVNKTGTISFLDQTPIIYLDALSIKLSAVAGRFYHAEQRKMQLVGITGTNGKTTISQIIAQWATLLGKPAGVMGTTGNGLLTDLKPALNTTGSPIEIQQTLTDLENIGAKLTALEISSHGLVQGRVNALNFDAAVFTNLSRDHLDYHGDMANYAEAKKLLFTSHSPKYSIINADDTVGASWLKELPNAVGVSLNEGNLSFHSGKKVFATSVIYSTDGIQISLNSDWGTADLSVPLIGAFNANNILVAFATLLSLGYDITELADAAPKLTAVIGRMELFSSEGNAKVVVDYAHTPDALDKALQALRVHCEGKLWCIFGCGGDRDTGKRPMMASIAEQQADVIILSDDNPRSEDPSLITKDMLAGLNQPDIAHVIHQRFDACQFALSQASKHDIILLAGKGHEEYQVLATETIHYSDRETAQKLLGLSS

SEQ ID NO: 15745 - protein, 231 aa, Abies holophylla
IAKQAKAAGARIIVTQAAYVEKLADLQSDDVIVITIDGVPKDGCKHISVLTEADETQCPSVEIQPDDVVALPYSSGTTGLPKGVMLTHKGLVSSVAQQVDGENPNLYFHSEDVIICVLPLFHIYSLNSVLLCALRAGAATLIMQKFNLTSFLELIQRYKVTIAPIVPPIVLDITKSPIISQYDVSSVRTIMSGAAPLGKDLEDALRDLFPQAIFGQGYGMTEAGPVLVMNL

SEQ ID NO: 15746 - protein, 211 aa, Vitis vinifera
METGGFHGYRKLSKTTSGMKLTEPNEKQPESNQMSNNSAMEDTECTVREQDRFMPIANVIRIMRKILPPHAKISDDAKETIQECVSEYISFITGEANERCQREQRKTITAEDVLWAMSKLGFDDYMEPLTMYLHRYRELEGDRATIRSEPVVKRNVEFGGLSVAAFAPAFHMGHHQGFFGAAAMGGYLKEAPNAGTSQAAVASLEPYAQYK

SEQ ID NO: 15747 - protein, 722 aa, marine gamma proteobacterium HTCC2080
MLLTTSTRLRWLLLIALLSASKAWALAPEAIQGETLGEMINALQNRHYEGKSYDDALSAAHLDAYIDTLDPQKMFFTLDDVKSFQVYRTALDDAGREGNLDPAFTIFTKYQTNLKARLEAILAELPTAVPEFDYSLSEYLPIDGDDVAWAASSSELDDRWRKRLKNQALSLKLADKSVDEIAPTLIKRYSNQLNRLQQYNERDVFAIYANALTELYDPHTSYFSPRRAENFDINMSLSFDGIGAVLQVDDEYTKVVRLVPAGPADKQGDLSPSDLIIGVGQGAEGPIEDVVGWRLDEVVDLIRGPRETTVRLEVIPGKGKTDQRQVVAIERNKVKLEEQAAQSELLELEDVDGASRKVGVIEIPAFYIDFAALRRGDEDYKSTTRDVKKLIEELQAQGAEALVIDLRNNGGGSLQEANDLTGLFIEYGPTVQIRSAERKVWRDGKRRRSTYYQGPVAVLINRLSASASEIFAGAIQDYGRGIVLGDRSFGKGTVQTLLGMPEGQLKVTESKFYRISGDSTQHRGVVPDIDFPSLFDPDEIGESALDNALDWDQISPVRHREYNLFSSLLPTINERHESRIEKDPDYIYLVDQVLMATETRGLKTLPLNEKERVALRDSQEQKALEIENKRREAQGLEPLDSLREETAEATSDAAEDEDVAVDDNEALNTLGNVAEDAEAVSEADEAEDEAGDVLLIEAGRILADVLALTGASNNANSATAQR

SEQ ID NO: 15748 - protein, 380 aa, Cryptomeria japonica
FSIKGNGIGNGNGHCNGYSNGHGHCINGYSNGISASVSSNGVSHLPYSNGNTVHHSNSNGHIHTSPSFGDGRRRCFWYEEEIEDDLRWCFALNRILHTGVSEYQDIALIDTRPFGKALVIDGKMQSTEVDEFIYHESLVHPALVYHSQPKSAFIMGGGEGSTAREILRHKCVKKVVMCDIDKEVVDFCKKYLVVNREAFSNSRLELVINDARTELQSRQERFDVIIGDLADPVEGGPCYQLYTKSFYELVIKPKLNHQGIFVTQAGPAGVLTHTQVFSSIYNTLRQVFKHVMPYSAHVPSFADTWGWVMASDHPLTLEAGEIDDRIKQRIKGELQFLDGQTFLVAATLNKSVRKSLSKETHVYTEETARFIHGHGKASYQ

SEQ ID NO: 15749 - protein, 159 aa, Chromobacterium violaceum ATCC 12472
MTTLYDFSAQRADGAEQALSAYEGRVALLVNTASECGYTRQYAGLQELQDYFAGQAFVVLGFPCNQFGGQEPGGEDEIVDFCRSRFGVSFPLFAKLQVNGDGAHPLWRWLTQADSDRPHPIKWNFTKFLVDGRGRVVKRYEPAVEPHELVDDIKALLAR

SEQ ID NO: 15750 - protein, 207 aa, Vitis vinifera; identical to SEQ ID NO: 439

SEQ ID NO: 15751 - protein, 70 aa, Glycine max
AAHTHTYKIEKILFHGKSQYRELLVFETSRQGKGAILDGHIQLTEKDEFAYKETRTHLALWSHTKKKKVL

SEQ ID NO: 15752 - protein, 173 aa, Prunus avium
MASQSGSGSKSIHDFTVKDAKGKDVDLSIYKGKVLLIVNVASQCGLTNSNYTELSQLYEKYKNQGLEILAFPCNQFGAQEPGSNDEIVEFACTRFKAEYPIFDKVDVNGDNAAPIYKFLKSSKGGLFGDSIKWNFSKFLVDKKGMLLTVCPTLLSYIRRVRTVGLQAPSVIRN

SEQ ID NO: 15753 - protein, 461 aa, uncultured epsilon proteobacterium
MLFKQLFTIISSIKIKHGYIMKNKKFITLGFASASIAIALLFSTNVFASSANSEATKEASRLQSLAKFTKVISIVEQYNVDDITIEELMDKALEGMLSNLDAHSNYLKQKDYKQLKVQTDGEFGGLGITVGVRDGALTVIAPIEGTPADKAGLQSADIILKINDESTLNMTIDEAVAIMRGKVGEPIDLMIVREGELKPLTIHIVRGIITIQSVYAKTIEDDILYIRVTSFDKKVAEDVTKEIKKRKATTKGIILDLRNNPGGLLDQAVDLVDIFVDKGDIVSQKGRKEADAKTYTASKNKTVTNVPLVVLINGGSASASEIVSGSLQDHKRAILLGQNTFGKGSVQVVLPITEDEAIKLTIARYYLPSGRTIQAVGVKPDIEVFPGEVNTKKNAFSIKESDLKKHLEEELVKVDGNETIKEEKEALEEAKKGIITPEMMNKDIQLKEGVDIIKALIIIKG

SEQ ID NO: 15754 - protein, 218 aa, Vitis vinifera; identical to SEQ ID NO: 449

SEQ ID NO: 15755 - protein, 401 aa, Shewanella sp. MR-4
MKQLIRNIVCLGLGLSLGLSISLSSQENAKSYQSDFDYPLLQDVLETVETYYVKTVSKDELVQAAIKGIFEHLDPYSSFLNHQELLDLKDSNRGEYFGFGFEVASDKDHISIIAPFANSPAEQAGIQAGDIIIKLNNTPTTETNLADILNQIKQHSINNQSIRLTLKHRNDAVEFEVSLKPSTITIQSVASKLLDGNIGYIRLSSFQENSTEDMVRSLSQWQNAHLTGLILDLRNNPGGLLDQAIKIADLFLAKGRIVSTSGRFFDANSDYYASPQTMLTNVPMLVLINKGSASASEVLAAALQENGRAKLLGETSFGKGTVQSLIPILNDGNAIKLTIAQYNTPRGENIHDIGIVPDIKVTTETGSNQKNMAIIDAISARTDVSQDSLVTSAIAWIQHHD

SEQ ID NO: 15756 - protein, 563 aa, Clostridium tetani E88
MKKLNNKNNIIKFILYLLFITLINSNNVVFANNNNEHDNYHKLDQQFSELLKDNTYKEYNDGLIEQIKYLINNVYYYDVPESISNAKSVEEIMKNIRDPYTQYYTGEEFKKLQEGINNVFSGIGIYYKKHEDGIIITDMVPGSSAEYAGLKIGDIVIQLNREEIKGLSVEKIDKYIKGEEGTKVILDVKRGTQIVTFILQRRAVEIPTVDSKILDENIGYVHIKSFGNKTPELFKKRIENLLNSNIENLVVDLRGNLGGYTSSAYEIAGYFIGNKTVTIMKDKKGNETLYRGSSQELLRDIPIIFITDKNTASASEILTSAVKDYERAFIIGNKTYGKGVQQTSFILTDESFLKLTTHEFFSPFGSKINKIGVKPNFDTKSIDSLKVAELLFSGGKHREYNSQLVKLSIDNREFIIDLKKGKDRNYRSAFKYIIESSDGENIEIGNKDNWVKFDKNKISNDFYFENLKTMDSLTKSSKDTELIVKFNKDIRPRTANELNVKLVEGAFFQEIQLEYTIDKGNEIHIKCKEDLSTDKEYYLLVEGIESIDGMPLKNGSIARVYVY

SEQ ID NO: 15757 - protein, 444 aa, Prochlorococcus marinus str. MIT 9215
MKIRKLLKKKFVILFATTFSGLFLNNFAEATVLNNSYKEVIDHVWQIVYRDFLDSSGKFQKSNWINLRKEVLSKTYSDSNEAYDAIRDMLSNLDDSYTRFLEPKEFNQMRIDTSGELTGVGIQIVKDKESDDLIIISPIEGTPAFDAGIKARDKILSIDNISTEGMNIEEAVKLIRGQRGTKVKLEILRDSQSFFKTLSREKIEIKSVSSKVNQTKNGLLIGYVRIKQFNANASKETRDAIKDLETKKVAGYILDLRSNPGGLLESSIDISRHFINKGVIVSTVSKDGLKETKKGNGQALTKKPLVVLVNEGSASASEIVSGAIKDNKRGKLVGKKTFGKGLVQSMRTLVDGSGLTVTVAKYLTPNGTDINKSGIIPDIEVKMNINPILQREIGTRKDKQYKVGEKELVNIIKRNNEISEFNPNTTNLNAFLKINKKDKVFALN

SEQ ID NO: 15758 - protein, 417 aa, Paulinella chromatophora
MIIVISLGNVTSADALNDAQQLVVESWRLVNQSYIDPTRFNEVHWKQLRQKALEKKIENSDQAYNAIEEMLMPLGDPYTRLLRPNDYIALKSNTQGSVSGVGIQLGMRDDHMIVIAPIEGSPAAEAGLLSGTEIVEINGECVKNLGLQTAAARLRGYTGTQVILKVIPPFHNDLFDQTVNANSMEGGGNARPTKEFILERRQIDLQPVCSKLLKNNYQTLGYLRITQFSESVPEQVRTSLADLEKHGMKGLILDLRNNSGGLVSAGLEVANQFLSNGSIVETVNREGISEVIAALKEQLFSGTMITIVNRGTASAAEILAGALQDNNRSILVGGQTFGKGLIQSLISLGDNSGLAITVARYTTPAGRDIQTLGITPDYLLASPEPLIPGDEKTDYWLKTSGYLLEKLLMKMPTVETR

SEQ ID NO: 15759 - protein, 439 aa, Thermus thermophilus HB8
MKRRAWFMVGLGALLALVYAQLPRPQAETFLQNPNGQALLEVYQRIQQDYLEPLSKEKLDKLLEGAIGGMVQALEDPFTSYSPPQRSTLRQEDLRGEFFGIGATLSAANPDGTGARIEGVMKGLPAQRAGLRAGDVILEVDGEDVTKLPLLDIVAKIRGREGTKVTLKVRREGVPAPLVFELVRERVEIISVSTAKVGDVGYVALETFANFKVEDQLKRAIEELKAQGVKKLIFDLRDNGGGLLDQGCAVASAFLKEGPIVYTRTKNLTRVWCEATGQTLWDGPMVVLVNGNSASASEIVAGALQDYGRAKVIGEKTFGKGVGQTPYTLANGGELTLVTFEWLTPKRRSINKEGITPDIVVKDTRFPTPFSLQGAGAPPGAEIAVTLNGKTVKVKADAEGKFSYAEPQRQRPLPEDRGQAVLDLENDAILKRALEELNR

SEQ ID NO: 15760 - protein, 229 aa, Arabidopsis thaliana; identical to SEQ ID NO: 15627

SEQ ID NO: 15761 - protein, 1142 aa, Triticum aestivum
METGEAGSPSPDDAVLFFGVALVLGIASRHLLRGTRVPYTVALLVLGVALGGLEYGTKHGLGKLGAGIRIWSAINPDLLLAVFLPALLFESSFSMEVHQIKKCMAQMVLLAVPGVVISTVLLGAAVKLTFPYDWNWKTSFLFSGLLSATDPVAVVALLKDLGASKKLSTIIEGESLMNDGTAIVVYQLFYRMVLGKTFDAGSIIKFLSQVSLGAVALGLAFGIASVLWLGFIFNDTIIEISLTLAVSYIAFFTAQDALEVSGVLAVMTLGMFYAAFAKTAFKGDSQQSLHHFWEMVAYIANTLIFILSGVVIADGVLQDNIHFERHGTSWGFLVLLYVFVQISRAVVVGVLYPLLRHFGYGMDIKEATVLVWSGLRGAVALSLSLSVKRASDSVQTYLKPEVGTMFVFFTGGIVFLTLILNGSTTQFLLHLLGLGKLSATKLRVLKYTQYEMLNKALEAFGDLRDDEELGPVDWVNVKKYITCLNNLEDEQAHPHDVPDKDDHIHTMNLKDTRVRLLNGVQAAYWGMLEEGRITQSTANILMRSVDEAMDLVSSQSLCDWKGLRSNVHFPNYYRFLQMSRLPRRLVTYFTVERLELGCYICAAFLRAHRIARRQLHDFLGDSEIARIVIDESTAVGEEAKKFLEDVRVTFPQVLRALKTRQVTYAVLTHLSEYIQDLGKTGLLEEKEIVHLDDALQTDLKKLKRNPPLVKMPRVRELLNTHPLVGALSADVRDPLLSNTKETIKVHGTILYREGSRRTGIWLVSTGIVKWTSRRLCTRHSLDPILSHGSTLGLYEALTGKPYICDIITESVVHCFFIEAEKIEQLRQSDPSIEDFMWQESALVIARILLPQIFEKMAMREMRVLISERSSMNVYIKGEAIELGHNNVGILLEGFLKTENRTLITAPAVLLPSNTDLNLFGLQSSAMNQIDYCYTAPSYQVEARARAIIFEIGRLDIEADLQRSASLLSSTLGPSRTQSKEHVGLLRWPESFRRSSGPGNASLAEIRGQPGSFSARALQVSMYGSMTDGMHRARRQPRLAHVEGNQKHSVSYPKVPSRAADTRPLLSVRSEGSNAMKRKSAPAPAIAPALAPFPPPLAEGQQRRAVGEDDDSSDESVGEEVIVRVDSPSMLSFNPPSGPPRGS

SEQ ID NO: 15762 - protein, 134 aa, Vibrio vulnificus
MRSTGLADTVLVGPEPEFFLFDDVKFATDMSGSFFKIDDVEAAWNTGSDYENGNKGHRPGVKGGYFPVAPVDSSQDLGSAMCLVMEEMGLVVEAHHHEVATAGQNEIATRFNTLTTKADEIQIYKYVVHNVAHA

SEQ ID NO: 15763 - protein, 224 aa, Abies holophylla
QAKAAGARIIVTQAAYVEKLADLQSDDVIVITIDGGPKDGCKHISVLTEADETQCPSVQIQPDDVVALPYSSGTTGLPKGVMLTHKGQVSSVAQQVDGENPNLYFHSEDVIMCTLPLFHIYSLNSVLLCALRAGAATLIMQKFNLMSFLELIQRYKVTVAPIVPPIVLDITKSHVVSQYDVSSVRLIISGSAPLGKEQEDALRDLFPQAIFGQGYGMTEAGPVL

SEQ ID NO: 15764 - protein, 138 aa, Arabidopsis thaliana
  misc_feature (103)..(103): Xaa can be any naturally occurring amino acid
  misc_feature (109)..(109): Xaa can be any naturally occurring amino acid
  misc_feature (122)..(123): Xaa can be any naturally occurring amino acid
  misc_feature (129)..(129): Xaa can be any naturally occurring amino acid
  misc_feature (132)..(132): Xaa can be any naturally occurring amino acid
  misc_feature (135)..(135): Xaa can be any naturally occurring amino acid
MASSMLSSATYWLPLRAQATMVAPFNGLKSSAAFPATRKANNDITSITSNGGRVNCMQVWPPIGKKKFETLSYLPDLTDSELAKEVDYLIRNKWIPCFEFELXTDLCTXVSTGNLTRVTMIXXTGKCGXFPXSVXPIR

SEQ ID NO: 15765 - protein, 229 aa, Abies beshanzuensis
IAKQAKAAGARIIVTQAAYVEKLADLQSDDVIVITIDGAPKDGCKLISVLTEADETQCPSVQIQPDDVVALPYSSGTTGLPKGVMLTHKGQVSSVAQQVDGENPNLYFHSEDVIMCTLPLFHIYSLNSVLLCALRAGAATLIMQKFNLMSFLELIQRYKVTVAPIVPPIVLDITKSHVVSQYDVSSVRLIISGSAPLGKELEDALRDLFPQAIFGQGYGMTEAGPVLAM

SEQ ID NO: 15766 - protein, 514 aa, Rhodopirellula baltica SH 1
MIHRAPLHLLYLNVLVIATCGLIYELLAGTLASYLLGDSVTQFSLIIGVYLSALGFGAWLSQYVTTKLARVFIEVELALALLGGFSTPLLFLAFPMIEWFQWLLFGSVIVIGTLVGLELPLLMRILKEHLEFEELISRVLAFDYLGALFASLLFPIFLVPRLGLNRTAIVFGLLNALVGLWGTYLLRPLLAKKGLDGLRGRAFLVIGLLIAGFIKADSITSLAEENTLGGRIVYADTSPYQRIAVTRNEKGFQLYLNGHLQFNSVDEYRYHEALVHPVMSVCKDARRVLVLGGGDGLAVREILRYDHVESVTLVDLDPAMTRLATQFEPLAELNGRSLERDRVTVVHRDAFLWVGEGDEQFDAVVIDFPDPGNYSIGKLYSSRFYNLLRERMTEDAGLAIQCTSPLVAPKSYWCILRTMQASGFDVTPYHAPVPTFGIWGFALARIAEDPESDSDWRLPPELSAKVAGLRYLTPSTMAGLFDLPADQQPRDVPPNRLNDQILVRFYDEEWGQNQ

SEQ ID NO: 15767 - protein, 225 aa, Arabidopsis thaliana; identical to SEQ ID NO: 12758

SEQ ID NO: 15768 - protein, 152 aa, Glycine max
MRKCELCNSPAKLFCESDQASLCWECDAKVHSANFLVTKHPRILLCHVCQSLTAWHGTGPKFVPTMSVCNTCVNNNSETCSQQNHVEDHDDNHDDGTGEDHVENHDGGVSEDDEENQVVPWTSTPPPPASTSSNSVTTSSTRFSNVEEGGSD

SEQ ID NO: 15769 - protein, 512 aa, Rubrobacter xylanophilus DSM 9941
MLRGSFEGVSARCAPLATLPGMAVEREELRRVLGVEVPAGVGRVCGVTHDSREVEPGFAFVAVPGFKRDGVEFVPEALRRGAALVVAEREVPEAPVAVVPDARAALAALACAFHGHPSRRMEVYGVTGTNGKTTTCYALHAVLAGAFGEERCGLMTTAEVVAGGERRPAVRTTPEATEVQAALAGMRERGVERVAMEVSSHGIALRRVEGIRFAGAVFTNLSRDHLDLHGTMEEYYRTKRRLFLWARGPKLSNADDAWGRRLAGEVEGVRTFGSAVGADYRIEGVRPSGAGTRFVLRRGEEALRIEVPLFGDYNVQNAAGAAALALELGVPGETVARALRGMPQVPGRFERVGGPGFEVIVDYAHTDVGLEAVLRVAREVARRGRPGRVICVFGAAGERDGAKRPLMGRVASRLADRGIITTDDAYSEDPEKIAREVAAGVEDGRLEIVLDRREAIRRALSEAGEGDVVVVAGKGHERVQHLPWGDVPFHDATVIREILEERDPCRERTRER

SEQ ID NO: 15770 - protein, 413 aa, Crocosphaera watsonii WH 8501
MRKRAFWVTLLVIFSLLFNCFAWTPNADAFTENQKLLLQSWRLVNQSYLDDTFNHQNWWLLRQDLLKRSLDNREETYDTIEEMLATLDEPFTRLLRPEQYHNLQVSTAGQLSGVGLQININPDTGNLEVVSPIEGSPADAAGIKARDRILKIDDVDTTTLTLDEAATRMRGPRGTKVYLTILPHKETSDIREVEITRNRISLSPVTASLNQPTPNLPIGYIRLNQFSANAAEEMANAINNLEKEGAEGYILDLRNNPGGLLQAGIEIARLWMDQGTIVYTVNRQGVQDSFSALGTALTDDPLVLLVNQGTASASEILAGALKDNRRATLVGEKTFGKGLIQSLFELPDGAGLAVTVAKYETPNHNDIHKLGIEPDKVVNQEPISYRQIATKDDVQYEAAVELLTGNSVLANAG

SEQ ID NO: 15771 - protein, 188 aa, Brassica napus
MQSKSGGRGNEEEVNQQQPMMMYPDPWWKNNSFGGVLPQERPSGSESNDVHSPSQDGGPCKDSQAATSPPPPPDNNGEEGNDPTASMDDEQVVQPPELVGHYIACVPNPYQDAYYGGMMGAYGHHQPLGFRPYPGMARERTALPLDTTQEPVYVNAKQYEGDLRRKEARAKAELERKVIHRKPYLHES

SEQ ID NO: 15772 - protein, 342 aa, Solanum lycopersicum
MADECAAFMKGTELPVKRPREEEAETEMEAANNSNNGCEKEESSPYISSVLPGWFSEISPLWPGEAHSLKVEKILFQGKSDYQNVLVFQSSTYGKVLVLDGVIQLTERDECAYQEMITHLPLCSIPNPKKVLVIGGGDGGVLREVSRHSSVEQIDICEIDKMVVEVAKQFFPDVAVGYEDPRVNLHIGDGVAFLKNVPAGTYDAVIVDSSDPIGPAQELFEKPFFESIAKALRPGGVVSTQAESIWLHMHIIEEIVANCRQIFKGSVNYAWTTVPTYPSGMIGFMLCSTEGPAVDFKNPINPIDDESPAKSIEPLKFYNSEIHQASFCLPSFAKRVIETKGK

SEQ ID NO: 15773 - protein, 522 aa, Frankia sp. EAN1pec
MATDTPRATSADSPLPARTRPLLLAAVAVCAACGLVYELVLLTLSTSLAGGGITQTSLIVAGFVAALGAGALLVKPFLGHAAAAFVAVETLLGILGGLSAVTLYVTFSFYATSGPVLVLGTALLGTLVGAELPLLVTLLQTGRTDVDARASGRLLADLNAADYAGALVGGLVWPFVLLPTAGMIRGAALTGLVNLTAATVVATLLLRRWLTRRALVTALGALLAAATLLGTLLLRARDIETDARQRLYADPIVVATRSAYQEIVVTRRVGDMRLYLDGDLQFSSADEHRYTEALVAPALARDPARVLVLGGGDGLAARELLRHPTVRQVVQVELDPRMIELARTTFARLNRAALNDPRVRVVVADAFRWLRDPPPEPFDAVVVDMPDPDTPTLGRLYSQEFYGLVRAVLAPGGLLTVQAGSPYATPSAYWRTVSTVRAAGLATTPYHVDVPSFGDWGFVLATTGGTPPPLVLSERATPARFLDQAVLTAAGVFPLDRPPRTLEPSTLDRPRIVDDLRTGYQR

SEQ ID NO: 15774 - protein, 334 aa, Arabidopsis thaliana
MDAKETSATDLKRPREEDDNGGAATMETENGDQKKEPACFSTVIPGWFSEMSPMWPGEAHSLKVEKVLFQGKSDYQDVIVFQSATYGKVLVLDGVIQLTERDECAYQEMITHLPLCSIPNPKKVLVIGGGDGGVLREVARHASIEQIDMCEIDKMVVDVSKQFFPDVAIGYEDPRVNLVIGDGVAFLKNAAEGSYDAVIVDSSDPIGPAKELFEKPFFQSVARALRPGGVVCTQAESLWLHMDIIEDIVSNCREIFKGSVNYAWTSVPTYPSGVIGFMLCSTEGPDVDFKHPLNPIDESSSKSNGPLKFYNAEIHSAAFCLPSFAKKVIESKAN

SEQ ID NO: 15775 - protein, 367 aa, Aspergillus oryzae; identical to SEQ ID NO: 477

SEQ ID NO: 15776 - protein, 181 aa, Acinetobacter sp. ADP1
MSQSIYHIPVQTISGQDTSLDTYRGKVLLIVNVASKCGLTPQYEGLEKLYQDKQQQGLEILGFPANNFLEQEPGSNDEIQQFCSLTYDVHFPLFGKISVAGEDKHPLYQTLIEAQPERIGEGPWWKDLVDYGLTPNPKPEVLWNFEKFLINKNGEVVARFAPDITADDPRLVDAINAELAK

SEQ ID NO: 15777 - protein, 288 aa, Prochlorococcus marinus str. NATL1A
MNYKLKTRSGWLDEYHQGVRYGLEGKLILEESSPFQKITIYESKRYGKALLLDDCWMTAEKSEKCYHECLIHPALCCSTRIDNILIIGGGDGGSARECLKYKEVKSIDLVEIDLRVIELSQKYLPTIGGNAWSDSRLNLQIKNGIDWVKHTKENSYDVIIIDGADPIGPSKELFSNSFLKDCKRILKPGGVLATQSESPESFQEIHINIVKILREIFDYADPMYGSVSIYPSGLWSWAFASMENPKYIYPKKSRVKEISENCQVWSERWQQGAFNTIPAFIERELAKI

SEQ ID NO: 15778 - protein, 157 aa, Glycine max
MEGKGFTEEQEALVVKSWNEMKKNSQELGLKFFKKILEIAPAAQQLFSFLKDSTVPLEENPKLKPHAMAVFVMTCESAVQLRKAGKVTVRESNLKRLGATHFKAGVAAEHFEVTKLALLETIKEAVPEMWSPAMKNAWEEAHDQLAEAIKSEMKPSD

SEQ ID NO: 15779 - protein, 388 aa, Banksia serrata; identical to SEQ ID NO: 8853

SEQ ID NO: 15780 - protein, 157 aa, Lactococcus lactis subsp. lactis Il1403
MNFYDFSAFKMNGETVSMSDFKGKVVIVVNTASKCGFTPQFEGLEKLYENYKDQGLEILGFPCNQFVNQDAGENSEINEFCQLNYGVTFPMFQKIKVNGKEAHPLYQFLKKEAKGALSGTIKWNFTKFLIDREGNVIERFAPKTEPKEMEEEIQKLL

SEQ ID NO: 15781 - protein, 751 aa, Lactobacillus plantarum WCFS1
MELDAVGKAIVQYHLVPLVHQANLGLEVTMHRVDAHGHLATTAHPQAFGSAQQNHQLRPGFSASALKFTTPVRRDIPALMAYLKGLNTAARRSLDADERLWPLSSTPVLPDDLTNVPLADVDQVSYQRRRDLARKYELQRLMTTGSHVNMSLNEALFTRLYTETFHQQYHSYVDFRNAIYLKVAQGLVRMNWLIQYLFGASPRLAVTDTTSRPQRSSVQHPDGRYSQVTGDYTSIDRYVAKLTAAVRQQQLLSVNDFDGPVRLRSNGQLAMMARQGVYYLEYRGLDLDPTSPVGVDANAVAFVRLLASYFVMMPALPAKMVSQVNAQADQLTRQVLGENPTTASAQAVPAVQVLDALADFVKTYGLPNEDAVLLKQLKSWVTDPKKTLSAQIAMQADPLAWALERAARYQESSNERPFELAGFTALDLSSQQLAQQALTRGVQVDVVDPHANILRLTKLGRSQLVVNGSGTDLNPQALTTVLTHKAAAKQILAEHGVPVPASQTYHTANQLIADYDRYVQAGGIVLKAADESHKVIVFRIMPERGLFEQVVRQLFEQTSAVMAEEVVVASSYRFLVIDSRVQAIVERIPANIVGDGRSTVKTLLDRKNGRALRGTAFKWPQSALQLGTIERYRLDSYHLTLDSVVSRGTQILLREDATFGNGADVLDATADMHQSYVQAVEKLVADLHLAVAGVDVMIPNLYAELVPEHPEMAVYLGIHAAPYLYPHLFPMFGTAQPVAGQLLDALFKNED

SEQ ID NO: 15782 - protein, 473 aa, Prochlorococcus marinus subsp. pastoris str. CCMP1986
MAKSPQDVLSQIKDEGIELIDLKFTDIHGKWQHLTLTSDMIEEESFTEGLAFDGSSIRGWKAINASDMSMVPDSSTAWIDPFYKHKTLSMICSIQEPRSGEPYNRCPRSLAQKALKYLDSTGIADTAFFGPEPEFFLFDDVRYDSKEGSCFYSVDTIEAPWNTGRTEEGGNLGYKIQYKEGYFPVAPNDTAQDIRSEMLLQMAELGIPTEKHHHEVAGAGQHELGIKFDSLISSADSVMTYKYVVRNVAKKYGKTATFMPKPVFNDNGTGMHVHQSLWESGQPLFYGEGSYANLSQTARWYIGGILKHAPSFLAFTNPTTNSYKRLIPGFEAPVNLVYSEGNRSAAVRIPLTGPNPKAKRLEFRSGDALANPYLAFSVMMLAGIDGIKNQIDPGDGVDVDLFELPAEELSKIDTVPSSLNDSLNALKADKDYLLAGGVFTEDFIDNFIDMKYEEVQQLRQRPHPHEFFMYYDA

SEQ ID NO: 15783 - protein, 652 aa, Ascophyllum nodosum
  misc_feature (424)..(424): Xaa can be any naturally occurring amino acid
MSAVGIDLGTTYSCVGVWQNDRVEIIANDQGNRTTTSYVAFTETERLIGDAAKNQTAMNTENTVYDAKRLIGRKFGDSTVQSDMKHWSFKVVCRDGDKPHIQVNFKGETKVFAPEEISAMVLVKMRETAEAYMGKEVKDAVVTVPAYFNDSQRQATKDAGTIAGLNVLRIINEPTAAAIAYGLDKKGAGERNVLIFDLGGGTFDVSLLTIEEGIFEVKSTAGDTHLGGEDFDNRLVNHFVAEFKKKYKKDISGNSRSLRRLRTACERAKRALSTSTQSSIEIDSLFEGIDFYTSITRARFEEMCMDLFRATLDPVEKVLRDAKADKKSVDDIVLVGGSTRIPKIQQLLQDFFNGKELNKSINPDEAVAYGAAVQAAILKGEGGSKTEDLLLDVTPLSMGIETAGGVMTNLIPRNTTIPTKKSQXFPTYADNQPGVMIQVFEGERAMTKDNNQLGKFELGGIPPAPRGVPQIEVTFDIDANGILNVSAEDKSTGKTTKITITNDTGRLSAEEIEKMVSDASKFAKDDEAAKALIEAKNGLENYAFSLRNTLKDEKVAGKIDGSDKETLSGAIEAAISWLDSNPSAEKAEYDSQREKLEGVANPIMSKLYAGAGGAGGMPGGMPGGMPGGFPGGAPAGGANAANDDGPSIEEVD

SEQ ID NO: 15784 - protein, 388 aa, Cardwellia sublimis; identical to SEQ ID NO: 8855

SEQ ID NO: 15785 - protein, 383 aa, Clostridium difficile 630
MKKAIQFGAGNIGRGFIGGLLVKSGYHVVFADVNEYILNSINKDKKYTIHIRDVECIDEVIDNISAVSSIKEEIIDEIVQAEIITTAVGPLVLTKIASTIAKGIKARKEKGLTSNLNIIACENAIYASSSLKEEVLKYLNKEEVEYLEMYVGFPNCSVDRIVPPGKNENPLDVTVENFYEWNVEKQGFKGEIPTIVGMNLADNLMAYIERKLFTLNTGHAITAYIGYLKGYKTIEESIKDKFICDIVKSAMVESGEGLIKKYNFDSEVHYKYIDKILNRFKNPYLNDDVLRVGREPLRKLSDKDRLIKPLMTAKSYGLSVDNLILGIGAALHYNNSEDTQSVELQELIKSIGVKKAVAKIANISNDEELLNNIEKSYIFMKNL

SEQ ID NO: 15786 - protein, 181 aa, Raphanus sativus
MASSMLSSAAVVTSQLQATMVAPFTGLKSSAAFPVTRKTNTDITSIASNGGRVSCMKVWPPIGKKKFETLSYLPDLSDVELAKEVDYLLRNKWIPCVEFELEHGFVYREHGSTPGYYDGRYWTMWKLPLFGCTDSAQVLKEVQECKKEYPNALIRIIGFDNNRQVQCISFIAYKPPSFTDA

SEQ ID NO: 15787 - protein, 648 aa, Ustilago maydis 521
MSSVPTSPHLAKRSIPQDFKGDRDQSTLVPLETVDKLLDAPGSLLETQVKFINGRLTKVWKQLPNSVRDLWMFAATTYASRTMIVAEGESHTYAHVHKRAMLTATWLSRQFGVKKGDRVAIVARNHVEFVIGFYAVHLLGGVPALVNAFLPGKAIYDCIRDVGSKVALFDVERFRRLRDAEENFVHKLFTQASPDCVDDFGCTPGAHSGLSGVAVFARSFSGILAQEEREWAQANGANNVFDAFQLDRKFASVAQSADAIPKIDIQPEDLASVLYTSGTTGKPKGVAATHRQFLSAGPNSGFSIARAYVRRGLAPPTPQPDDEQASSIFLIPLFHSTGIQSGLCPSVLRGSKIVLMPKYDLEKAIELIQQHKIQVVLGIGFMVREIVLSKHELPSLQGLSHGGSSSAKELPEESRQKFPSMLIGQGYGSTEVNGAASGLASDDYLARPTSAGRAPPTIEIRIIDPDTLTEVANGKTGEIWVRGPNVALGYWGKKAATEEAFTKDGFFRTGDLGRKEDDGFIYVMDRSKHIIIRGGENISGTEVETAIYSERRIIDCTAVPIPDQRFGETVGVVCVPRAEYQKQNRPTEQDVLAVARKLLPKHEVPDFVWIRDEPLERNANGKVDKAIVKEAARKRHAQLKAASAKPRL

SEQ ID NO: 15788 - protein, 390 aa, Phaeosphaeria nodorum
MPYDKKAVHFGGGNIGRGFVAEFLHNSGYEVVFVDVMDSIIEALQKQSSYTVTEIGDDGEREFTIDHYRALNSKHEMDKVVQEIASADVVTCAVGPNILKLVAEPVAKAIDARTLDYPIAVIACENAINATTTWRGFIEGKLSEDSKSNLDKKARFANSAIDRIVPVQDKDAGLNVKIEKFYEWCVEQKPFENGGKKPDVKGIHYVDDLEPYIERKLFTVNTSHATAAYYGHQAKKQYIHEVLQDKKLHDIVRDAVKETAHLIVSKHGVSVQEQNDYVDSIIKRISNPVLKDNVKRVGRAPLRKLSRKERFVGPAAQLAERGEKVDALLGAIEQAYLFQNVEGDEESAELAKILKENSAEEVVTKVNGLDKSHPLFEKILPIVKKVQGGS

SEQ ID NO: 15789 - protein, 387 aa, Euplassa inaequalis; identical to SEQ ID NO: 8856

SEQ ID NO: 15790 - protein, 285 aa, Burkholderia thailandensis E264
MSTTLLFHPTPDVAYGFPNARRLARIESAHQEIEVWETSLLGRLFTLDGRPMTSVGDEFVYHECMTHPAALAHPAPRKALVLGGGDGGAARQLLRHPCIERIVVAELDAAVVDMARRFLGDVHQGALDDPRVELVIGDAARYVDHACEHFDLAVFDLTPPDSPAAGLYTPKFYTRLKRILTPQGAVSLHLGSPLYHEARVVSLLAGLRASFAVVAPLCAHVPLYGSPWLMAIASDALDAASLFSHDVEARLAERRIEGLRFYDAKLHPALFTLPHALRDTLGMHR

SEQ ID NO: 15791 - protein, 295 aa, Digitalis lanata; identical to SEQ ID NO: 8857

SEQ ID NO: 15792 - protein, 1106 aa, Ustilago maydis 521
MPNGYHTDDSIESTTPSSHRLADVSPSISAQAPRILCVDSSPVSGAPTRPIPASTRPDQSFRSAMSSGNGSSMSRTTFTSPSKQSANGHHHASSSNSNSNSNSTNASKSSNTFRSSLEQFRYGANNAKRHVAESDKSSDLSEPESSDQEQRKPKKRRLVRGGGARSPSRDHSQEPADRPRHNRSRSPPAKHGIDDDADHAREVPTLLDRQSSAASTRPATKPPADNSLPAPLSDAELKQKARAIIKERPLLEPKRILAALRQTRGDIPRAVHLLTSRPSVVTTKTVSLKLSANGIQRPTQTTLTNRSTRMPSNSSNPSSRASTPSISRTPSQSTAPQLVPVKKPSRETEQISSDDDDSDGQDRQEKQEHAAVRWFNTADASALMDTTNCNAQQAETIISLRPFDDADDIEEKLGSKSTKGVTPRLFHHCKDLMAGYYQVDEVLARCETIGRELSDAMASWMPDASQNGSRFATPALTASSVDASIAASREGTPSSTLNLSSIKKGGSSNDKFYLEEQPKLLADGVKLKDYQLVGVNWLHLLYRKKTSCILADEMGLGKTAQVIAFFAQLKDMGVRGPHLVVAPSSVLENWDREFRFFAPLINVRKYYGSMKDRVELREELVEDAHLEVILTTYEMAAGGPQDHNFLRKFGRRGCGRNECKPGCDESGCRTGGFQVCVFDEGHILKNRKSQKYDKLLKLKTHWRLLLTGTPLQNNLQELVSLLNFIMPEYFADAEEALSAIFKVKAGGQQNELSKQRVDRAKKMMHPFVLRRLKDKVLTDLTTKTVRVEYCDMLPMQRKIYAEAVAKTKRVAAAEAEAATTRARSRAATSSSKESGHVLMELRKAANHPLLSRRLFDEAKIDAMARDLMKEPDYADYSFEHVKEDLRINTDAQLSFSAQSYPATRKHVLPAAEWMKSGKIQALQRLIPEIQAKGDRILIFSQFTMVLDILCVCLQHMGVKYVGFTGSTQVQDRQVLVDQFTNDASITVFLLSTKAGGLGINLIAANWVILFDQDFNPHNDKQAADRSYRMGQTKPVTVVKLLSRGTIDEDIHALGERKLQLADRVSGHDDTESDEAEQKKVAQTLLAKLREAASPTVQDMSDHDDNN

SEQ ID NO: 15793 - protein, 334 aa, Glycine max
  misc_feature (10)..(10): Xaa can be any naturally occurring amino acid
IMLPRKKEIXIYANMTEHQKNLQDHLVNKTLGNYLKENMSSGLSVPAIMIRNLAIQLRKVCNHPDLLESAFDDSYLYPPLEEIVGQCGKFHLLDRLLQRLFARNHKVLIFSQWTKVLDIMDYYFSEKGFEVCRIDGGVKLDERKQQIQDFNDVNSNCRVFLLSTRAGGLGINLTAADTCILYDSDWNPQMDLQAMDRCHRIGQTKPVHVYRLSTAQSIEGRMLKRAFSKLKLEHVVIEKGQFHQERTKPASMDEIEEDDVLALLRDEETAEDKMIHTDISDEDLEKLLDRSDLIVNDFNDDNFKAPVSVFPLKGPGWEVVIPTATGGMLSTLNS

SEQ ID NO: 15794 - protein, 190 aa, Mundulea sericea; identical to SEQ ID NO: 8859
  misc_feature (68)..(68): Xaa can be any naturally occurring amino acid

SEQ ID NO: 15795 - protein, 740 aa, Porphyra yezoensis
MATSPAPIPGFNLPSHEGCDSEAPWRNELDLPQYKCNESFFGDVSNPTHPLAIWTGYFVIVGLGVSFGIFTVLLVALEQYLFSTVMTSEYFNTAGRSVKTGLSASVIVSQWTWSATLLQSSNVAYLYGVSGPFWYAAGASCQVILFGMLAVLVKLRAPTSHTFLEIIQARWGRVPHTVFLVFALTTSVIVTSMLQLGGAAVVNALTGVNLDLASALIPVGVILYTLAGGLRATFVASYFNTAVIMLFLVTFSFVVFTQHGDIGSPDKMWLLLQRASKIVPVENNLDGSYLTFWSRDGLFFGLINLVGNFSTVFIDQSYWQSAIAATPSASWKGFLLGGLCWFAIPFTLATSLGLSAVALSLPVTTAEAARGLVPPAAAGHFLGSAGSAVVLVMTFLAVTSSGASEQIAVSSIVAYDIYRTHINPRCSGPQVIFVSRVVILTFGLLMGGLGIALNHIGVSLDYLYRLMGVLIGSAVFPVAFSITWGRASGVGAVGGALGGLVLGLSTWLGYAATLDGGINLETTGNTDVMLAGNLMSILSSGLICTLISFVRPDDCDWSSTQSIPLIEDDPNAFLPFERAEALERAFKRVAGFGVLITALIVVVWPLLALPARVFSRSYFAFYAILSIAWGVIAASIMIVLPVWESRQSILVVLTLGMYARRLEAAEAAKDSFHESGGGSEAGDEEGGYEVGYADGFAAARAAVAAGSGMPLDGELPDLMGPDGGGHRLVEPPEPSHRTSF

SEQ ID NO: 15796 - protein, 223 aa, Solanum melongena
LYLKHDDVVLCVLPLFHIFALNSVLLVSLRAGATVLLMQKFEIGALLELIQKHRVSVAAVVPPLVLALAKNPMVDSFDLSSIRLVLSGAAPLGKELEEALHRRVPQAIFGQGYGMTEAGPVVTMCPSFAKQPFSTKSGSCGPVVRNADLKVVDPETGASLDRNQPGEICIRGSQIMKGYLNDDEATARTIDVDGWLHTGDIGYVDDDDEIYIVDRVKELIKFK

SEQ ID NO: 15797 - protein, 821 aa, Oryza sativa Indica Group
MASTSRRGGGEDDDDEPYLLGFIVANAVGLQYYQGGRAITRRESVGLVREPHNPHDANAIRVDNARGEKIGHIGRRAAAALAPLLDAGHVAAAHGIVPKPASKRLYSLPCQVHLFARPPHAALVAAALAASGIDLIHVDHPEFALSESAIVQEQQTKRSRGDVDRLFSHVGKGGRARIAPMEAPRDVVVSELFEHQKAALGWLVHREESCDLPPFWEEDNDGGFKNVLTNQKTNERPPPLKGGIFADDMGLGKTLTLLSLIGRSKARNVGGKKARGAKRRKVEEAVEEESRTTLVVCPPSVFSSWVTQLEEHTKTGSLKVYLYHGERTKEKKELLKYDIVITTYSTLGQELEQEGSPVKEIEWFRVILDEAHVIKNSAARQTKAVIALNAERRWVVTGTPIQNSSFDLYPLMAFLRFQPFSIKSYWQSLIQLPLERKNNGTGLARLQSLLGAISLRRTKETESGSKSLVSIPPKTVLACYIELSAEEREYYDQMELEGKNKLREFGDRDSILRNYSTVLYFILRLRQLCNDIALCPLDLKSWLPGSGSSLEDVSKNPELLKKLASLVDDGDDFECPICLAPPAKTVITSCTHIYCQTCIMKILKSSSSRCPICRRSLCKEDLFIAPEIKHPDEDSSVNLDRPLSSKVQALLKLLRRSQSEDPLSKSVIFSQFRKMLILLEGPLKAAGFNILRLDGSMTAKKRSEVIRQFGCVGPDSPTVLLASLKAAGAGVNLTAASTVYLFDPWWNPGVEEQAMDRVHRIGQTKEVKVVRLIVKDSIEERMLELQERKKKLISGAFGRKKGGKEHKEIRVEELQMMMGMK

SEQ ID NO: 15798 - protein, 110 aa, Ostreococcus tauri
MRDRRRGAARRARAREWDGDAIWRRSARRTRGVTDDGRARDAQAASARVMNHRSKKFHGNIHRRGEVSAKDAKKKEFGVGPVMLGFFCFVVIGSSVLQVLRSASSGALGT

SEQ ID NO: 15799 - protein, 223 aa, Solanum melongena
LYMHSDDVLMCVLPLFHIYSLNSVLLCGLRVGAAILIMQKFDIAQFLELIQKHKVTIGPFVPPIVLAIAKSPLVDNYDLSSVRTVMSGAAPLGKELEDAVRAKFPNAKLGQGYGMTEAGPVLAMCLAFAKEPFDIKSGACGTVVRNAEMKIVDPDTGCSLPRNQPGEICIRGDQIMKGYLNDPEATTRTIDKEGWLHAGDIGYIDDDDELFIVDRLKELIKYK

SEQ ID NO: 15800 - protein, 663 aa, Zea mays; identical to SEQ ID NO: 11808

SEQ ID NO: 15801 - protein, 527 aa, Cytophaga hutchinsonii ATCC 33406
MHTILPFLLAMIAVIVLLNMWATKLQIAYPILLVIAGLLISFIPGLPAVKIDPDLIFFIFLPPLLFDASWSVSFKEMKKWWRIIGSFAFLVVFFTALSVAIVTNHFIPGFTIALGFLLGGIVSPPDAVSTGAITKFVKIPKATSAILEGESLLNDASSLIIFRFALIVIGTGQFIWHEAAVSFLWMIVGGAGIGLLLGWLFVQAHKRLPTDAPSDIALTLIEPYFMYWIAEQLHSSGVLAVVSGGLFMSARRLIFLSSTSRIRAFSVWESFIFILNGIVFLIIGLELPEIVDGLRSQDIPLTTAIKYGVLVTGVLIAARIISSYAAMLATFIFRRNTARNLTSGRSWLLMPLLLGWTGMRGVVSLAAALAIPITLDDGTAFPHRNLILFITFVVILLTLVVQGLTLPYFIKNIPFFNGILNEETEAADRLKMKQGLKLHVYQVLKNKYDNELNGHAGMEKFLQQWEERAKATDDNWMNEKTKVIFIELLESQRQYLTELNKDPKINEEIIRQQLYQIDLEEERLRII

SEQ ID NO: 15802 - protein, 187 aa, Dalbergiella nyasae
EDEHGEVVSEIRRSDLEPYLGLHYPATDIPQASRLLFKQNRVRMICDCDAKPVKVIQSEELRQPLCLVNSTLRSPHGCHTQYMANMGSIASLVMAVIINGNDTTRLWGLLVCHHTSPRYVPFPVCYACEFLMQAFGLQLYMEIQLASQMAEKRILKTQTLLCDMLLRDAPFGIVNQSPNIMDLVKCD

SEQ ID NO: 15803 - protein, 540 aa, Zea mays; identical to SEQ ID NO: 15407

SEQ ID NO: 15804 - protein, 578 aa, Alternaria alternata
MVFTAPCWVPPLPSDLPDSTTLEEFIFCQVKDSQTRSELDRSILICGTQGREYTVQESMERTGRLAQGLSAWLNWPQKSPGKDWKVAAIFNVNCVDFFSISHAIHRLGGTISAINASSTADELEAQLRLSNAQAIFTCNTLLKIAMKASQRVGIPLANIFLTDAPGSYRPDDVYPFQEIDNIVRTAKSSLPLLQLGRGQGASTPAYICFSSGTSGAQKPVLLSHQGIIANIVQINTFEKFRQKGPNISLCILPLAHSYGLVCVAYSALYRGDRLAVLPSSGVEDLLSIVEKLKINTLYLVPTLVSRILSGGKAGRHDLRCVKEVYTGGAPLHPMLGEHILRHHPTWKIKQCYGATEAGTAVSVTSDCDLWPGSVGCLLPGVQAKIVKSDGSETTKHDESGELWVSSPSLAIGYLSNPLATKTTFTVDNTGKTWLRTGDEVKICLSPNGNEHLFIVDRIKDIIKVKGFQVAPVELEQLLLSNDFVEEVAVTSRQDEGEEERPQAFVVRSQVGLEEPQGAVAESLHALVKARKARYKWLHPHVIFVDSLPKTTSGKIMRRALRNMSPANSEVNSRLSSKI

SEQ ID NO: 15805 - protein, 204 aa, Zea mays
MENDRRQLGQIDPRRARFPCCVVWTPIPFITWLVPFIGHIGICREDGVILDFSGPHFVSVDNFAFGAVARYIQVNCDECYKLIEPEGDATWDGALKKGTQEFQNRNYNLFTCNCHSFVANNLNRLFYSGHDEWNVVSLAAVMFLRGRWVSTASVVKTLLPFAVVLSIGTFLGGTTFLTGLLAFAAAMTVWFLVGTYCIKGLIEL

SEQ ID NO: 15806 - protein, 398 aa, Zea mays
GAPSLSSSPIDPRDWDLQRAIGPAGVGDARNGSAAAALTKGGADDAARKPLPPCCVKAKARVPETEANCHDTVVSGWFTEPRSRFGEAHSLKVEKILFQGKSPYQEILVFESSTYGNVLVLDGIVQLTDKDECAYQEMVTHLPLCSIPAMKNVLDFGGGDGGVLREIARHDSVETIDICEIDQLVIDVCKEFFPNLSIGFKDPRVRLHVGDAVDFLRNSPEGKYDAIIVDSSDPIGPAQALVEKPFIQTIARALKPGGVLCNLAESIMWLHTHLIQDMLAICRQTFKGAVHHAWTSVPTYPSGVIGFLLCAKEGRAVNFLTPVNPIEKIEGTAKAGRELRFYNSEIHRAAFVLPTFVRRELEAYTTPSASAENEKPKESVSEPQKIKILSNNAILTAT

SEQ ID NO: 15807 - protein, 491 aa, Bacillus anthracis str. A2012
  misc_feature (470)..(470): Xaa can be any naturally occurring amino acid
MKLHTLVSCLHDFPVVPKENPEITSIEADSRKVKEGSLFVCMKGYTVDSHDFAKQAAAQGAAAIVAERPIDVDVPVVLVKNTFRSLAVLADYFYGQPTHKLHLIGITGTNGKTTTSHIMDEIMRAHGHKTGLIGTINMKIGDETFEVKNTTPDALTLQQTFAKMVEHGVDSTVMEVSSHALDLGRVHGCDYDVAVFTNLTQDHLDYHKTMEEYKHAKGLLFAQLGNSYNHNREKYAVLNNDDAVTVEYMRSTAATVVTYGIDTTSDVMAKDIAMTSGGTTFTLVTPYESVNVTMKLIGKFNVYNVLAATAAGLVSGVSLETIIDVIKELAGVPGRFEVVDGGQNYTVIVDYAHTPDSLENVLKTAKQFAKGDVYCIVGCGGDRDRTKRPIMASVATQYATHAIYTSDNPRSEDPAAILDDMVHGANGNNYEVIIDRKEAIHHAITKAKADDIIIIAGKGHETYQIIGKDXHHFDDREVAKEAITERLNNEE

SEQ ID NO: 15808 - protein, 465 aa, Cyanophora paradoxa
AIAYGLDKKGKGERNILIFDLGGGTFDVSLLTIDDGIFEVKATAGDTHLGGEDFDNRMVNYFVQEFKKKHKKDMSGNPRALRRLRTACERAKALSSQTQTTIEIDSLFEGIDFNATITRAKFEELNIDLFRGCLEPVEKVLRDAKVDKGTIHDIVLVGGSSRIPKVQQLLRDFFNGKELCQSINPDEAVAYGAVQAAILTGEQSSKVQDLLLLDVTPLSLGLETAGGVMTVLIKRNSTIPTKKTQIFSTYSDNQPGVLIQVYEGERAGTKDNNLLGKFELSGIPPAPRVPQIEVTFDLDANGILNVSAEDKTTGNRQKITITNDKGRLSKDDIERMVNEAEKYKKQDEEARDRIEAKNSLENYAYNLRNSIREEKVAAKMEEDDKKVIEEEVDKAIKFLETNPDADKEEFEKVQKELESKAMPVIMTKLYQSAAEAFPGARGFPGARGRPEEGRGGKGPVIEEVD

SEQ ID NO: 15809 - protein, 680 aa, Porphyra yezoensis
MADFVNPSVEAFGCTTSPVTRNFFLDPQYACQASFFGLADGSAQLSRAVGYVIVLAFGISFGIATVGLVLIERRILNRPMDSEFFNTAGRSVKTGLTASVLVSQWTWAATLLQSSNVAFKYGVSGPFWYASGATLQIIIFALLAVQVKRRAPTAHTFLEIIQARWGTVAHTVFLFFAFATNIIVTSMLILGGSAVVNALTGINTNLASFLIPLGVILYTIAGGLKATFVASYFNTAVILIALCIFVFQVYVTDSTLGSPSTVYDRLQATSVIQPVLDNKGGSYLTMFSKNGLLSGLSNICGNFGTVFVDQSYWQSAIAATPQAAWKGYILGGLSWFAIPFTLATSLGLAGIALSLPITLDESNSGLVPPAVATHLMGKGGSVLILIMLFMAVTSTGAAEQIAVSSLVAYDVYAPLMRRMGKPVTGKSVVLVSRIAIIVFGLLTGVLGIALNAIGVSLGWVYLGMGVIIGSAVAPVAFAISWSKCSGAGAVAGAIGGLVLAIASWLGYASSFDGGVSIANTGRDEVMVVGNVVAILSSAAICVVVSLIKPDNCDWLATKSIPLLDADANAELTPEAEAQIDKAMKMITAWGVGLALVLVVAWPLLALPAGVFSKGYFTFWVILSIIWGLMATIAMVLLPVWESRSSILAILSCGAISPPLPVKTMEEPVGESDGISSEVDE

SEQ ID NO: 15810 - protein, 388 aa, Gevuina avellana; identical to SEQ ID NO: 8884

SEQ ID NO: 15811 - protein, 164 aa, Methylococcus capsulatus str. Bath
MNIYEFEVRTLEGETVRLDGYRGKVLLIVNVASRCGFTPQYAGLEALYRRHRNAGLVILGFPCNQFGGQEPGSETEIRRFCSSRYEVSFPLFAKIEVNGEHTHPLYAYLKSAQPGLLGSEAIKWNFTKFLVGRNGEVVKRYAPTATPESIEPGLLPLLTVGSGG

SEQ ID NO: 15812 - protein, 188 aa, Arabidopsis thaliana
  misc_feature (96)..(96): Xaa can be any naturally occurring amino acid
  misc_feature (105)..(105): Xaa can be any naturally occurring amino acid
  misc_feature (125)..(125): Xaa can be any naturally occurring amino acid
  misc_feature (142)..(142): Xaa can be any naturally occurring amino acid
RRSRRPRVPERCGIHERWGDIFFKSVPAREQDRFLPIVNITRMMRTGHPANGKMARDANDIEQECVAEFILFCIHKASVKRDRENRNTMNGDDLIXATATLRFEXYMETLQAYLDEYTERAGATXGSAQGGDPTAKKDGSSXQKGQFSQHWSPRILMRKSSGSEPDGRYPWPGTGLAMRRIPSPPRAT

SEQ ID NO: 15813 - protein, 176 aa, Dalbergiella nyasae; identical to SEQ ID NO: 8887

SEQ ID NO: 15814 - protein, 129 aa, Oryza sativa Japonica Group
MADGPGSPGGGGGSHESGSPRGGGGGGGGGGGGGGVREQDRFLPIANISRIMKKAIPANGKIAKDAKETVQECVSEFISFITSEASDKCQREKRKTINGDDLLWAMATLGFEDYIEPLKVYLQKYREVR

SEQ ID NO: 15815 - protein, 286 aa, Azotobacter vinelandii
MSDYQETLYEGYGQRFRMDRLLHEVRTGHQHLVIFENARMGRVMALDGVIQTTEADEFIYHEMLTHVPILAHGAARRVLIVGGGDGGILREVCRHRSVERITMVEIDATVVEMCKEFLPEHSRGAFEDPRLNLVIDDGMRFVATTEDRFDVIISDSTDPIGPGEVLFSENFYQACRRCLNDGGILVTQNGTPFMQLGEVQTTAQRMNGLFADWHFYQAAVPTYIGGAMTFAWGACDAASRRLPPDILRQRFVGSGIVARYYNPEIHQGAFALPQYVLQAIGKPGNN

SEQ ID NO: 15816 - protein, 194 aa, Oryza sativa
  misc_feature (8)..(9): Xaa can be any naturally occurring amino acid
  misc_feature (15)..(17): Xaa can be any naturally occurring amino acid
  misc_feature (23)..(23): Xaa can be any naturally occurring amino acid
  misc_feature (32)..(32): Xaa can be any naturally occurring amino acid
  misc_feature (35)..(36): Xaa can be any naturally occurring amino acid
  misc_feature (48)..(49): Xaa can be any naturally occurring amino acid
  misc_feature (65)..(66): Xaa can be any naturally occurring amino acid
  misc_feature (69)..(69): Xaa can be any naturally occurring amino acid
  misc_feature (73)..(73): Xaa can be any naturally occurring amino acid
  misc_feature (77)..(77): Xaa can be any naturally occurring amino acid
  misc_feature (89)..(89): Xaa can be any naturally occurring amino acid
  misc_feature (91)..(91): Xaa can be any naturally occurring amino acid
  misc_feature (95)..(95): Xaa can be any naturally occurring amino acid
  misc_feature (97)..(97): Xaa can be any naturally occurring amino acid
  misc_feature (111)..(112): Xaa can be any naturally occurring amino acid
  misc_feature (114)..(114): Xaa can be any naturally occurring amino acid
  misc_feature (126)..(126): Xaa can be any naturally occurring amino acid
  misc_feature (131)..(131): Xaa can be any naturally occurring amino acid
  misc_feature (134)..(134): Xaa can be any naturally occurring amino acid
  misc_feature (137)..(137): Xaa can be any naturally occurring amino acid
  misc_feature (143)..(143): Xaa can be any naturally occurring amino acid
  misc_feature (148)..(148): Xaa can be any naturally occurring amino acid
  misc_feature (155)..(155): Xaa can be any naturally occurring amino acid
  misc_feature (162)..(163): Xaa can be any naturally occurring amino acid
  misc_feature (167)..(167): Xaa can be any naturally occurring amino acid
  misc_feature (174)..(174): Xaa can be any naturally occurring amino acid
  misc_feature (191)..(191): Xaa can be any naturally occurring amino acid
GRGRDGDXXAPSPDXXXQMNEQXDPQSALAAXYEXXGVKEQDRWLPIXXVARIMKNALPDNARDXXEAXECMXECVXEFISFITSEASXKXQQEXRXTVNGEDILFAMTSXXFXNYAEALKVYLSXYREQXNQXNRXRVMDNXPMYPXTMMGDTXAEPGAVXXFGHXGNSVEGXADPNYMYGSQPGHNGTXTEY

SEQ ID NO: 15817 - protein, 664 aa, Oryza sativa Japonica Group
LGEPPSTLVSVLKPYQKEALFWMSQLEKGIDGDQAKKTLHPCWSAYKIVDKRAPAVYVNVFTGEATTQFQSVTQSARGGILADAMGLGKTVMTIALILSNPRGELEQDKRGTRDRDTKAQTSRSSVRGGTLIICPMALLGQWKDELEAHSTPGALSVFVYYGGDRTTDLRFMAQHSVVLTTYGVLQSAHKNDGSSIFHRIDWYRVVLDEAHTIKSPRTKAARAAYELTSHCRWCLTGTPLQNNLEDLFSLLCFLHVEPWGDASWWNKLIQRPYENGDERGLKLVRAILRPLMLRRTKETKDKMGNPILVLPPANIEIVECEQSEDERDFYEALFRRSKVQFDKFVAQGSVLNNYANILELLLRLRQCCDHPFLVISRADTQKYTDLDELAQRFLDGVQRDSARRSAPPSQAYVEEVVEEIRQGATTECPICLESASDDPVLTPCAHRMCRECLLSSWRTPSGGPCPLCRSPITKSELITLPSQCRFQVDPENNWKDSCKVIKLIKILEGLQEKREKSIVFSQFTSFFDLLEVPFNQKGIKFLRFDGKLSQKHREKVLKEFSESKDKLVLLMSLKAGGVGLNLTAASNVFLMDPWWNPAVEEQAIMRIHRIGQKRAVQVRRFIVKDTVEERMQKVQACKQRMISGALTDDEVRSARIEQLKMLFT

SEQ ID NO: 15818 - protein, 735 aa, Coccidioides immitis RS
MMASVLQDLAWGSLRKRMEEETDPDESPEAGEQEFWTSWALFILILLLIAALFTSYMLKQKRVQAVHETVLSIFSGMVVGLIIRVSPGTLIQKSVSFNYQFFFNLLLPPIILASGYELHQANFFRNIGAILTFAFAGTFISALVLGLILYLWTRIPLDGLNISFVEAISVGATLSATDPVTILAIFNVYKVEPKLYTVIFGESILNDAIAIVLFETAQRYKPGSTAGSLTVLSLFEAIGIFLLVFFGSLLIGVVVGVVTALGLKYTHVRREPKIESCLIVLVAYASYFFSNGVHMSGIVSLLFCGITLKHYAYYNMSRRTQLTTKFIFQILAQLSENFIFIYLGLDLFTEENLQFKPLFILVTVVGICVARYMSVFPLSKAINWFIRYRARRRGKDVADELPFSYQAMLYWAGLRGAVGVALAAGLEGTNAPALRATVLVVVVLTVIIFGGTTARMLEILDIRTGVAEEVDSDDEFDIEMTDGGTYYKRSGTGIGHTPRRSDFTIPLDSVHITNGLDSSPHAGESYATSRHSGPSPQPGDGRGNLASRKPAGYNQRDRNPRSRDAASSQALLGSRSVSQNGSASGSSADEAAMHSRNRATSRAASKALADTDPDLEDFDLELDSISDDDHLPPAAPSHRASRTPSRLSTRAPHEPSPVSGQAASSSSPAPAVTAGQAQSQQGRPIFSGATSAFRDLLSGAGSRDHAEWFKQLDEEYIKPKLLLDQGSGHKEPGAA

SEQ ID NO: 15819 - protein, 202 aa, Zea mays
MGKKAIQFGGGNIGRGFVAEFLHQSGYEVVFVDVVPQVIESLNNKKTYEVTEISEEGEKTKTITNYRALSSKTQEQEVVKEIATADVVTCAVGPNVLKFIAPVIAKGIDAREAERPIAIIACENAINATDALRGHIEEHLDKSRLDTLPKRARFANSAIDRIVPTQPENAGLNVRIEKYYEWVVEQTPFGEYGHPDISAIHW

SEQ ID NO: 15820 - protein, 325 aa, Sinorhizobium americanum
IAGWKAINESDMVLMPDPETAHMDPFFAQSTMVIVCDILDPVSGEAYNRDPRGTAKKAEAYLKASGIGDTVFVGPEAEFFVFDDVKYKADPYNTGFKLDSSELPSNDDTDYETGNLGHRPRIKGGYFPVPPVDSCQDMRSEMLTVLAEMGVTVEKHHHEVAAAQHELGVKFDALVRNADKMQIYKYVVHQVANAYGKTATFMPKPVFGDNGSGMHVHLSIWKDGKPTFAGDEYAGLSETCLYFIGGIIKHAKALNAFTNPSTNSYKRLVPGYEAPVLLAYSARNRSASCRIPFGSNPKAKRVEVRFPDPAANPYLAFAAMLMAGL

SEQ ID NO: 15821 - protein, 1662 aa, Coccidioides immitis RS
MAGVPPYGMHSPTQQPRYPSYSPSTRDRQPYSGNDPYQHPPRTPPSFAPPSSLSRSPHFARPPSPMNTTLPPLNGTVVNADGSPPYHGHSGSATSGYTLPRPFGGSLMSATSHSPPPSYSHASGSHSHPSNIPDSFSQSPKRESEPYDVRSDRTGPVSQTPARPASPKESKSARSNPMSFANILSGPADEPPPRRSSPPPQTYKSSTLPPIAPTPKVDKEPLSEPEKRRGSSHYETAYNEMPHRPAMNGFTPAKSPLAAMPSPLSKSRKLVDEEEIDKISRENIARALEQIDALDNSDVEAPGFEQEWERYMAKSRKRARELDAIEGRKRKRRRTEFLGKLAKMFEKQALQGIERFNRIHEAEVQMEVQQKEIQEEKERKKDMQRKRRRENTVRHEMEKLNAAQKKANKIEDEAEKQKLAKEIARSKKKIKDTTLALERGEASQEISEVNPLAPNLEGGTTSSFHIRTKSPPPPKKRAAKGTSSRPRKSKEKKQAEKDAAEAAYAAMENEDLVPLAPKEDPRKTSLKKESKAARSKEPSPVPATPYDSKGYNQFYEQLWRDIARKDIPKVYRIKVVSLSTRQENLRKTAQLAAKQARKWQEKTNRSMKDTQARAKRTMREMMTFWRRNEREERDMRRLAQRQELELAKKAEADREANRQRRKLNFLISQTELYSHFIGRKIKTDKAQDSGDATTTAAIEGNGEGKVPDSLVPLPDGGAKVTSFDDLDFDAEDETALRQAAMANAQSAVQEAQDRARAFNGEENKMADFDEGEMNFQNPTSLGDVEVSQPKMLTCQLKEYQLKGLNWLVNLYEQGINGILADEMGLGKTVQSISVMAYLAEVHDIWGPFLVVAPSSTLHNWQQEIVKFVPDLKVLPYWGSAKDRKVLRKFWDRRNITYRKQSEFHVLVTSYQLVVGDAQYFQKIKWQYMILDEAQAIKSSQSSRWKSLLGMHCRNRLLLTGTPIQNNMQELWALLHFIMPTLFDSHDEFSEWFSKDIESHAQSNTKLNEDQLKRLHMILKPFMLRRIKKHVQKELGDKVEKDVFCDLTYRQRAYYTSLRNRVSIMDLIEKAAIGDDTDSTTLMNLVMQFRKVCNHPDLFERAETTSPFSVCYFAETASFVREGPFVDVGYSTRNLVEYDLPRLLCSPEGRLDVAGPGNNKAGFEGRYLSHLMNIWTPENIRESMSHNDAFSWLRFADTSVGEAYEVSHKGVFERAVRRRDYSTRLSLLDVAYDAEDGVNINSVHVHSLFNIVERNDRRALADITATGYMRELLNVASNVAERGGIRTIEPCAKPGASAPPITISCSGQAAIAEARATFFNTAVRHALFAAPTKAMEEEILSNKLDPAPYSLRPLLPQPGSMKGRYTNITVPSMRRFVTDSGKLAKLDELLRELKNGGHRVLLYFQMTRMIDLMEEYLTYRNYKYCRLDGSTKLEDRRDTVSDFQQRPEIFVFLLSTRAGGLGINLTAADTVIFYDSDWNPTIDSQAMDRAHRLGQTKQVTVYRLITRGTIEERIRKRALQKEEVQRVVISGGAAGGVDFNARSRENRTKDIAMWLADDEQAEILEQKEKEALEKGEELGAKKGRKAAGKRKRDITLDDMYHEGEGHFEDNSTKPSGAATPVSGDVSGVPGVKGRRGRGGGGVGRSKKAKTMKERLRLVDGEVD

SEQ ID NO: 15822 - protein, 163 aa, Candida albicans SC5314
MSDFYEFAPNDIKGTPYSFKKLQGKVVLIVNVASKCGFTPQYKGLQDLKQKFADQPVEILGFPCNQFGHQEPGTNEEIEKYCREYFGVTFPVLSKVETNGKNAEPVYKFLKSQKPGLLGLHRIMWNFEKFLIDQDGNVVARFSSFTKPETIGLRIEEMLKHQA

SEQ ID NO: 15823 - protein, 639 aa, Shewanella sp. ANA-3
MGKIIGIDLGTTNSCVAVLDGGKARVLENAEGDRTTPSIIAYTDDETIVGQPAKRQAVTNPNNTFFAIKRLIGRRFKDDEVQRDVNIMPFKIIAADNGDAWVESRGNKMAPPQVSAEILKKMKKTAEDFLGEEVTEAVITVPAYFNDSQRQATKDAGRIAGLEVKRIINEPTAAALAYGIDKKQGDNIVAVYDLGGGTFDISIIEIDSNDGDQTFEVLATNGDTHLGGEDFDNRLINYLADEFKKEQGLDLRKDPLAMQRLKEAAEKAKIELSSTNQTEVNLPYITADATGPKHLVVKITRAKLESLVEDLIIRTLEPLKVALADADLSVSDINEVILVGGQTRMPKVQEAVSNFFGKEPRKDVNPDEAVAVGAAIQAGVLSGDVKDVLLLDVTPLSLGIETMGSVMTKLIEKNTTIPTKAQQVFSTADDNQSAVTIHVLQGERKQASANKSLGQFNLDGIEPAPRGMPQIEVMFDIDADGILHVSATDKKTGKKQNITIKASSGLSEEEVAQMVRDAEAHAEEDKKFEELVQSRNQADGLVHATKKQVEEAGDALPADDKAKIEAAMSAVEVATKGNDKEAIEKATQELIEASAKLMEIAQAKAQTQGGAQEGAAKQSNATADDVVDAEFEEVKDDKK

SEQ ID NO: 15824 - protein, 185 aa, Cryptococcus neoformans var. neoformans JEC21
MTFFDSIASKFGYESLPGDVANKSFYDLKAKLPGSKGDLDFSTLKGKVVLIVNTASKCGFTPQYTGLEELHKTYGDKGLVVLGFPSNEFGGQEPGSDDDIAQFCTLNHGVTFPLMKKSEVNGKNMNEVFAWLKSQKGENVGGLAGTTAIKWNFTKFLINKEGKCVGRYGSSTKPEKLKEEIEKLL

SEQ ID NO: 15825 - protein, 161 aa, Candida albicans SC5314
MSQFYELAPKDAKGEPYPFEQLKGKVVLIVNVASKCGFTPQYKGLEELNKKFADQPVQILGFPCNQFGHQEPGSNEEIGSFCSLNYGVTFPVLDKIEVNGDNTDPVYKYLKSQKSGVLGLTRIKWNFEKFLIDQNGKVIERFSSLTSPESIGTKIEELLKK

SEQ ID NO: 15826 - protein, 181 aa, Brassica napus
MAYSMLSSAAVVTSPAQATMVAPFTGLKSSAAFPVTRKANNDITSIASNGGRVSCMKVWPPVGKKKFETLSYLPDLTEVELGKEVDYLLRNKWIPCVEFELEHGFVYREHGSTPGYYDGRYWTMWKLPLFGCTDSAQVLKEVQECKTEYPNAFIRIIGFDNNRQVQCISFIAYKPPSFTGA

SEQ ID NO: 15827 - protein, 175 aa, Pseudoalteromonas tunicata D2
MLKALLLSLTVLSANALASECDDFTNVEMKKLRSDKTINLCQFKDKPLLIINTASNCGFTPQFKGLEAIHKKYKDQGLVVLGFPSDDFFQEEDDEKDTAKVCFINYGVTFNMFAPISVRGKNADPIFKHLAEQTSSPKWNFYKYIVSKDRKTVLKFNSKTTPEDADFIKAIEESL

SEQ ID NO: 15828 - protein, 158 aa, Bradyrhizobium sp. ORS278
MASIYDFTASSLTGEEVPLNRFEGQVLLIVNTASACGFTPQYRGLEALHRAYADRGFAVLGFPCNQFGAQEPGTAAEIGAFCSTKYDVTFPLFAKIDVNGAHAHPLYKFLKGEKTGLLGSAIKWNFTKFLVDRAGHVVSRHAPTTTPEALKKEIEALL

SEQ ID NO: 15829 - protein, 215 aa, Vitis vinifera
MKVCELCNSPAVIYCDSDQASLCCDCDAKVHSANFLVAKHSRTLLCHVCQSPTPWNGSGPKLGSTISVCQRCVNRSRTVNETPSTDEDEDEEGEEDGEDDGDDENDEENQVVPWSSTPPPPISCSSASEEESSSRFCNGEEGPSDSKSASSLKPMRQQSSFRPTSQVRLFSPSLRTISMSIKFPQIPIYSTSQNDLGRSVSPPAHNVRIFMKGNE

SEQ ID NO: 15830 - protein, 191 aa, Zea mays; identical to SEQ ID NO: 11949

SEQ ID NO: 15831 - protein, 224 aa, Cycas edentata
MGRGKIEIKRIENTTNRQVTFCKRRNGLLKKAYELSVLCDAEVALIVFSSRGRLYEFANNSVKRTIERYKKTCADNTQGGAISESNSQYWQQEAGKLRQQIDILQNANRHLMGDALTSLSVKELKQLEIRLERGLSRVRSKKNEMLLEEIEIMQRREHILLAENQFLRTKIAEYESNQNTNVLIPGPEFDALPAFDSRNFLHANLIEAAAHHYTQQDQAALQLG

SEQ ID NO: 15832 - protein, 374 aa, Bacillus clausii KSM-K16
MKAVHFGAGNIGRGFIGALLVDAGYEVTFVDVNEKIIDALNERNEYKVTVAGERKETETVTNVRGINSKTNEKEAIDAIAEADIVTTAVGPTVLPYIAKTIAQGLKQRTASKPVNMIACENAIRATSQLKKDVLSHLSEEETTALLKDAGFADAAVDRIVPNVQSDDILHVTVEPFFEWVVEKPALKGDAVQLGKAVLVEDLAPYIERKLFTVNTGHAVAAYVGYRKGKKTIKEALADDYIKHRVRGALNETKAMLVEEYQFDAEAHEDYIDKILLRFQNPHLEDLVERVGRGPIRKLGPADRLVKPAKYLAEKGLHPESLAETIFDALHFYAEGDPESEELRALVDEKGYVDAFCEISKLEKDHPLVEIVAKE

SEQ ID NO: 15833 - protein, 493 aa, Vibrio fischeri ES114
MMQLSELLLPWCDLNQSVAISSMTLDSRQVSPGCLFVAIKGHAVDGRQFISSAIEQGAVAVIADADKENIAGTVKVIDNAIVVYIDSLYTQLSAIAGAFYQADKRNMQLVGITGTNGKTTISQIIAQWTTLLEQPAAVMGTTGNGLLSDLKPALNTTGSPIEIQQTLTELENIGAKLTALEVSSHGLVQGRVNALSFDAAVFTNLSRDHLDYHGDMANYAEAKKLLFTSHRPKNSIINGDDQVGCQWLKEMPHAVAVSLNEENISFHSGKKVFATSVVYSTEGIKLSISSDWGNVAFSVPLIGAFNASNILVAFAALLSLGYDIQALAQTASQLNAVIGRMELFATDNKAKVVVDYAHTPDALDKALQALRVHCEGKLWCIFGCGGDRDTGKRPIMASIVEQQADAIILSDDNPRSEEPSLITDDMLVGLKNAESAHVIHDRFEACQFALSQANENDIILLAGKGHEDYQVLADKTVHYSDRETAQTLLGLQS

SEQ ID NO: 15834 - protein, 847 aa, Bordetella pertussis Tohama I
MDIGFLVFGLAGLLTLVCFMPPLAGRLKLPYSVLLALVGCLLGIGVHLHGWAPPVLGDLLDTIEHFEISSETFLMVFLPVLLFETALSMNVRRLIDDIGPILMMAIVAVVVCTLVVGFAVDAVSSYGLIVCLLLGAIVATTDPAAVVGIFREVGAPKRLTTLVEGESLFNDAASIALYSVLLAALGGSGELSVGAVFNDFIFHFVGGGLAGFLMGRLACALFAWLRGFPTAEITLTLTLAYLSFFISEHYLGVSGVVATVIAGLVVDSTGRTRMSPTTFEFLSSAWGQFGFWANSLIFLFAAMLIPKLMAEADWQELLLVLVVFAATLAARAIVVFGLLPLLRVARIGAEVSNPYKSVMWWGGLRGAVSLALALAVTEQSSVPEQARQFVAVATTGFVLMTLMINGVSLRPLIRMLGLNQLSPVERTIRNQVLAAALEDLQGRTEEIAKVDHVNPEARDRIRAMFDASLTSVHDGQVGQMTLDQRVAVGLSIVARREEEMFFDILKAQIVDWRLAEGLLARAERLEDAVRAGGLAGFEAGIVADVRYWRLFRMALRTHYMFGFQGWLARELGKRFASLLTKRSVARDLMKFAREQVAPLLGEEAADRIIAAHQRRLDLIENALQALTLQYPSYSLWLQESHLGRVARELERRRYRDMLEQFLISGEVYADLMAQLKARWQHIDKHPPLDIELGSAELVKRVPLFEGLSQDSLRAICRLLKPRLALPDQHILTEGRHGQEMCIVASGAVVVHLPDHTTIELGSGEFFGELALLGEEQLVPDVTSLGYSKLLMLSARDFHALLARDEHLHERIQTVAKQRMRAIEVWKQYSQAAAAAAASTASEDSAPA

SEQ ID NO: 15835 - protein, 287 aa, Cyanothece sp. PCC 8801
MLHLETQSPESPMFQSTTMAVLVIGGAEDKVHGREILQTFWFRSGGANATIAIIPSASREPALLGERYQQIFEEMGAKYVKVLDIRDRAQGEDPYFQQYIEECSGVFLTGGDQLRLCGLLADTPLMERIRQRVQLGEISLAGTSAGAAVMGHHMIAGGSSGESPNRALVDMAMGLGIIPEMIVDQHFHNRNRMARLLSALSNHPERLGIGIDEDTCALFERDGLIRVVGQGTVTIVDGREMSYTNQKEVGPSDPLSLHNLRLHILSHGDCYHLHQNQPIAKVSGSLP

SEQ ID NO: 15836 - protein, 889 aa, Cyanothece sp. PCC 8801
MLPIADLRETANMKIIQTLTLRGPNYWSIRRNKLIVMRLDLEDLAEKPSNEIPGFYEGLVEVMPSLIEHFCAPGHRGGFLKRVKEGTYMGHIIEHIALELQELTGMPVGFGRTRETSTPGVYNVVYEYVDEQAGRYAGRAAVRLCQSIVDRGTYAQEDLAQDLTDLRDLKANSALGPSTETIVTEAEARKIPWMTLSARAMVQLGYGVHQKRIQATLSNLSGILGVELACDKEGTKTMLQDSGIPVPKGTTIQFFEDLENAIEDVGGFPIVIKPLDGNHGRGITIDINSWDHAEEAYDFASKESKTRSVIIERYYKGSDHRLLVVNGKLVAVSQRIPAHVIGDNKHTIEELIEITNQDPNRGEGHDNVLTKITVDKTSLSVLERQGYSLNSILAKGEIAYLRATANLSTGGIAIDRTDDIHPENVWIAERVAKVIGLDIAGIDVVTPDITRPLREMDGVIVEVNAAPGFRMHVAPSQGLSRNVAAPVLDMLFPPGTPSRIPILAVTGTNGKTTTTRLTAHIYRQTGKVVGYTTTDGIYLGEYLVEKGDNTGPFSANVILKDPTVEVAVLETARGGILRSGLAFDTCDVGIVLNVAADHLGLGDINTIEQMAKVKSVIAEVVHPDGYAILNADDPLVSAMAERVKAKVAYFSMSPDNPIIENHLRRGGLAAVYENGYLSILEGHQTLRIEEAANIPMTMGGMAPFMIANALAACLATFAQGVDIEMIRQGVRTFKASVNQTPGRMNLFNLGDYHALVDYAHNPAGYEAVGGFVRNWKGERLGVVGGPGDRRDEDLILLGKIAAQVFNRIIVKEDDDRRGRDRGEVADLIIKGIVQENSQIEYEAILDETEAIEVGLNRVNRGGLVVIFPESVTRAISLIQKRNPISDDNL

SEQ ID NO: 15837 - protein, 434 aa, Trichodesmium erythraeum IMS101
MNIASIHSLFKNILYSGAIATTAAISLLAPSLSKPAEANLENSPKVVLDEAWQIVNREYVDGSFNHTDWKATRKSLLEKNYTSQEKAYEALRQALDQLNDPYTRFLDPEQFKALTSQTSGEMSGVGMQLKQEELTKTIVVVDVVENSPAMKGGLLPGDQIQEIDGKSTSDLSVSAAAKLIRGDVGTKVMLGVIRPGDREFEVTLTRARIELQAVRYDLKQEKNQRIGYIRLQEFSAHAGEQMQRAIEKLNNQNPDGYVLDLRGNPGGLLRISIDIARMWMDKGAIVSTVDRDGDRQEVLADRSALTDKPIVVLVDGDSASASEILAGALKDNGRATIIGDQTFGKALVQSVHSLSDGSGLAVTIAHYYTPKGTDISKKGVTPDVVLNLTDSQKRRLYRRPEAIATSSDPYYARAINLLRNEVLLSPLILGEQEN

SEQ ID NO: 15838 - protein, 3574 aa, Arabidopsis thaliana; identical to SEQ ID NO: 13418

SEQ ID NO: 15839 - protein, 542 aa, Mycobacterium tuberculosis H37Rv
MNGRRTIGEDGLVFGLVVIVALVAAVVVGTVLGHRYRVGPPVLLILSGSLLGLIPRFGDVQIDGEVVLLLFLPAILYWESMNTSFREIRWNLRVIVMFSIGLVIATAVAVSWTARALGMESHAAAVLGAVLSPTDAAAVAGLAKRLPRRALTVLRGESLINDGTALVLFAVTVAVAEGAAGIGPAALVGRFVVSYLGGIMAGLLVGGLVTLLRRRIDAPLEEGALSLLTPFAAFLLAQSLKCSGVVAVLVSALVLTYVGPTVIRARSRLQAHAFWDIATFLINGSLWVFVGVQIPGAIDHIAGEDGGLPRATVLALAVTGVVIATRIAWVQATTVLGHTVDRVLKKPTRHVGFRQRCVTSWAGFRGAVSLAAALAVPMTTNSGAPFPDRNLIIFVVSVVILVTVLVQGTSLPTVVRWARMPEDVAHANELQLARTRSAQAALDALPTVADELGVAPDLVKHLEKEYEERAVLVMADGADSATSDLAERNDLVRRVRLGVLQHQRQAVTTLRNQNLIDDIVLRELQAAMDLEEVQLLDPADAE

SEQ ID NO: 15840 - protein, 177 aa, Neisseria meningitidis MC58
MGIYDFQMKDAEGNAVDLSGYRGKVLLIVNTATRCGLTPQYEALQKLYAQYTAEGLEILDFPCNQFREQAPESSGEIAQVCMMKFGTKFKIFDKIEVNGANTAPLYAYLKSVKPQDKGNHLFKDFVLKLAALGEKRDEGDIKWNFTKFLVNRDGEVVERFAPSVTPEEIEADIRALL

SEQ ID NO: 15841 - protein, 450 aa, Oryza sativa Japonica Group
YGLYMKLTSEKVGCTGENKVRTILLENPGLLVLDEGHTPRNERSVIWKTLGKVKTEKRIILSGTPFQNNFLELYNILCLVRPRFGEMFLTKTRVGRRHCVSKKQRDKFSDKYEKGVWASLTSNVTDDNAEKVRSILKPFVHIHNGTILRTLPGLRECVIVLKPLPLQKSIIRKVENVGSGNNFEHEYVISLASTHPSLVNAINMTEEEASLIDKPMLERLRSNPYEGVKTRFVMEVVRLCEALKEKVLIFSQFIQPLELIKEHLRKIFKWREGKEILQMDGKILPRYRQNSIEVFNNPDSDARVLLASTRACCEGISLTGASRVVLLDVVWNPAVGRQAISRAFRIGQKKFVYTYNLITYGTGEGDKYDRQAEKDHLSKLVFSTEDEFSNVRNMLSKAEMEHCSKLISEDKVLEEMTSHDQLKGMFLKIHYPPTESNIVFTYNQIAPELS

SEQ ID NO: 15842 - protein, 363 aa, Brassica napus
  misc_feature (337)..(337): Xaa can be any naturally occurring amino acid
MAPQEDAMQKQSSNKSDVIFRSKLPDIYIPNHLPLHDYIFQNISEFASKPCLINGPTGHVYTYSEVHVASRRIAAGFQKLGVNQNDVVMILLSNCPEFVLSFLAASFRGATATAANPFFTPAEIAKQAKASNSKLIVTESRYVDKIKDLQNDGVIIVCTDEEPSPIPTRSLRFTELTQSTEIETVEISSDDVVALPYSSGTTGLPKGVMLTHKGLVTSVAQQVDGDNPNLYFHSDDVILCVLPMFHIYALNSIMLCGLRVGASILIMPKFEINLLLELIQRCKVTVAPMVPPIVLAMAKSPETEKYELSSIRVVKSGAAPLVKELEYAFSAKFPNAXLRHGYCMTLAGSVLALSLGFAKEPVS

SEQ ID NO: 15843 - protein, 478 aa, Bifidobacterium longum NCC2705
MTELKSKEDVEALINKEGIEYVSVRFTDLIGVQQHFTVPASEFLKDAFTDGMPFDGSSVQGFQAINESDMKLVPDVETSFVDPFRKHKTLDVAFSIVDPLTDEPYSRDPRQVAGKAEAYLKSTGIADTASFAPEAEFFIFDKVRFENGMNRSFYEVDSIEAPWNSGVDVEEDGTPNIGFKNRVKKGYFPVPPIDHTQDLRDDMVANLQKVGLILERSHHEVAGAGQQEINYRFNTLQHAGDDLMKYKYVVHETAALAGKAATFMPKPIADDNGTGMHCHQSLWKDGKPLFYDEKGYAGLSDLARWYIGGLIKHSSSVLAFTNPSLNSYHRLVPGFEAPVNLVYSARNRSAAIRIPLAGTSPAAKRIEFRAPDPSCNPFLAFSAQLMAGLDGILNHIEPPEPVDKDLYELPPEEHAGIKQVPSSLAEAMDALEEDHDFLTAGDVFTDDLIETWIGLKRDEIDQARLSPTPLEYELYFHI

SEQ ID NO: 15844 - protein, 229 aa, Candida albicans SC5314
MVKSNVESAWETMEDTFSEIQNKFHQIYKPIDTGKPDEDDETTKKESLDITDDSTLSVSPITQLLYLARSKFYDLTPLDNSKSPFPFKNLRGKVVLIVNVASRCGFSFQYNGLEQLNKRFANDDFVLLGVPCNQFLWQEPGTNDQIVTKCKKKYDVSFQILDKINVNGEQADPVYKFLKAQKEGLWGTNRVKWNFEKFLIDKNGRVVERYSTFTRPVAITPRIEQLLES

SEQ ID NO: 15845 - protein, 318 aa, Chlamydomonas reinhardtii
MASKPSPGSADQAINDGWYTELSPMWPGQGLSLKVKEILYRGKSDFQDVCVFESESMGTVLLLDGVIQATDRDEFSYQEMIAHIPMCALERPAKKVLVVGGGDGGVLRELARYPDVEEIHMAEIDKMVPDVSKQYFPEMAVGFSDPRVTLHICDGIKYVEDSPEHSYDLIVVDSSDPVGPAEVLFEKPFFEALHRAVRPGGIVCTQAESLWLHLDIIKALAGMCKEVFAGGSVSYATTTIPTYPSGQIGMLVCAKARTEQGEGGSAPLDPRIPRQAEPGPLPQLGVPELKYYSHEVHTAAFVLPVFAKKGLEGCLTFQ

SEQ ID NO: 15846 - protein, 403 aa, Zea mays
CTPDYITPEMPQVANEFDDDDKENIPCPKSPEKSANPRSKRYRTDCSPKAREVTDFSFDHQITPVLFDSLTRDDSEEEQPKQPALEKRGGYVSQSAVALRCRVMPPPCVKNPYLNTDPCIDAAVYGGRQCNSAVFSPSIGGNGLSRYRTDFHEIEKIGYGNFSVVFKVLNRIDGCLYAVKRSIKQLHNDMERRQAVKEVQAMAALGSHENIVRYFTSWFENEQLYIQMELCDRCLSMNRNQPVKRGEALELLYQICKGLDFMHERGIAHLDVKPDNIYVRNGIYKLGDFGCATLVNRSLAIEDGDSRYMPPEMLNDKYEHLDKVDIFSLGAAVYELIRGTPLPESGSHFTSIREGKIALLPGCPMQFQSLIKSMMDPDPVRRPSAKEILRHPSFDKLHKASSK

SEQ ID NO: 15847 - protein, 1097 aa, Oryza sativa Japonica Group
MDNPEAEPDDAVLFVGVSLVLGIASRHLLRGTRVPYTVALLVLGVALGSLGANINPDLLLAVFLPALLFESSFSMEIHQIKKCMAQMVLLAGPGVLISTFFLGSALKLTFPYNWNWKTSLLLGGLLSATDPVAVVALLKELGASKKLSTIIEGESLMNDGTAIVVYQLFYRMVLGRTFDAGSIIKFLSEVSLGAVALGLAFGIASVLWLGFIFNDTIIEIALTLAVSYIAFFTAQDALEVSGVLTVMTLGMFYAAFAKTAFKGDSQQSLHHFCLFEGSLMWSYLDGQCPEVSHLAGASWGFLLLLYVFVQISRILVVVILYPLLRHFGYGLDLKEATILVWAGLRGAVALSLSLSVKRASDAVQTHLKPVDGTMFVFFTGGIVFLTLIFNGSTTQFLLHLLGMDRLAATKLRILNYTKYEMLNKALEAFGDLRDDEELGPPADWVTVKKYITCLNDLDDEPVHPHAVSDRNDRMHTMNLRDIRVRLLNGVQAAYWGMLEEGRITQTTANILMRSVDEAMDLVPTQELCDWKGDSEVARIVIDESNAEGEEARKFLEDVRVTFPQVLRVLKTRQVTYSVLTHLSEYIQNLQKTGLLEEKEMAHLDDALQVAGIFCLSFNYYYADFVVSVTNHNGNTNSSQFTWQTDLKKFKRNPPLVKMPRVSDLLNTHPLVGALPAAMRDPLLSSTKETVKGHGTILYREGSRPTGIWLVSIGVVKWTSQRLSSRHSLDPILSHGSTLGLYEVLIGKPYICDMITDSVVHCFFIEAEKIEQLRQSDPSIEIFLWQESALVVARLLLPMMFEKMATHELRVLITERSTMNIYIKGEEIELEQNFIGILLEGFLKTKNQTLITPPGLLLPPNADLNLFGLESSAINRIDYCYTAPSYQVEARARILFVEIGRPEIEADLQRSASLISQTLELPRTQSKEHSGLLSWPESFRKSRGAQNGASLTEIRDHPASFSARALQLSMYGSMINDMKSGQGQGQRRQRHRHTKASSNKAHSSSYPRVPSRSSNTQRPLLSVQSEGANMTTARQAAAAGASLPPEPEEAGRRRRRQRKAIEEDEDNSSDESAGEEVIVRVDSPSMLTFRQPSSAADR

SEQ ID NO: 15848 - protein, 472 aa, Cyanobium sp. PCC 7001
MLPQGTAWILLVGFSVLWIALGIWWGKRGKGDADDYLLAGRNIGLALSTATLMASWVTGNTTLAAPEVGYTLGLWGMFGYALAGLGLFLFAPLAVRIKRLMPTARTSGDFVRLRYGRACWAIFLLITMAYTLGFLITQGMGAGLLLQSLSGFDYRLGMVCVIGVSTIYTLFGGMRAVVGTDFIQSMLIMGLLVLVAVLGFSRFSSDQVYAALAAENPSRLNLLLPTGLLFAWNTGLFSMGEVFHNNIWWSRVFASRSSVVFRSFVLGGLAWVTVPVVTGAIALTALAQNLPIPQVNMVFPIVTAQLLGSGGAAVVFVIIFASLTSTLDSLLAASADLIAEDVVAHWLKPDASDHQVRQVARQVVVGLGLLTMVLSWQYITSMYQLLLFTGALVASTIWPIAMGLYWRQANRQAASLAMVLGSVTGLLAYWLIAPYCAALISAAVSAVVMGLGSRCWPERFDWRRLAGTAESA

SEQ ID NO: 15849 - protein, 939 aa, Colwellia psychrerythraea 34H
MKIQSSNVYVGPNVYAHFPVIRHIVDIGILEKYPSVRLGNEFIQGLLTHLPSLDQHGCSYGEPGGFIRRLKEDDGTWIAHIWEHVTLELQCIAGTEVTFGKTRGTGKVAEYNMVFQYKQRDVGLEAAILARNLLISLMPVAIQVELQTKIEDDFDFQQELADFIRFAQRKEFGPSTQSLVDAAEERDIPWLRLNEYSLVQFGHGKYQKRIQATITSETKHIAVEISCDKEDTHNLLNDLGLPVPQQRMVYSDTQAVRMAKRIGYPVVLKPLNANHGRGVSIDLNTEEQVITAFAFAKEQGTSRAVLVESFLTGLDHRMLVINGELVAVAKRVPGHIIGDGVNNISQLIDIVNEDPRRGVGHEKVLTQLELDTQAERLLEEADYTQGTVLPKGEIFYLRSTANLSTGGTAIDMTDVVHPDNKTMAERAVKAVGLDIGGVDFLTSDITQSYKDIGGGIVEVNAAPGFRMHVAPSEGKPRDVAGKVIDMLFPPSIPKRIPIAGITGTNGKTTTSRMLAHILKSAGHVVGMTSTDGVYVDGQLSVKGDMTGPVSSQIVLRDPSVDIAVLETARGGIARSGLGYNECDVAACINVQEDHLGLRGIDTLDQLAEVKRIVVEVAKDSVVLNADDPQCLKMAEHTKAKHLCYVTMNTGHSLVREHIRAGGRAVVLEKGINGDMITIFDNGTHIPLLWTHLIPATLEGKALHNVQNAMFAAALAYCLDKPLEAIQQGLRTFTTTFYQAPGRMNVFDEHHFRVILDYAHNADGVRCMSELASKLEVKGKRITVLAGPGDRRDEDIVNIAKAAAGHFDIYICKADDNRRGRGVNEVPELLASSLRAEGIDESQIYCISDEVEAINKGLELANTDDLLMIFGDAITRCWKQIINFNSGHEPEQEAEKTAVQTVVSMLETSEPDTFVLESGMKIVTDERGVRVVSEHDEDSD

SEQ ID NO: 15850 - protein, 898 aa, Saccharomyces cerevisiae
MARRRLPDRPPNGIGAGERPRLVPRPINVQDSVNRLTKPFRVPYKNTHIPPAAGRIATGSDNIVGGRSLRKRSATVCYSGLDINADEAEYNSQDISFSQLTKRRKDALSAQRLAKDPTRLSHIQYTLRRSFTVPIKGYVQRHSLPLTLGMKKKITPEPRPLHDPTDEFAIVLYDPSVDGEMIVHDTSMDNKEEESKKMIKSTQEKDNINKEKNSQEERPTQRIGRHPALMTNGVRNKPLRELLGDSENSAENKKKFASVPVVIDPKLAKILRPHQVEGVRFLYRCVTGLVMKDYLEAEAFNTSSEDPLKSDEKALTESQKTEQNNRGAYGCIMADEMGLGKTLQCIALMWTLLRQGPQGKRLIDKCIIVCPSSLVNNWANELIKWLGPNTLTPLAVDGKKSSMGGGNTTVSQAIHAWAQAQGRNIVKPVLIISYETLRRNVDQLKNCNVGLMLADEGHRLKNGDSLTFTALDSISCPRRVILSGTPIQNDLSEYFALLSFSNPGLLGSRAEFRKNFENPILRGRDADATDKEITKGEAQLQKLSTIVSKFIIRRTNDILAKYLPCKYEHVIFVNLKPLQNELYNKLIKSREVKKVVKGVGGSQPLRAIGILKKLCNHPNLLNFEDEFDDEDDLELPDDYNMPGSKARDVQTKYSAKFSILERFLHKIKTESDDKIVLISNYTQTLDLIEKMCRYKHYSAVRLDGTMSINKRQKLVDRFNDPEGQEFIFLLSSKAGGCGINLIGANRLILMDPDWNPAADQQALARVWRDGQKKDCFIYRFISTGTIEEKIFQRQSMKMSLSSCVVDAKEDVERLFSSDNLRQLFQKNENTICETHETYHCKRCNAQGKQLKRAPAMLYGDATTWNHLNHDALEKTNDHLLKNEHHYNDISFAFQYISH

SEQ ID NO: 15851 - protein, 575 aa, Arabidopsis thaliana
MISPVEHDPQGQVKQQQAAGVGILLQIMMLVLSFVLGHVLRRHRFHYLPEASGSLLIGLIVGILANISDTETSIRFCPPPSIPEFSLLSFPRSLVCSFYSVSGRGLISTKSSSSCFCCLPSYYILCFNICISSFKFAAAMLCIMDVIFLDIIHLFEPSQVSVFNLNHSFLTLEPLLPLLSSELLSLQLLLVVCYLGGSMYLMYKLPFVECLMFGALISATDPVTVLSIFQVLLLFLLLSVSTGYKYSHDVGTDVNLYALVFGESVLNDAVSFYYLLRYWALPFKTMSLVNRQSSSGEHFFMVVIRFFETFAGSMSAGLAISFLNSFYTVVFTLLILSEHIVNVMSLFSLFSTSIHACRRCWSLRHCFYTLHRNCNRRVMKRYTFSNLSEASQSFVSSFFHLISSLAETFTFIYMGFDIAMEQHSWSHVGAVNVFGCAYLVNLFRQENQKIPMKHQKALWYSGLRGAMAFALALQSLHDLPEGHGQIIFTATTTIVVVTVTFVLLIGGSTGKMLEALEVVGDDLDDSMSEVNSRRSTLISLNIGASSDEDTSSSGSRFKMKLKEFHKTGDGDGDGE

SEQ ID NO: 15852 - protein, 440 aa, Triticum aestivum
MASQISGTIASSGVCYNDKHRMPCKLKALRCVASNCLPLEVEVRKWMNGCHIIRSFPNDRHWKTNAKSNGYLLQQGPNVWCHSYGSRSASETKECNIPEYCTNPYRDFDEHPRGMSHFSDSQVAAQEKTLYSTQGLSKACQFVYNDAKFVNERAQSDILLLSRGITRLNKRASKDVAVLGLGFLKLDDCLKARARKDTRKIDNSVKERAAHLTNFARILKERAHSDLKKAADQHWSDGALEADLRRADMVVRRRAMEDAFMALKFVRDIHDMMATKLQYQFITLEKNGKILKLFPREVSTDQIAAIEDAYLNMASALSEADGIDYTNPEELELLVAALIDLDAMDGKKSVSLIVECSSSPDVNTRKALANALAAAPSMWTLGNAGMGALQRLAQDSNPAVASSAARAIGELRKQWELEEGDSLRFVMNQNLISEETDSDS

SEQ ID NO: 15853 - protein, 374 aa, Ostreococcus tauri
  misc_feature (1)..(2): Xaa can be any naturally occurring amino acid
XXGGSTRTSAPCWIRPPGTRFIVDGFEWDLGRGGACETWFLTHFHADHHRGLTKTFDKGIIYGTKETLELVRMKIQVPALRLRALEIGVPARVDGVQVTFIDANHCPGAVMILFEFPERPDASPVLHTGDFRFSARLARDETLVRIAASPKRPILILDTTYCSLEHDAFPTQEYVLNAVREALTHEDNLDGARKLFLFGTYTVGKEKVFFEAARTLGRKVYVGAAKRSVLDALSLTRDEREALTRDDKRTNLHVVPMGSTSFSKMASILKYYKSRFDTVVAFRPTGWTFSANKKTSRASSRRQRGRLVQYGLPYSEHSSLSELRAFIRFINPRSIFPHVGNDGGEKLNDMLKLLRASDEEYAAMREEYTASMPT

SEQ ID NO: 15854 - protein, 231 aa, Solanum lycopersicum
MVPEVDADHALMIEENYPNPMLIDPKRDRFPCCIVWSPLPVLSWFIPFIGHIGICREDGVILDFAGPNFVSVDNFTFGAPTCYFQLSREQCCCLSPYSAEPTGEYVENHDESGGNVDTWESAIRKSIQEFQHQSYSIFTCNCHSFVANGLNRLGFQSGGWNVVNLAIFIFLKGRWVNRTAMVKTYLPPLVVLGLGLIFGGGTFLTYLLIFMFVLIGWFLLGTYCFKKLIHV

SEQ ID NO: 15855 - protein, 378 aa, Streptococcus pneumoniae R6
MKHSVHFGAGNIGRGFIGEILFKNGFHIDFVDVNNQIIHALNEKGKYEIEIAQKGQSRIEVTNVAGINSKEHPEQVIEAIQKTDIITTAIGPNILPFIAELLAKGIEARRVAGNTQVLDVMACENMIGGSQFLYQEVKKYLSPEGLTFADNYIGFPNAAVDRIVPAQSHEDSLFVVVEPFNEWVVETKRLKNPDLRLKDVHYEEDLEPFIERKLFSVNSGHATSAYIGAHYGAKTILEALQNPNIKSRIESVLAEIRSLLIAKWNFDKKELENYHKVIIERFENPFIVDEVSRVARTPIRKLGYNERFIRPIRELKELSLSYKNLLKTVGYAFDYRDVNDEESIRLGELLAKQLVKDVVIQVTGLDDQELIEQIVEYI

SEQ ID NO: 15856 - protein, 802 aa, Physcomitrella patens subsp. patens
MGLGKTIQVLVFLAGLHNSGMYTPSIVVCPVTLLRQWKREAKKWYPAFNVEILHDSAVASQKSSNKKKRKPKRGSDEEFDEEESDYSENEQEKPVKVKKDRWDGMIDRVVDSSDGIILTTYEQLRIVRDKLLDINWGYAILDEGHRIRNPDAGTTLICKQLQTVHRIIMTGAPIQNRLTELWSLFDFVFPGKLGVLPVFQAQFSLPIAIGGYSNATPLQVSTAYRCAVVLRDLIMPYLLRRMKSDVDAHLPKKTEHVLFCSLTKDQRSAYRAFLASSEVEQIFDGNRNSLFGIDILRKICNHPDLLEREHSAGHPDYGNIERSGKLKVLAQVLELWKTQGHRVLLFTQTQQMLDIVENYVTSKGYVYRRMDGNTPVKQRMQLIDEFNEGDHVFIFILTTKVGGLGTNLIGANRVVIFDPDWNPSTDMQARERAWRIGQKKEVVIYRLITRGTIEEKVYHRQIYKHFLTNKILRDPQQRRFFKARDMRDLFTLQEENAATETSTLFAEVGGSNRRQRGTKKDSQEEALNKHRPEQDNSHNSEDGEPQEEESRILKNLFDANGIHSAMDHDAILGIHESERVMIDHEASRVAERAALALQQSRRLRSADNVSVPTWTGRSGVAGAPATVRQRFGSTANARLVASSSQGQTRSEESGNQPAIGISAGSSAGRAFTSADLLARVRERKLDTPGESSTLQDFFLSTISIGSVPNASPSTRPTTSRPPSGPGRNGEIPVQPEVLIRQLCTFIQREGGSVASSHVVNQFRDRISSRDVPLFRQLLKQIAVLQKGSLESKWVLKPEYQER

SEQ ID NO: 15857 - protein, 450 aa, Synechococcus sp. WH 7803
MPTPRMSTEPSNRKGLLLILGAGGIAAAVAIAAPGLGLPSTTSSSITDSPKEVIDQVWQIVYRDYLDSTGQYSPERWTSLRRDLLNKSYAGTDESYEAIRGMLASLDDPYTRFLDPKEFKQMQIDTSGELTGVGIQITLDKDTKEIVVVSPIEGTPASKAGVQPKDVIVSIDGESTKGMTTEDAVKLIRGQEGSEVTLGLRRKGEVVTVPLKRARIEINAVESRLNTGSDGTKVGYIRLKQFNAKASREMRTAIRELEKQGAQGFVLDLRSNPGGLLEASVDIARQWLDEGTIVSTKTRDGIQDVRRATGSAVTDRPVVVLVNEGSASASEILSGALQDNNRAVLVGQKTFGKGLVQSVRGLSDGSGLTVTIAKYLTPKGTDIHKNGIRPDVPVELSEEEIQSLTVEQLGTGKDSQYRTAETTLIKALRSPERGQAYRPGSANLQSALRR

SEQ ID NO: 15858 - protein, 243 aa, Solanum tuberosum
MPSGRLSLMDLEPAYKMESIRAVQDIQHEFWPLDEINLENAKFPCCLVWTPLPVVSWLAPFVGHVGICREDGSAVAFSGSNFINVDDFALGSVAKYLQLDRKQCCFPRNLAAHTCKHGYKHTEFGSAISWDDAIQSSVRHFEHKSYNLFTCNSYSFLANCLNKLCYGGSMDWNMINVGALLLFKGHWVDNMSILRSFSPFMLVVCFGIFMVGWPFLVALLAFSLLLLAWFIFGTYCLKNMLDS

SEQ ID NO: 15859 - protein, 275 aa, Bacillus cereus ATCC 14579
MELWFTEKQTKHFGITARINRTLHTEQTEFQKLDMVETEEFGNMLILDGMVMTTEKDEFVYHEMVAHVPLFTHPNPENVLIVGGGDGGVIREVLKHPSVKKATLVEIDGKVIEYSKQYLPSIAGALDNERVEVKVGDGFLHIAESENEYDVIMVDSTEPVGPAVNLFTKGFYAGISKALKEDGIFVAQTDNPWFTPELITTVFKDVKEIFPITRLYTANIPTYPSGLWTFTIGSKKHDPLEVIEERFHEIETKYYTKELHNAAFALPKFVGDLIK

SEQ ID NO: 15860 - protein, 159 aa, Vibrio angustum S14
MTKIYDFYVKALSGEVLSLSDYEGKVLLVVNTASKCGFTPQYEALQALYEKYRDQGLVILGFPCNQFGGQEPGEESQIKQECLINYGVTFPMFSKVDVKGRDAEPLFSYLVKQLPGLLGNDIKWNFTKFLISREGEPMKRYAPTTKPFAIEDDIIKLLS

SEQ ID NO: 15861 - protein, 922 aa, Bacillus subtilis subsp. subtilis str. 168
MASLKEILIHVEQMEDGSFTLSAFDENEQPLPYSHMKKHLFQWHESSFYGTFLEDVSFIGTTAVLLSPWMTVELLGKNSFNSFSSVQLTEETEPLIEAASTIYEFIADGDFMPDYDAWTNGVFRWKDRDNILEGFTAEWFSAAVQDYIQYDDDLREKWEHIKEKSPAVTTFRGHFLDEEDFLEGIGWIDDQSPFTVGLRLNEPDFDGDEWKIEMFLRDKKSGAVEFFDGLKSLKKSWQAYSDKIAREQDRFHRTVPWLSFDSGTTLISEEEAWIFLSEASETLVDMGVEILLPSWWQIVRDSNMMLKAKVSSSPRGESFVGMNALLDFNWRFATNGIELTEAEFNELVASNRRLVNIRGQWVKIDPQFIKQMKRLMEKAESEGLHMSDILARELMDQQDGGLEDSDLIDTSAFAGIQFDLSKQLRSLIRKLTAAENLPEHKVSPSFKGTLRPYQKYGMNWLLFLRESGFGACLADDMGLGKTIQMIAYFLHVKESGRQKTPHLIIAPTSVLGNWQRELQTFAPDLSVALHYGPRRPKGDDFAAHYENADVVLTSYGLSHADTEELSSVTWNTICLDEAQNIKNAHTKQSRAIRKLKGLHHIALSGTPMENRLTELWSIFDFMNKGYLGSLTGFHKRYVLPIEKDRDEKRIGQLQQLIRPFLLRRTKRDEEVALNLPEKLEEKEFIPLSAEQASLYEQLVKDTFDHMTSLTGMQRKALILSMLGRLKQICDHPALYLKEEQTELLAGRSVKLEKLLELMTAIRAQNESCLIFTQYIQMGNMMKRLLEKTFGEPVQFLNGSLSKQERDTLVEKFQRKEYPTLILSLKAGGTGLNLTAANHVIHYDRWWNPAVENQATDRAYRIGQERFVHVHKMITTGTIEEKIDVMLESKQTLNDQIIQSENWITELSTQELEELFTLSATAQ

SEQ ID NO: 15862 - protein, 628 aa, Blastocladiella emersonii
MSTEAFNGGIGIDLGTTYSCVAYMTPDGRVEVIANEQGNRTTPSYVSFSEEKLVGDAAKNQAAMNPKNTVFDAKRLIGRRFDEPSVKKDMALWPFTVVDKSGAPYIEVEYMGETKTFSPQEISAMVLVKMREIAEMKIGQTVSKAVVTVPAYFNDSQRQATKDAGSIAGLDVLRIINEPTAAAIAYGLDQKNKEAKGEKNVLIFDLGGGTFDVSLLTIADGVFTVKATAGDTHLGGEDFDNNLVNHFAAEFKRKHKKDLTSDKRALRRLRTACERAKRSLSTLAKATVEIDSLFQGVDFYSTITRAKFEEINSVPFNSTMDPVKQVLKDAKFDKKNVDDVVLVGGSTRIPKIQALLSEFFDGKELNKSINPDEAVAYGAAVQAAVLTNTASAATSDLLLLDVVPLSLGVEMEGGIMGVVVPRNTPIPTIKKRVFTTTHDNQTTVEFPIYEGERTQTKDNNLLGEFTLSGLPPAPRGVPELEVIVEVDANGLLKVTAIERTSGLSANVTIANKAGRLNADEIDRLVKEAEVYKRADAEHTARIEAKQQLEEYIYQVEATMQDANVALKLKNSDAIIEELGEAMEWLDLNKDASKDELIARKKKVERTVTKAFNAMYAQDAKKGGRRARK

SEQ ID NO: 15863 - protein, 594 aa, Mycobacterium sp. MCS
MTDLGSHLDPDSDHTEAITLGLHDASPQHLVDRMADDVVLELGWGRLIFGQTFADPEKLAKVLQHEGPGRRDICIYARESHVLVARSPSELFIDPSHTYRLRFTEGEETPDPTPTGFTVRSLREPSDADAMNRVYVQCGMVPAPTDVIWENHNQVDAVDYLVAVRDDDGSVVGTVTGVDHKLLFDDPEDGSSLWTLAVDPTSSLPGVGAALTRALARLFRGRGRSYMDLSVAHNNTAAIALYEKLGFQRVPVLAVKRKNAINEPLFTHSPETVDDLNPYARIIADEAIRRGIWVEVLDAGAGEMRLSHGGRSVITRESLSEFTSAVAMARCDDKRQTRRIVSEAGITVPKGRLATFDEKDHEFLAEVGDVVVKPTRGEQGKGITVGVEGPEELDAALARAREQHPEVLIEQRAPGDDLRLVVIDGKVVAGALRMPAEIVGTGKHTIRELIETQSRRRAAATGGESQIPMDKVTEGTVKEAGWSLDDVLPEGERLRVRRTANLHQGGTIHDVTAEVNPELCRVAVAAAEAIGIPVTGIDLLVPDVTGVDYVFIEANERPGLANHEPQPTAAAFVDFLFPMQPGLPQAWTPEETPA

SEQ ID NO: 15864 - protein, 510 aa, Synechococcus sp. WH 5701
MPPFSPLQVRVLLATAALSSSVGLVLELMLVTQASYLLGDVALATGMVIGTFLAAMGLGAWLSQFVGGGERPQQRLLSAFLLVELCLSPLCLLGPLALFALFSVDGPLWLALVVVTVLVGVLGGMEVPLLTRLLESQQHLRKALARVLALDYLGALLGSLLFPLLLLPRFGLLPTAGLLAMMPLISSAVLCWVFPGCRRWRWPVSGALPLAALAAWALVPLGNRIEDGLYDDPVVGRVQSRHQRIVLTSRRGDLRLFLDGNLQFSSLDEYRYHEALVHPALALHGRPERVLLLGAGDGLAAREILRWPGVRRLDLVELDPQMLQLARAHPFLRRLNQASLDDPRVQTHIGDAFELVRRLPGPYDVVIADFPDPDSPALARLYSVTFYGRLLGRLAPAGLLVTQASTPFFTPKVMASIQATMAELDLVTRPYSVDVPSFGPWGFVLAHRPGRPLQVATPPFEGRWFDRAQLETLFVLPRDLRPPGDAVVLPNRLTRPVLDGYQRQSLWRQD

SEQ ID NO: 15865 - protein, 388 aa, Macadamia integrifolia; identical to SEQ ID NO: 8933

SEQ ID NO: 15866 - protein, 333 aa, Nostoc sp. PCC 7120
MPLVTSIIQKIAPQIGAVVVVDPEYELVGHITFKNGKKSFFSTTKLNINGFGSAEIAKDKGYSKFFLKHFGYHVTEGQTFFSQKFCKKIGNKRDIDAGFEYAKLIGFPVIIKPINLSQGKLVTKVHNKTEYYQVAKKIFRANAGLIVERFYLGKDYRIVVIDDEIIAAYQRLPLSVIGDGKSTVTELIQRKQDGFIQTLRKKIIDVDDFRIKRKLQKQSLTLNSIIPNGKVVYLLDNANLSSGGEAVDVTDNIHPDFQKLALNVTKDMGLRLMGLDIITQDITRPMVDYVIIEVNGSPGLTHYASIGDIQTKRVEDLYLKVLKALETEYNSKN

SEQ ID NO: 15867 - protein, 609 aa, Coprinopsis cinerea okayama7#130
MTPATVYRSRAPPVPVVRKSVFTYLFEDQYMNEGALPAKPAYIDASTGQTLTREQVKTYSLKFAWGLRNRLSLRRGDTVMLMSPNSLSWPLALFGCVAAGLKISFAGCSATPRELSWQYLDSKPRVILVASHLVPVVKDMFALIGEESKGERDPRIWVIDDLGDYVSPPPQTSTSKSNLATNANDCVELVRGGKLERAERFDGDAAEETVYICYSSGTTGKPKGVETTHKNVCTVLPMTQALWKGCETSHDVYLAVLPAYHMFGLAMQLHYPLRRGKPVVMMNQGFSSEAFCQAVQTYRITSLLLVPPILLTLSEYPDLEKYDLGSLTNIASGAAPLSLALANKFLDQLKKQGANVILIQGCGSTETTCPCQIVAPENAFSKFGSVGELLPNIEARIMVELSPTATSTATASVDGSLFRDANDGEEGEMWLKGPTITKGYLNNPQANASTFTRDGWFRTGDVLRRDPDGYYYIMDRKKEMLKYKGHQIAPAELESVLMENPEVGDVGVIGIMDVYSGNELPRAYVRPANADILKSPTLKKAFELRLAKWFEGHVSNYKFLRGGVIAIPDVPKSATGKILRKELREWAKAEQRKDREIQGRVDRSEAAKL

SEQ ID NO: 15868 - protein, 369 aa, Macadamia ternifolia; identical to SEQ ID NO: 8939
  misc_feature (7)..(7): Xaa can be any naturally occurring amino acid

SEQ ID NO: 15869 - protein, 285 aa, Xanthomonas campestris pv. vesicatoria str. 85-10
MSTNDNWYIEHFQPTGSAIGFRISGKLDEVQSPFQKIEIYQTTDWGKLMLIDGAVMLTSRDNFFYHEMISHPALFTHPAPKRVVIIGGGDCGTLREVLKHPGVESATQCDIDEQVTRMSEKYFPELCDANHDARAELLFDDGVAYMANCPAGSVDIVIVDSTDPVGPAEGLFNKAFYESCFKALKDEGILVQQSESPLALLDLINEMRTEMGKAGFQSFKTLPFPQPCYPTGWWSVTMASKQANADFAFRQADAQAKGFDTLYYTAHLHTGVLVAPPFVAKALGE

SEQ ID NO: 15870 - protein, 74 aa, Glycine max
AQVSRICNGVQNPSLISNLSKSSQRKSPLSVSLKTQQHPRAYPISSSWGLKKSGMTLIGSELRPLKVMSSVSTA

SEQ ID NO: 15871 - protein, 1153 aa, Physcomitrella patens
MESMSTVAPAPSTAATEEVGPEVAILFVGVALFLGMVSRHLFKGSRIPYTVVLLLLGIGIGGLEYGVKNLGVLGDSIRMWSNIDPDLILFLFLPALLFESSFAMDFHQIKRCFFQMLLLAAPGVLISTFLLGVATVKVFPYNWNWSTGLLLGGLLSATDPVAVVALLKELGASKKLSTLIEGESLMNDGTAIVVFRLFLQMVLGKHFSAGDVVSFLSRVVFGAVALGLLFGIVSVIWVGRVFNDTVIEITLTLTASYMAFFVAEESASVSGVLTVMTVGIFFTAFARTAFTGESAQSMHHFWEMISYIANTLVFLLSGVVIAESILRSQDKIQGRDWGYLLLLYLFVQISRAMVVGLLYPGLKYFGYGINWKEAIVLIWAGLRGAVALSLSLSVAQVGQHDPTQNTYLSKLTEARFVFFTGGVVLLTLIINGSTTQFLLLFLKMDTITETKSRMLEFAKYEMYSKALEAFGELGDDEELGPADWNTIRKYVSCLSYEENKPTHPHGPPSFALPDGEYAKQQMTDTRTRFLNGLQAAYWNMLDEGRITQTAALILMQSIDEALDKVKHHTALQDWEGLRPHIHFPGYLKYFSWRSTSVLPRRASTYFLIQQLELACYIAAAFLRAHRMTRNHLRDFIGESEVTEAVIQESEAQAQHARLFLEDVRLSFPQVLRAVKAKQVTHAILLHLTTYVESLENAGLFESKEAVHLHDAVQIDLKKLLRDPPIVEMPSAEQTLQNQPFIGAMPTSVQKPLLDVSKEYMKLQGSVIYREDMKSDGIWLITNGVVKWSKKAVGGQRLRQPTFSFGSTLGLYEVLTGKPYLCDVVADSVVHCFFVERSRILFIQKERADLEDFLWQESALAVAKIVLGPQFDMATLQDIRALVMEGSSMRIFLRGEVFELRHKEMGLLLEGFVRQENSTELITAPAGLTAKILLPSPTGSWSNISLQQPTVFHAEARSRVLLFESSKVGEILSQGSSQLLAVPRKTSRSMLRLSSKTSTNTRTKVDRHSSHNEIRIASDHSIPIAQAWGSGSSCVPDKYTAKALEISVFGSEVDVRDKRRADEIPLDAQSRFTQSHSNLVKRVSLMMQERFDNKQTSMPKRKIASQENMTVPMSLLPHQSEPKPDDSSDDSDKEEHIVRIDSPSFLFHNSRREL

SEQ ID NO: 15872 - protein, 323 aa, Burkholderia mallei ATCC 23344
MPFVRALSESARARGFSALLPPSIIQTIGTARPAAPAALSTTLLFHPTPDVAYGFPNARRLARIESEYQEIEVWETSLLGRLFTLDGRPMTSVGDEFVYHECMTHPAALAHPAPKKALVLGGGDGGAARQLLRHPCIERIVVAELDAAVVDMARRFLGDVHQGALDDPRVELAIGDAARYVDHACEHFDLAVFDLTPPDSPAAGLYTPAFYTRLKRILTPQGAVSLHLGSPLYHGARIAALLAGLRERFAVVAPLCAHVPLYGSPWLMAIASDTLDAASLFSHDIDARLAERHIEGLRFYDAKLHSALFTLPHALRDTLGMHR

SEQ ID NO: 15873 - protein, 327 aa, Arabidopsis thaliana; identical to SEQ ID NO: 14080

SEQ ID NO: 15874 - protein, 152 aa, Oryza sativa Japonica Group
MVRTPERSYSCSSAKEVAYSCGYCGYALNLSSSTRNTANIGSKYGKQIRKGVISFFAIDESRFTQTDEVSCMPYFHSRRSWGLFRKRTRLICRKCGGRIGNAYEDEDSTLYDGSDDLHMSSEGYSMSSGKKYVIKINALQPSTDDSGVPFTL

SEQ ID NO: 15875 - protein, 469 aa, Streptomyces filamentosus
MFQNADEVQKYVADNDVKFIDVRFCDLPGVMQHFTIPAATFDPAEELAFDGSSIRGFQAIHESDMALRADLSTARVDPFRRDKTININFFIHDPITGEQYSRDPRNIAKKAEAYLASTGIADTAYFGPEAEFYVFDNVRFQTSANESFYHIDSEAGAWNTGAVENNRGYKVRYKGGYFPAPPVDHFADLRAEISLELDKNGLQVERQHHEVGTAGQAEINYKFNTLLAAADDLMLFKYIVKNVAWRNGKTATFMPKPIFGDNGSGMHVHQSLWQGGSPLFYDEQGYAGLSDTARYYIGGILKHAPSLLAFTNPTVNSYHRLVPGFEAPVNMVYSQRNRSAAMRIPITGSNPKAKRVEFRAPDPSSNPYLAFSALLMAGLDGVKNKIEPAEPIDKDLYELAPEEHANVQQVPTSLPAVLDALEADNEYLQAGGVFTSDLIETWIDYKRTNEIAPIQLRPHPHEFELYFDI

SEQ ID NO: 15876 - protein, 473 aa, Synechocystis sp. PCC 6803
MARTPQEVLKWIQDENIKIIDLKFIDTPGIWQHCSFYYDQLDENSFTEGIPFDGSSIRGWKAINESDMCMVPDPNTATIDPFCKEPTLSMICSIKEPRTGEWYNRDPRTIAAKAVEYLRGTGIADTVYFGPEAEFFLFDDIRFGQTENSSYYFADSVEGRWNTGREEEGGNLGYKPGYKQGYFPVAPTDTAQDIRTEMLLTMAGLCVPIEKHHHEVASGGQNELGIKFDKLVNSADNLMIYKYVIKNVAKKYGKTVTFMPKPIFNDNGSGMHVHQSLWKDGQPLFAGDKYAGFSQMGLWYIGGILKHAPALLAFTNPTTNSYKRLVPGFEAPVNLAYSQGNRSASVRIPLSGGNPKAKRLEFRCPDATSNPYLAFAAMLCAGIDGIKNQIDPGEPLDVDIYDLSPEELAKIPSTPGSLEAALEALEKDHEFLTGTGVFSPDFVESWIEYKLDNEVNPMRLRPHPYEFSLYYDC

SEQ ID NO: 15877 - protein, 287 aa, Pectobacterium atrosepticum SCRI1043
MSQKEIWYETLHANFGQYFSVDRVLYHEKTDHQDLIIFENDALGRVMALDGVVQTTERDEFIYHEMLTHVPLLSHGNAKRVLIIGGGDGGMLREVSRHHGVEQITMVEIDAGVVEFCRQYLPNHSAGSYDDPRFNLVIDDGVNFVRQCSEKFDVIISDCTDPIGPGESLFTSDFYQGCARSLNEGGIFVAQNGVCFLQQDEAIGSHKKLSHYFNDVSFYQAAIPTYYGGIMTFAWASNNPALRQMDIVTLRQHFAQSGITCRYYTPDVHIGSFALPQYLLSALQNAQ

SEQ ID NO: 15878 - protein, 581 aa, Mycobacterium tuberculosis CDC1551
MRRWLAPWPGPPSPPRGASAPGSAPPPRARCRGKTRLGECARPVGRVSSLARGISRRRTEVATQVEAAPTGLRPNAVVGVRLAALADQVGAALAEGPAQRAVTEDRTVTGVTLRAQDVSPGDLFAALTGSTTHGARHVGDAIARGAVAVLTDPAGVAEIAGRAAVPVLVHPAPRGVLGGLAATVYGHPSERLTVIGITGTSGKTTTTYLVEAGLRAAGRVAGLIGTIGIRVGGADLPSALTTPEAPTLQAMLAAMVERGVDTVVMEVSSHALALGRVDGTRFAVGAFTNLSRDHLDFHPSMADYFEAKASLFDPDSALRARTAVVCIDDDAGRAMAARAADAITVSAADRPAHWRATDVAPTDAGGQQFTAIDPAGVGHHIGIRLPGRYNVANCLVALAILDTVGVSPEQAVPGLREIRVPGRLEQIDRGQGFLALVDYAHKPEALRSVLTTLAHPDRRLAVVFGAGGDRDPGKRAPMGRIAAQLADLVVVTDDNPRDEDPTAIRREILAGAAEVGGDAQVVEIADRRDAIRHAVAWARPGDVVLIAGKGHETGQRGGGRVRPFDDRVELAAALEALERRA

SEQ ID NO: 15879 - protein, 446 aa, Methanococcus maripaludis S2
MNAVEQAMEYIKTNNVKFIRFQFVDIHGEPKNIAYPVKAGAAGEEELYDVLEKGVYFDGSSIEGFVSIESSDMMLKPDLKTLSVLPWRPTEKSVARVICDVYTTNGKPFEGDPRGCLKRVLAKFDEELGGEFFVGPEPEFFILKEDACGSWVPADDAGYFDLEPLDGGCDIRRKIVFALENLGFHVEASHHEVAEGQHEVDFKFADAVKTADSVVTFKTTIKTLAAQDGLKATFMPKPFFGINGSGMHCHQSIWLNGEPSFYDESAQYQLSETCMSYVAGILDHAKSIVAVTNPTVNSYKRLVPGYEAPVNIAWANSNRSAIVRVPAPRGKGTRIEFRAPDPACNPYLAFTVMLAAGLDGVKRKLSAIEPVEKNIFAMSEAQKKAEGIESVPANLKAALDELENNSVLKDALGKHIFENFIEIKNAEWDSFRTAVTDWETKQYLKI

SEQ ID NO: 15880 - protein, 286 aa, Alkalilimnicola ehrlichei MLHE-1
MRRDDNWFTEVLEEEGMAFSLRVREKLHEERTAFQHIEVYETEAWGRLLVIDGCVMLTSRDNFVYHEMMSHPALFTHPDPRRVAIIGGGDCGMLREVLKHPGIESVVQVDIDAGVTRAAERYFPELTEANDDPRATLLFDDGVAWIQDQPAGSLDVVIVDSTDPVGVAEGLFGPGFLGQVYRVLGDQGLMVQQSESPILHRDTILERLHGHMRGSGFAPVVTLPYPVVSYPSGWWSATLASKGPHPAAFRESDARAKAFATLYYNADIHRAALAAPEFCKGLLTDQ

SEQ ID NO: 15881 - protein, 468 aa, Sulfitobacter sp. EE-36
MSTKDFLKKIKDEDIEYVDVRFTDTRGKLQHVTIVSDLVDEDFVEEGFMFDGSSIAGWKSIEASDMKLMLDTDTAYVDPFYAEKTICVHCSVVEPDTGEAYERDPRGTAQKAEAYLKASGIGDVAYMGPEAEFFLFDNVKFSNSINKVSYEVDASDASWNTDTDYEMGNMGHRPGLKGGYFPVNPTDEAQDLRAEMLSTMKRLGMKVDKHHHEVASCQHELGLIFGTLTEQADELQKYKYVIHNVAHAYGKSATFMPKPIYGDNGSGMHVNMSIWKDGKPLFAGDKYADLSQEALYFIGGILSHAKSLNAFTNPATNSYKRLIPGFEAPVLRAYSARNRSGCVRIPWTESPKAKRVEARFPDPAANPYLCFAALLMAGLDGIKNKIDPGEAMDKNLYDLPAEELADIPTVSGSLREALEELQSDMDYLLAGDVFTKDQIEGYIELKMEEVHKYEHTPHPVEFGMYYSC

SEQ ID NO: 15882 - protein, 1489 aa, Saccharomyces cerevisiae
MSLAVLLNKEDKDISDFSKTTAGKSAKKNSRERVADVAPTRVLDKKQAYLSQLNSEFNRIKRRDSIEQLYQDWKFINLQEFELISEWNQQSKDWQFDNTNDSQDLHFKKLYRDMSMINKEWAEYQSFKNANLSDIINEKDADEDEEDDEDELEDGEEDMEEDEASTGRHTNGKSMRGNGIQKSRKKDAAAAAAIGKAIKDDQTHADTVVTVNGDENEDGNNGEDEDNDNDNENNNDNDNDNENENDNDSDNDDEEENGEEDEEEEEIEDLDEEDFAAFEEQDDNDDEDFNPDVEKRRKRSSSSSSSTKLSMNSLSLITSKKINKNITINSDRPKIVRELIKMCNKNKHQKIKKRRFTNCIVTDYNPIDSKLNIKITLKQYHVKRLKKLINDAKREREREEALKNNVGLDGNDLDNDEDGSESHKRRKLNNNTANGADDANKRKFNTRHGLPTYGMKMNAKEARAIQRHYDNTYTTIWKDMARKDSTKMSRLVQQIQSIRSTNFRKTSSLCAREAKKWQSKNFKQIKDFQTRARRGIREMSNFWKKNEREERDLKKKIEKEAMEQAKKEEEEKESKRQAKKLNFLLTQTELYSHFIGRKIKTNELEGNNVSSNDSESQKNIDISALAPNKNDFHAIDFDNENDEQLRLRAAENASNALAETRAKAKQFDDHANAHEEEEEEDELNFQNPTSLGEITIEQPKILACTLKEYQLKGLNWLANLYDQGINGILADEMGLGKTVQSISVLAHLAENHNIWGPFLVVTPASTLHNWVNEISKFLPQFKILPYWGNANDRKVLRKFWDRKNLRYNKNAPFHVMVTSYQMVVTDANYLQKMKWQYMILDEAQAIKSSQSSRWKNLLSFHCRNRLLLTGTPIQNSMQELWALLHFIMPSLFDSHDEFNEWFSKDIESHAEANTKLNQQQLRRLHMILKPFMLRRVKKNVQSELGDKIEIDVLCDLTQRQAKLYQVLKSQISTNYDAIENAATNDSTSNSASNSGSDQNLINAVMQFRKVCNHPDLFERADVDSPFSFTTFGKTTSMLTASVANNNSSVISNSNMNLSSMSSNNISNGKFTDLIYSSRNPIKYSLPRLIYEDLILPNYNNDVDIANKLKNVKFNIFNPSTNYELCLFLSKLTGEPSLNEFFRVSTTPLLKRVIERTNGPKNTDSLSFKTITQELLEVTRNAPSEGVMASLLNVEKHAYEREYLNCIQRGYHPNVSAPPVTIEVLGSSHVTNSINNELFDPLISQALSDIPAITQYNMHVKKGIPVEDFPKTGLFPEPLNKNFSSNISMPSMDRFITESAKLRKLDELLVKLKSEGHRVLIYFQMTKMMDLMEEYLTYRQYNHIRLDGSSKLEDRRDLVHDWQTNPEIFVFLLSTRAGGLGINLTAADTVIFYDSDWNPTIDSQAMDRAHRLGQTRQVTVYRLLVRGTIEERMRDRAKQKEQVQQVVMEGKTQEKNIKTIEVGENDSEVTREGSKSISQDGIKEAASALA

SEQ ID NO: 15883 - protein, 1096 aa, Cryptococcus neoformans var. neoformans B-3501A
MNPLLAASSAANPNNTSVDDDKLSDYVPNSRDLSVSRAPSVIASEDAGHLDTAPQTPEPEEDEEDEIPEDELNEEELMDGKKITPSAAKRAAQANAKKAQTAERKAQHAEIGKKRSAIEQARFADSMKRFNYLLGQTELFQHFIDLKRQREPQFAQMLDEQIAKQAGKGKKKAIDNRHRKSEKEEDEELLKDEEEDEPFVFEESPAYVKGGKMRDYQVQGLNWMVSLHHNGINGILADEMGLGKTLQTVAFIGYLKFHLGIPGPHLIIVPKSTLDNWAREVAKWVPGFDVVVLQGTKEERGELISRRILTQDFDVLITSYEMCLREKSTLKRFSWEYIIIDEAHRIKNVDSLLSQIIRTFVSRGRLLITGTPLQNNLQELWALLNFILPDVFSSSEDFDAWFKTKDEADPDAVVKQLHKVLRPFLLRRVKADVEHSLLPKKEINLYVGMTEMQRKWYKSLLEKDIDAVNGMTGKKEGKTRLLNIVMQLRKCCNHPYLFDGAEPGPPFTTDQHLVDNAGKMVILDKLLKSMKAKGSRVLIFSQMSRMLDILEDYCQFRGHQYCRIDGSTAHEDRIAAIDEYNAPESEKFVFLLTTRAGGLGINLVTADIVVLFDSDWNPQADLQAMDRAHRIGQTKQVYVFRFITQDAVEERILERATQKLKLDQLVIQEGRAQQTAKVAQNKDDLLDMIQHGAEKIINNKESMLIDDDIDEIIRRGEERTKEINSKYAGLDLDALNNFKSESLVNTWEGEDYGNRQQKRPLLWIEPSKRERKTNYSVDQYYRDSLKTGGPKADKPKVARAPKQVVVNDFQFYPPRLAELQNKETDWHRKSINYQVPVREPEEGETQEQVEAEQKEEQERIDNAVPLSEEEVAEKETLVGEGFHDWQRRHFQSFIRALEKYGRDDLEKVVTDVADRTEDEVREYAAVFFERYKELKDWERIMDRIRAGEEKIKEQQDRIDVLHRKIKATRFPLQELKIVYGQNKGKAYSDEEDRFLLVRMHHHGIDRDDCYELIKRDIGEWPLFRFDWFFKSRTPDELRRRAQTLLLCIMKEDDKVEDEKKPIKGKKRPIDELKSGPGSRDTTPSAAGSKGSKKKKV

SEQ ID NO: 15884 - protein, 205 aa, Triticum aestivum
MENADVPNGATAPAPTQATPVVREQDRLMPIANVIRIMRRALPAHAKISDDAKEAIQECVSEFISFVTGEANERCHMEHRKTVNAEDIVWALNRLGFDDYVVPLSVFLHRMRDPEAATGGAAAGDRRAVTSAPPRAAPPVLHAMPLHAQMQRPMYAPPALVQVQNQMQRPIYAPPAPMQVQNQVQWPMYAPPPPVQVQMQRGVYA

SEQ ID NO: 15885 - protein, 778 aa, Verrucomicrobium spinosum DSM 4136
MRYASTLFSTAVLGSLLLAGPKVRAETNYGQVAMHVAYMLQNHHYSRKEFDDEISKRLLDSYLNFLDFSHIYLTQEDVDKFKTDYATSLDEHILTRNISPALDIYYKYEERVKQRVAYAKKVLETKKFAFDSNRSLEVKREKAPWPANEAASDALWNDLIEGDLLAERLSDKAREEAKKKKAEERAKKAAENPEEAAKAAAKADKAVKADPGEEDPPDKRVLKRYERLLEQLAENEQEDIVNYFLSCLAGSYDPHTEYMSQQESDNFKIQMNHSLVGIGALLSTKDNVAEIQGIVVGGPADKQSELKISDKILAVAQGDGTGPNSDWVDIKYMKLQKVVEMIRGKSGTVVRLKVNPAAAEDPSEVKIISIVRGEVELKEKLANAELLLTPPVNGKSTKIGWITLPSFYADMEDGTVSCTADVTRLLKRLMAERIEGLVVDLRGDGGGSLEEAIKLTGLFVPKGPVVQAKDWRNNITWRDCDNERPVYEGPLIVLTDKASASASEIFAAALQDYRRAVIVGEKSTFGKGTVQTILPVERYMPFFSDKSRAGSLKVTIQKFYRIAGGSTQLRGVVPDVVLPSIRDVMEIGEDSLPQALPYDTIPPRTFTYATKTPLPLQELNTRVKSRLESNPEFQYVIEDTKRIKERLDKNTVSLNEKDRQKELDENKARSEARKTERKNRTEEVAKQYKQGFERYRLTLDNVDATELVKESSFTKEQTTGMRMASSNDDDDGSDDSQFPFGVEPVKLETVNVMRDLIEVSSHQPQTANASEAKKPAQQ

SEQ ID NO: 15886 - protein, 444 aa, Vibrio vulnificus CMCP6
MSVYYTLCFLSAAAMLIAFVNSKIGKMQTTIAITAGSMVLSLLILIAGQNNWFHLTEIATQTMSSIDFEDFLLKGILGFLLFAGGLGIKLPNLKDQKWEITVLALGATLFSTFFIGFALYGICQLIGIQFDLIYCLLFGALISPTDPIAVLAIVKKLKAPRRISTQIEGESLFNDGFGLVIFVTLFTIAFGHETPTVGSVTMLFIQEAIGGILYGFALGLLFHYLICATDDHSMELLLTIGIPTAGYAFAEVLHVSGPLAMVVSGIMIGNWTRFIGFSKESEDHLDHFWELVDEFLNGVLFLLIGMSMLLFKFHQEDWILMAIAIPLVLIARYLSVFLSYIGFKRFRQYNPWSIKILTWGGLRGGLALAMALSIPSGIWVISDKLIDVKEIILVMTYAVVVFSILVQGSTITPMIEKAKKSEAEFEAKQSSVTVPEGKTESITS

SEQ ID NO: 15887 - protein, 533 aa, Blastocladiella emersonii
MARSPATLLVRAAAFAVLLLALLAALVPAAARADDAAKDAAKDSKAANNYGPVIGIDLGTTYSCVAIYENGRVEIIANEQGHRITPSYVAFTDEERLVGDAAKNQAAANPENTIYDAKRLIGRTWDDKMLQQDIKHFPFKVVQKDGKPFIQVDVKAGQTKEFAPEEVSAMVLTKMKEIAESYLGRKVSHAVVTVPAYFNDAQRQATKDAGRIAGLNVLRMINEPTAAAIAYGLDRVEGERNVLVFDLGGGTFDVSLLSIDKGVFEVLATSGDTHLGGEDFDQRLVDYFAKLYKRKTKKDCHKDLKAMGKLKREAEKAKRALSSQMSVRIEIEAFHDGDDFSETLTRAKFEELNLDLFKKTIRPVERVLKDAGLKKAEVEDVVLVGGSTRIPKVQQLLQDFFNGKAPSKSINPDEAVAYGAAVQGGILAGEQSFSDMILIDVNPLTLGIETTGGIMTKLIPRGTVVPTKKSQIFSTAADNQQTVLIQVYEGERSLTKDNNKLGAFELTNIPAAPRGVPQIEVTFEIDVDGILKV

SEQ ID NO: 15888 - protein, 318 aa, Vitis vinifera
MARFRNNKKKGFVKPVGKKQPGVDHVTGEKIPHSIVFSRGKLPGSLKQLQMDLRKLMLPYTAVNLKEKRRNNLKDFLNIAGPLGVTHFLMLSKTETAPYLKVARTPQGPTLTFKIHEYSLAVDVAQSQLRPRCPQDLFKNSPLIVLSGFGSGEQHLKLTTVMFQNIFPAIDVNTVKLSSCQRIVLLNYNKDTKLIDFRHYSIRLQPVGVSKRVRKFVQNHQVPDLKNLQDVSDFITKAGYGSESEVDDEAATVTLASDLGRINKASSKSAVKLQEIGPRMTLQLIKIEEGLCSGGVIFNAYGIFILHNILLSFIIYSF

SEQ ID NO: 15889 - protein, 1408 aa, Candida glabrata CBS 138
MPKVTTIDLTLDDSEVEDYDALGELPNDNLTTSTQNNNHNSSSDDDPSDNNDPDVDRNSRIIKTIKPPRFTSGNDSTAEESFEDQPLSFSRSPELDRETMKKERMKRFFSNREHDKVIKESPRSPLNRVSDQIKERSRTPPHIENWSLGTMRLKGLNDDMNLRKRTNFGVATPTSINDTTSDSSDSPHMYNSDSSDRKRTKLMKTNDIKIDQDADIIILSDDDDDEGHDRREMKNENDSHDTKQEQNSDVVPLLDLVKNGDTEVIEGYHTKPELSLEELQHNYKMLARHYHKKEAEIKNTVGNLQNTQIILQRKLGIRQKKLNDAEKRWKLLLRSASRQDGASNAQQMLINEAINVVNKLKVDRDSTQMKLDNVVQKLDDTNNKWSSLQKHRVEQLEKAKTEIQMKTRDKSNEKYIEERKKFYVEREILNEMFEKGSLSKDMHTQLLRELEQKINSLSVEQFDDTNDTSNSNLKSVPTDLFKKSIDTARELLLKNTTRSVITKNQLNQYLNTVLIYKQNFESGKYCDRPMRRACADATQALFHNGVKMPLVFERLQDYGIKYTVPNIINPDRRVQYFKSIEVAMDLIQKSDRSMDVKWRLLEMLKQLERFRIDIDEGKPPTTSDKENIGRNVIQLKQQGLKMEKLYENLKIYGVPITESELMNMNAIGENGMQNYMGTDGSLYENSYNNMQSISNIHSGQDQEQIRALLENLKETEDEIEGEALTPEGMTVNLLRHQRLGLQWLLNAETSKRKGGLLADDMGLGKTVQAIALMLANRSSNESKKTNLIVAPVSVLRVWKGEIETKIKESSDFNSAIYGGVNGIKFRSWDKLSNFDVILVSYQTLANELKKHWPERLKTDSKQLPPVPDIKAMNSLKTKNEYWSPFYSDDSTFYRIILDEGQNIKNMKTQAAKACCTVNSVYRWILSGTPIQNNMEELYSLIRFLRIPPYNRHERFQQDIGRPFSNLKQNYDSESRKQAIKKVRVLLRAIMLRRSKTDKIDGVPILELPPKNVNAQETTFKDDELEFYKALEHKNKQLAKKLLESKVQGNYSSVLTLLLRLRQACCHPELVILGEKKAEAATVVNGKNFNNDWLRLYYVIKKMKSEAVEIVKSASDSMTCLWCLEQIEPESAFVLSGCGHLICNDCINPFSEDAAGSSNARSGPKGSTYLPCKECQKVTNDKDFVSLKLFNQVILEGFTREKLYEEFNLEMDKQKDRKKNAYTTDYNTLEPSTKMNQCMDVINKVFEKSDSEKIIIFSQFTTFLDLLEHILATRLKISCLKYTGDMNAKVRSEIISRFYSEEDKRVLLISMKAGNSGLTLTCANHVVIVDPFWNPYVEEQAQDRCYRISQTREVTVHRLFIKNSVEDRILELQKLKRDMVDAAMDAKKIKDINKLGTRELGFLFGLNSL

SEQ ID NO: 15890 - protein, 391 aa, Arabidopsis thaliana
SASVAGVLQTPVSGKGGKAKKTSRSAKSNKSGTLASGSNAGSPGNNFAQAGTCRYDSSLGLLTKKFINLIKQAEDGILDLNKAADTLEVQKRRIYDITNVLEGIGLIEKTLKNRIQWKGLDVSKPGETIESIANLQDEVQNLAAEEARLDDQIRESQERLTSLSEDENNKRLLFVTENDIKNLPCFQNKTLIAVKAPHGTTLEVPDPDEAGGYQRRYRIILRSTMGPIDVYLVSQFEESFEDIPQADEPSNVPDEPSNVPDVPSNLPSTSGLPENHDVSMPMKEESTERNMETQEVDDTQRVYSDIESHDFVDGIMKIVPPDLDMGVDYWFRSEVGEVSITDMWPDEYWNQMITFDQDHAGPSDNKILEQPQTPSSPTPEESTATRSPTGS

SEQ ID NO: 15891 - protein, 1277 aa, Arabidopsis thaliana; identical to SEQ ID NO: 10486

SEQ ID NO: 15892 - protein, 382 aa, Macadamia jansenii; identical to SEQ ID NO: 8957

SEQ ID NO: 15893 - protein, 551 aa, Nicotiana sylvestris
MGTRAVESSQQQECEHIFRSRYPPVQVPDNVTLPDFVLHNVELYTDKMAFVDATTGKGYTYGQVARDIRRFAKALRSLGLRKGRVVVVVLPNVPEYAIVALGIMAAGGVFSGANPAAHSSEIVKQVESADGKLIVSDLPTYHKVKDCGLPVIILGEEHVEGTIHWDELLEAAERAGSRTDHITNHEDEMVQQNDLCALPFSSGTTGLSKGVMLTHRNLVANLCSTLFSVSPEMVGQVTTLGLIPFFHIYGITGICCATIRNKGKVVVLRRYELRAFLNALITHEVTFAPIVPPIILALVKNPIVDEFDLSKLKLRSIMTAAAPLAPEILNEFEKKFPDVQVQEAYGMTEHSCITLSHSDQHTAKRNSVGFILPNLEVKFVDPDTGRSLPKNKPGEICVKSQCVMKGYYKNEFETCLTIDKDGWLQTGDIGYIDDDGDIFLVDRIKELIKYKGFQVAPAELEGILLTHPSVEDAAVVGLPDEEAGEIPVAWVVLNSKAKESEEDIINYIASTVAQYKRVRVVQFVDSIPKSPSGKILRRLIKDKMLERLKNA

SEQ ID NO: 15894 - protein, 652 aa, Oryza sativa Japonica Group
MAKTMERGRRERRRIVRLRVSKVYQIVQLNSQCLLQIRFQKGASKRREQILFCRCGDPLSLVLPWVLLMMEGHSNELGRANTLKKGGLRPIPVIIGNVFGLTNEVSERIVSASVTANLIIYLTTKYHLGAASSAIIIFVYQAAANFLPVCGAIVSDALLGRYLMVTLTLFSCTTGTFMLFLTSLIPKLTPPDCGLSNQGCTSPSPLQLFVLCASLGFMSLGASGVRPCCLAFAEDQIAHWDEAQKDRALRGLFSWYYVSVGFAQIVAVTILVYFQDQVGWKVGFGISAAVMLSITLVNLAASPFYVKMKPQRSIWISLLQVVVVSLKNHHLVLPKTYQSAQFHNASGLRELVPSEKMRFLNKACILRYHATNVSDGAGRTNSWNICTVEQVENLKSALSVIPMWSAMIMTFLIQSSSFGVLQAATMDRRVGTKKFQLPAGSISIFEIITFTIWSGCYDRYIVPFLRRITGRQQVLTLKQRMGIGVSLSIASMLVASAVETYRRKVAVKGGLQHDAKGTLEMSVLWLAPQYVIIGLAGAFSSIGQIEFYYAVLPKSMGSFVLALLFFGAGVASIIATLVIKAINLITGRNGMAPWLSNNLNEGHYNYYYFLLAVLGAIDLIYFIVCSYVFDERTQNMSLETSGDAKDMVEFQG

SEQ ID NO: 15895 - protein, 468 aa, Pseudomonas putida GB-1
MSKSVQLIKDHDVKWIDLRFTDTKGIQHHVTMPSRDALDEDFFEVGKMFDGSSIAGWKGIEASDMILMPVDDTAVLDPFTEEPTLIITCDIVDPSSMQGYDRDPRAIAKRAEEYLKSTGIGDTVFAGPEPEFFIFDEVKFKSDISGSMFKIFSEQGSWMTDADVEGGNKGHRPGVKGGYFPVPPFDHDHEIRTAMCNALEEMGQTVEVHHHEVATAGQNEIGVKFNTLVKKADEVQALKYVVHNVADAYGRTATFMPKPLYGDNGSGMHVHMSIWKDGKNTFSGEGYAGLSDTALYFIGGIIKHGKALNGFTNPSTNSYKRLVPGFEAPVMLAYSARNRSASIRIPYVGSPKARRIEARFPDPSANPYLAFAALLMAGLDGIQNKIHPGDAADKNLYDLPPEEAKNIPQVCGSLKEALEELDKGRAFLTKGGVFSDDFIDAFIELKSEEEIKVRTFVHPLEYELYYSC

SEQ ID NO: 15896 - protein, 388 aa, Brabejum stellatifolium; identical to SEQ ID NO: 8960

SEQ ID NO: 15897 - protein, 487 aa, Exiguobacterium sibiricum 255-15
MNLAELIEVIQTQKTERMVEAVVTSLTTDSRDVKPGTLFVAIKGYTVDGHDYAKQAEAQGAVAIVSERLLDVTIPVILVRSTTRAMAELAGKFYDYPSEKMRMIGITGTNGKTTTTTIVRDVLAQLGRKTGIIGTVEVKIGDRVVPSRNTTPQSSELQAFFHQMHQEGVEDVIMEVSSHGLELGRVTGTDFDVAGFTNLTHDHLDFHKTFENYARAKGLLFAQLGQRLSDKKVAVLNADDEISHLFEMMTGARVLTYGIEQPADLQAKNITQTLQETTFTMVYQEQAVELTVQFIGRFNVYNLLLATGILLSIGYSLTEISNAITQIQPAKGRMQRLPIDGYNIYVDYAHTPDGIEQCLKALVDVPKENIIFLIGTGGNRDVTKRPMMGQLASTYAGTVVITTDDPRFESYESITSGIASGMLHDQFVEIGDREEAVRYAASLARPDNIVILAGKGHEKYQIIGDEKTPLDEEALVKEMIRQLEEKK

SEQ ID NO: 15898 - protein, 344 aa, Datura stramonium
MEVLSSTHTNGSSLLKNGVITMNGHHNGNSDHRNGGTTVHENGRKLLGNSNSIKPGWFSEFSALWPGEAFSLKIEKLLFQGKSDYQDVMLFESATYGKVLTLDGAIQHTENGGFPYTEMIVHLPLGSIPNPKKVLIIGGGIGFTLFEVLRYPTVEKIDIVEIDDVVVDVSRKFFPYLAANFNDPRVTLVLGDGAAFVKAAQAGYYDAIIVDSSDPIGPAKDLFERPFFEAVAKALRPGGVVCTQAESIWLHMHIIKQIIANCRQVFKGSVNYAWTTVPTYPTGVIGYMLCSTEGPEVDFKNPVNPIDKDETHANSKLGPLKFYNTDIHKAAFILPSFARSMIES

SEQ ID NO: 15899 - protein, 388 aa, Nelumbo lutea; identical to SEQ ID NO: 8968

SEQ ID NO: 15900 - protein, 1904 aa, Aspergillus nidulans FGSC A4
MTSRLDRLVTLLETGSSPLIRNTAAQQLADVQKQHPDELFNLLGRILPYLKSKSWDTRTAAAKAIGLIVANADTFDPNQDDGEDVKKDEEDVDDVNVKLEEEPISVADELLRLETLDLVSILKRGRKLLGSGSKDQELSLAAMDSAARLQHQKKLLTRRLGLAGECSDDDLLDDSELLPKTPGLKEAEPRLFSPKEKSHLNSSAHPLPSPSEPANGEESGLSRRQLNQLKRKSKHIARLGANKVRVVDLSSRRQSENVTNPSISTPHPVKTEYGDGQNGDAKPDYFSLERPADHDDESKIVSEFKGTTLPDKSIIQPDLAEDTETIAWPYERMCEFLKVDIFDPNWEVRHGAAMALREVIRIQGSGAGRMHGKTRPENNVLNRQWLDDLACRLLCVLMLDRFGDYISDNVVAPIRETVGQTLGALLSHLPSRSVVGVYRCLYRLIMQTDLDFDRPVWEVCHGGMIGLRYLVAVRKDLLVKDSNLMDGVLEAVMHGLGNYDDDVRAVSAATLVPIAEEFVNTRQSTLGSLMNIVWNCLSNLQDDLSASTGSVMDLLAKLCTFQPVLDAMKENAAADSESSFANLVPRLYPFLRHTITSVRSAVLRALTTFLRLEGEGTNDWVDGKGMRLVFQNLLVERNEDVLKLSLQVWSELLKSLDSRGVIKSDPELPNHIQPLLALSMAPFGVPLYPIPMNASLFIKPSGLPFSMVQPAPAKASPTSTTSSTDGPKKRGRKSEKKEPPPSSSSSTHDVDAHMLKGDIDMVGADTMLRSKIYAARALGELLSLWDKNGLDSLWETIVGGLGHPASSSQLASAMIIEEYAKVAGPDSKYAGALCEKLQTIVEGERPPWYSDISCYLSVARAQCHSLLNTFRETAPLLRSEKLASLAVVVQGDPDAGPNAFSLAKAYEVIGPDFEKLKRLLSPAQRITASKVLNETRVTAENAINFAKEARDTRDMRIKAAAAGALINFGAIPKKPGNLIKGVMESIKTEESAELQQRSATAVAVLVEHYTSAAKRGPVDKVIGNLVKYCCVDTSETPEFERNKEHEGLILSLRKEEDRREHADAATFEKEAREARIMRRGAKDALEQLAVKFGAQLTEKVPNLASLVERPLKEALSGDLPANIVDSDNVLGQEVVDGLSTLRALLPKFDPGLYPWVVSLMPLVVKALQCRLSVIRYAAAKCFATICSVVTVEGMTMLVEKVLPTINNALDVHHRQGAVECIYHLIHVMEDNILPYVIFLVVPVLGRMSDSDNDVRLLATTSFATLVKLVPLEAGIPDPPGLSEKLLEGRDRERKFMSQMLDSRKVEEFKLPVAIKAELRPYQQEGVNWLAFLNRYNLHGILCDDMGLGKTLQTICIVASDHHMRAEDFAKTQRPESRKVPSLIICPPSLSGHWQQEVKQYAPFLNCVAYVGPPAERSKLQGSLADADIVVTSYDICRNDNDVLRPISWNYCVLDEGHLIKNPKAKVTMAVKRINSNHRLILSGTPIQNNVLELWSLFDFLMPGFLGTEKVFLDRFAKPIATSRFSKSSKEQEAGALAIEALHKQVLPFLLRRLKEEVLNDLPPKIIQNYYCDPSELQKKLFEDFTKKEQKALQEKMGSSEKADKEHIFQALQYMRRLCNSPALVVKEGHKQYNEVQQYLQEKKSYLRDVSHAPKLSALKDLLLDCGIGVEPTEGNLGAGASYVSPHRALVFCQMKEMLDIVQSEVLQKLLPSVQFLRLDGAVEATRRQDIVNRFNSDPSYDVLLLTTSVGGLGLNLTGADTVIFVEHDWNPQKDIQAMDRAHRIGQKKVVNVYRLITRGTLEEKILNLQRFKIDVASTVVNQQNAGLNTMDTDQLLDLFNLGETAENAEKPTEIGGKEVDMVDIDGELKEKGKKGWLDDLGELWDDRQYQEEYNLDSFLSTMKG

SEQ ID NO: 15901 - protein, 260 aa, Silene noctiflora
  misc_feature (91)..(91): Xaa can be any naturally occurring amino acid
KVEKILFQGKSKYQDVMVFQSSTYGKVLILDGVIQLTERDECAYQEMISHLPLCSIPNPKKVLVIGGGDGGVLREVARHSSVEHIDICEIXEMVVTVSKEFFPEVAVGYDDPRVNLHIGDGVAFLKAAPEGSYDAVIVDSSDPIGPAKELFEKPFFESVAKALRPGGVVCTQAESIWLHMHIIEDIVSNCREIFKGSVNYAWTTVPTYPSGVIGFMVCSTEGPAVDFKNPVNPIDKTEDEKRPLKFYNAEIHSAAFCLPS

SEQ ID NO: 15902 - protein, 303 aa, Triticum aestivum
WIPRAAGSAVIPGWFSEISPMWPGEAHSLKVEKVLFQGKSDYQDVLVFQSSTYGKVLVLDGVIQVTERDECAYQEMITHLPLCSIKDPKKVLVIGGGDGGVLREVSRHSSVEQIDICEIDKMVVDVSKQFFPHLALGFEDPRVSLHIGDGVAFLKNAPEGTYDAVIVDSSDPVGPAQELFEKPFFESVSRALRPGGVVCTQAESIWLHMHIIEDIVTNCRQVFKGSVNYAWTTVPTYPSGVIGFMLCSTEGPSVDFQHPVFSIEEDEYSTKSKGPLKFYNSEFHTASFCLPSFARRVIEAKAN

SEQ ID NO: 15903 - protein, 509 aa, Vitis vinifera
MSQADVSYSCGSCGYPLNLTSSNRITSGIGSEYRKSIKKGLISFLSVDLSRFTQVDEVHCLPLPWGGHRSKTKLLCRKCGVLIGYGYGDSPALCGFDLANSSNSACEKSELYNLQKSANKINMEGPSRYYLTSIKDLPEDCLNFIFQRLDCNSDRESFGLTCHHWLRIQNINRRFLQFQCSFTQLDISSLSQTSPTISSFHLNRLLTRFQLLESLSLSGCTELPDSGLTPLQDYGSRLQTIFLDCCFGITDQGLSLIATGCPLTVISLYRCNITDVGLQNLAKSCSALKDVNLSYCALISDHGIRALSQKCCQLRAVSISFCKGVSGVGFSGCSPTLAYLEAESCKLGPEGITEIVSGGGLEYLNVSNLRWCITGDGLAAIGAGLGTKLRVLNLRMGRLVSSESVAAIAKGCPLLQEWNLALCHEVKIPGWKAVGENCHNLEIIHLNRCRNLCDQGLQALRDGCRQLRIMYINGYYQVSVAAMEMFKWSRSDVQIKEEEITIVPNWPFR

SEQ ID NO: 15904 - protein, 486 aa, Sinorhizobium meliloti 1021
MKITDLAGSNFPELSAQLKGDAATIEIGGITADSRQVKPGDLFVAVAGSKADGAAYIADALSRGASAVVAGTGTPAEAGAPVFAISDPRRFLAKAASSFYGRQPETMVAVTGTAGKTSVASFTRQIWAHSGFSAAMIGTTGVVAPGRTEYGSLTTPDPVSLHKLLAELADEGVTHAAMEASSHGLDQRRLDGVELAAAAFTNLGRDHMDYHPTVEHYMASKMRLFGALLPKGSPAVIFADDQWSAEAIAAARKAGHDVRTVGRNGDFIALKRVEHFRHKQSAEVHVGDDIYEIHVPLAGDFQIANALVAAGLAMSTGITAKAAFSALERLQGASGRLELVGQTKDGALAYVDYAHKPDALANVLESVRPFTTGRVVVVFGCGGDRDKGKRPIMGEIASRLADVVIVTDDNPRSEVPEVIRAEIMAAAKGATEIGDRAEAIRAAVGMLKTGDTLIVAGKGHEEGQTVGSVTLPFSDHAEVRKALGGL

SEQ ID NO: 15905 - protein, 496 aa, Listeria monocytogenes EGD-e
MEESPQNEPNKVEKDEEQKSKPGNGYIKMKLFPFIMLLFAFVFVTALVTTIVMSLGDDKQVKVSIPERKEFTKLYDVYDEITSKYYKDTNSTTMIDGAISGMVNSLDDPYSTFMSKKESSEFNDTISASFEGIGAEIQEKDGAIVIVSPIKNSPAEKAGLRPQDIITQVDGKSVKGDTATEATQKIRGEKGTKVTLTIQRSNEDKPFDVTITRDEIPIETVYKEMGSDKIAHVTISTFSETTYDELEKALKSLEKDGMKGLVLDLRGNPGGLLDQAVSISSLFVPDGKIVVQEQDKDGDKSAIKADSSSHGDYKVKVPTTMLIDGGSASASEILAAAAKESGGIKLVGTKSFGKGTVQTATTLSDDSTLKLTVAKWLTPNSEWIHEKGITPDVVVNMPDYATMTIPSSTKVYKNGDFGDDVKTIETLLKALDYNVGKVDGLYDTDTEYAVQRFQTANKLDVTGIMTGVTTDKLVELTQKHLKETDPQLQKAKALVK

SEQ ID NO: 15906 - protein, 642 aa, Azotobacter vinelandii
MGKIIGIDLGTTNSCVSVLENGVAKVIENAEGARTTPSIIAYTNDGEILVGQSAKRQAVTNPQNTLYAVKRLIGRRFEEDVVQKDIKLVPYKIVKADNGDAWVEVKGQKMAPPQISAEVLKKMKKTAEDYLGEPVTEAVITVPAYFNDSQRQATKDAGRIAGLDVKRIINEPTAAALAYGMDKAKGDHTIIVYDLGGGTFDVSVIEIAEVDGEHQFEVLATNGDTFLGGEDFDIRLIDYLVDEFKKESGINLKGDPLAMQRLKEAAEKAKIELSSSQQTDVNLPYITADQTGPKHLNVKISRAKLESLVEDLVERTIEPCRIALKDAGIDVGKIDEVILVGGQTRMPLVQKRVAEFFGKEPRKDVNPDEAVAMGAAIQGAVLAGDVKDVLLLDVSPLTLGIETLGGVMTALIEKNTTIPTKKSQVFSTADDNQSAVTIHVLQGERKQAGQNKSLGRFDLADIPPAPRGVPQIEVTFDIDANGILHVSAKDKATGKHQSIVIKANSGLSEEEIQKMVRDAEANAEEDRKFEELVATRNQGDQLVHATRKMVTEAGDKVSADEKVGIEKAIADLEEALKGDDKSRIESLINALSQATAPLAQKMYAEQAEPGEAAAQGGEKAKSAADDVVDAEFEEVKDSKGNK

SEQ ID NO: 15907 - protein, 636 aa, Vibrio vulnificus
MGKIIGIDLGTTNSCVAVLDGDKPRVIENAEGERTTPSVIAYTDGETLVGQPAKRQAVTNPENTLFAIKRLIGRRFEDEEVQRDIEIMPYKIVKADNGDAWVEAKGQKMAAPQVSAEVLKKMKKTAEDFLGEEVTGAVITVPAYFNDAQRQATKDAGRIAGLEVKRIINEPTAAALAYGLDKQGGDRTIAVYDLGGGTFDISIIEIDEVEGEKTFEVLATNGDTHLGGEDFDNRLINYLVAEFKKDQGIDLKNDPLAMQRVKEAAEKAKIELSSTNQTDVNLPYITADATGPKHMNIKVTRAKLESLVEDLVQRSLEPLKVALADADLSVGDITDVILVGGQTRMPMVQAKVTEFFGKEPRRDVNPDEAVAVGAAVQGGVLAGDVKDVLLLDVTPLSLGIETMGGVMTKLVEKNTTIPTKANQVFSTAEDNQSAVTIHVLQGERKQAMYNKSLGQFNLEGINPAPRGMPQIEVIFDLDADGILHVSAKDKQTGKEQKITIQASGGLSDAEIEKMVQEAEANKEADKKFEELATARNQADQIIHGTRKQVEEAGEALPADEKAKIETAISELEEARKGEDKEAIEAKIQALMAAAQKLMEIAQQQAQAQQGSAEAGAQSQEDDVVDAEFEEVKDDKK

SEQ ID NO: 15908 - protein, 183 aa, Citrus unshiu
MRDGSLKGLFCTAPKSIRSVRRNSGSFNVTAFTEEQEALVVKSWNAMKKNSGELALKFFLRIFEIAPSAKKLFTFLKDSDIPVEQNPKLKPHATTVFVMTCESAVQLRKAGKVTVRESNLKDLGATHFKYGVADEHFEVTKYALLEPIKEPVPEMWSPELKNAWAEAYDQLAAAIKIEMKPPS

SEQ ID NO: 15909 - protein, 228 aa, Picea sitchensis; identical to SEQ ID NO: 631

SEQ ID NO: 15910 - protein, 112 aa, Zea mays
  misc_feature (12)..(12): Xaa can be any naturally occurring amino acid
  misc_feature (27)..(27): Xaa can be any naturally occurring amino acid
  misc_feature (62)..(62): Xaa can be any naturally occurring amino acid
IRKGVVSFFAIXESRFTQADEVSCTPXFRSSRSWGFFRNRTRLLCRKCGGHTGHAYEDEGAXDGLDMSSRGSSTSPRKKYVIKISALRPSSDDSGALLLPVMAIWILSCSHV

SEQ ID NO: 15911 - protein, 408 aa, Physcomitrella patens subsp. patens
MKRRNKSEERHEVEMNGWNEYVNSDLSPAPTPSGPRARVSRPKAGKQAKNCPLTPRPLGAGSPTSSAPTPTSTCRYDSSLGLLTKKFIDLIKQADDGVLDLNKAADTLHVQKRRIYDITNVLEGIGLIEKKLKNRIRWKSLGMVRAADTTHGAGGLQAEVKDLYSEEKKLDESISEMREQLRSLSEDDHNKQWLYVTEDDIKNLPCFQNETLIAIKAPLGTTLEVPDPDEAVEYPHRRFQILLRSTMGPIDVYLVSRFEGKFEEMNSSEMSIEVGQSVPQAAGASSPADAMSHEEIVSMVPDIGYDLTNLESPGSHEPASQSSGPTNSHPELAGGIMRTAPAEVTTDTDYWLLSDAGVGISDMWRTDQSNGMWDDVMRLNSEFGIENIGSPRPHTPPSSNVLEVVPVS

SEQ ID NO: 15912 - protein, 636 aa, Vibrio fluvialis
MGKIIGIDLGTTNSCVAVLDGDKPRVIENAEGERTTPSVIAYTDGETLVGQPAKRQAVTNPENTLFAIKRLIGRRYEDEEVQRDISIMPYKIVRADNGDAWVEAKGQKMAAPQVSAEVLKKMKKTAEDYLGEKVTGAVITVPAYFNDAQRQATKDAGRIAGLEVKRIINEPTAAALAYGLDKQGGDRVIAVYDLGGGAFDISIIEIDEVEGEKTFEVLATNGDTHLGGEDFDNRMINYLVDEFNKEQGINLKNDPLAMQRLKEAAEKAKIELSSAQQTDVNLPYITADATGPKHMNIKVTRAKLESLVEDLVQRSLDPLKVALADADLSVSDITDVILVGGQTRMPMVQKKVAEFFGKEARRDVNPDEAVAVGAAVQGGVLAGEVKDVLLLDVTPLSLGIETMGGVMTKLIEKNTTIPTKANQVFSTAEDNQNAVTIHVLQGERKQANFNKSLGQFNLEGIQAAPRGMPQIEVTFDLDADGILHVSAKDKQTGEEQNITIQASGGLSDEEIEKMVQEAEANKEADKKFEELATARNQADQMIHATRKQVEEAGDALPADEKEKIEAAISELETAKRGEDKAEIDAKVQALMTASQKLMEIAQQKAQAQGADAGQQSTSPEDDVVDAEFEEVKDDKK

SEQ ID NO: 15913 - protein, 161 aa, Marchantia polymorpha
DSATHSVTFFAKIFEIAPGAKALFSFLKDSDIPFDKNPKLKAHALTVFRLTGDSACMLGEKGAIDALHPKLKELGKKHVGYGVIAAHFDVVKAALLSTIESLLPEDWPAEKKVATCGAWSQAYDELAGVMINEMQAIRDAEKAPAAEEAPEAPAAESKALP

SEQ ID NO: 15914 - protein, 311 aa, Prochlorococcus marinus str. MIT 9313
MHHRPTLASKPYGGLSWKKVLGLLAMDSPSTTANGWIDEHHQGVRYGLQGRVLVDETSPYQRITVIDSSRYGKGLLLDGCWMTAEHQERHYHESLVHPALCSAAQLERVLVIGGGDGGTARECLRYQDVKHLDMVEIDRRVVELSQKHLPSLGSHAWSDPRLQLNLENGIAWVANATESSYDVILIDGSDPAGPAEGLFNQTFFEHCRRILRPGGVFATQSESPEAFRQVHIDTVRLIRQVFGYADPLYGWVPMYPSGWWSWTFAAIDGPRYRNPLPARAAAISAGCEIWSPRWQQGAFEAIPAFIERELT

SEQ ID NO: 15915 - protein, 446 aa, Enterococcus faecalis V583
MTRKAKTAEEIKHIAEEENVRFLRLMFTDIMGTIKNVEVPVSQLDKVLDNKMMFDGSSIEGFVRIEESDMYLYPDLSTWMIFPWESDHGKVARLICDIYNPDGTPFAGDPRGNLKRALADMKELGFTSFNLGPEPEFFLFKLDENGEITTDLNDKGGYFDFAPTDLGENCRRDIVLELESLGFEVEASHHEVAPGQHEIDFKYADVVDACDNIQTFKLVVKTIARKHGLHATFMPKPLFGINGSGMHCNMSLFNEEGNVFYDESGEMGLSQTAYHFLGGLLKHARAYTAVCNPTVNSYKRLVPGYEAPVYVAWSGRNRSPLIRVPESRGLSTRLELRSVDPSANPYLTMAVLLQAGLDGIRNELTPPPAVDRNIYVMNEEERQHAQIEDLPSTLHNAIKELRKDQVMIDALGRHIFANFVEAKRMEWAAFRQTVSEWEREQYLELY

SEQ ID NO: 15916 - protein, 374 aa, Physcomitrella patens subsp. patens
MAKILRKCELCDGAAALYCAADNAHICWSCDAKVHGANFLVARHTRSVLCKTCGISTTRRTTGANPTPLTGLCSGCLQGEVQGECTTYCNRSVVSSRRAASRSCLAVAGRSDSGSESGCSLHVPNSSRDMECVIVDRSAQESVSSASSQSLKRKRSLDCRAAASNPQAEQVVTRTLEDVHSRVAQLQCECTSATSSAINRSSASHDHQDTTLETRDGNRSQPPVMGSNNGAFVTLRSASAKRLRMDDSAQTSPSLRRSQQSAALATSRLTRILAKWHWDLHLSSPDTVPLALRLFRKAYRALAPAVLSNAGTSVVLAACLLLAAGLDEAQITAPKASDLAAFAGVSTRTLCITEIHLVALLGRRRSAVWAGTRN

SEQ ID NO: 15917 - protein, 493 aa, Pseudomonas syringae pv. syringae B728a
MKLNKNNLSRLGADIAVPAYTVESTRQGIAHIGVGGFHRAHQAFYTDALMNSGEGFEWSICGVGLRPEDKVVRDALAQQDYLYTLYELGDTPDTKTRIIASISGMLLADDSPQALIDKLASPDIRIVSLTITEGGYCIDDSNGQFMAHLPQIQHDLANPDQPTTVFGFLCAALARRRAQGTPAFTLMSCDNLPHNGAVTRKALLAFATLRDADLHDWIKENVSFPNAMVDRITPMTSAAHRLQLADEKHIDDAWPVVCEPFVQWVLEDKFVNGRPAWEKVGVQFTDDVTPYEEMKIKLLNGSHLALTYLGFLKGYRFVHETMNDPLFVSYIRTYMDLDVTPQLASVPGIDLEGYKDTLIERFSNQAIADQLERVCSDGSSKFPKFTIPTINRLIVDQGNLERASLVVAAWALYLKGVDENGTTYTIPDPRAGFCQALVADDTLITQRLLAVEEIFGSAIPKSAAFVAAFEQNLNDLRTLGVSGTLEKLLAAKA

SEQ ID NO: 15918 - protein, 337 aa, Salmonella typhimurium
FFLFDDIRFGASISGSHVAIDDIEGAWNSSTKYEGGNKGHRPGVKGGYFPVPPVDSAQDIRSEMCLVMEQMGLVVEAHHHEVATAGQNEVRTRFNTMTKKADEIQIYKYVVHNVAHRFGKTATFMPKPMFGDNGSGMHCHMSLAKNGTNLFSGDKYAGLSEQALYYIGGVIKHAKAINALANPTTNSYKRLVPGYEAPVMLAYSARNRSASIRIPVVASPKARRIEVRFPDPAANPYLCFAALLMAGLDGIKNKIHPGEPMDKNLYDLPPEEAKEIPQVAGSLEEALNALDLDREFLKAGGVFTDEAIDAYIALRREEDDRVRMTPHPVEFELYYSV

SEQ ID NO: 15919 - protein, 471 aa, Symbiobacterium thermophilum IAM 14863
MAKVDRVLEMIAEKDIRLLDLKFVDVLGMLHHLTVPVEVVDAEQLSQGFFFDGSSIRGFRGIAESDMILRPDPATVVCDPFVEGPALSLMADVLEPGLREYGRDPRGVARRAEEYLRQTGIADTSYWGVEIEFFVFDNVRFQTGPDASFYYVDSAEAHWNSGRVPNGGYKVKHQQGYLRALPIDEQTDLRTAMTRQMQALGLVVERHHHEVASAGQNEINFRFSTLTDTADKAMLYKYAVKNVARAHGKTATFMPKPLYRNSGNGMHCNQSLAKDGVNLFYDPNGYANLSQIALWYIGGLLTHADALLAITNPTTNSYKRLVPGYEAPTNLAFSRANRSAAIRIPVSLSPKTTRIEFRTPDPTANPYLALAAQLMAGLDGIRRRIDPTAAGFGPVDIDIYHHAGSAAVQLKHVPSSLRQAVEALKADHEFLLEGDVFSEDLIETFIALKEDEIRNLETHPHPVEFEMYFDN

SEQ ID NO: 15920 - protein, 157 aa, Oryza sativa Japonica Group
MVRSLDSYPSIKDVTYSCGYCGYALNLSSSTRNTANIGSKYGKQIKKGVVSFFAVDESRFTQADEVTCVPYFHSRRSWGLFRRRSRLLCRKCGGRIGSAYEEDEPAAAALPACDGPDDLRTTSSGSSGSASSQKNYVIKINALQPSSDDSDAVAFTL

SEQ ID NO: 15921 - protein, 467 aa, Wigglesworthia glossinidia endosymbiont of Glossina brevipalpis
MSINEIINIIEKNNIKFIDFRFTDMVGKEQHITVPFLKKEKINKILKNGKIFDGSSILGWKKIQNSDVLLIPDLTTAVLDPFYNDSTLIIKCDIFESNKSESYNKDPRSIAKNAEKYLQYSKIGDKMYFGPELEFFLFDDIRFYTAIHGSQVIINDIESSWNSGKYYSQGNKGYRPSVKSGYLPVPPVDSSQNIRSSMCLFMEKMGIEVEAHHHEVATSGQNEISTKYNTLTKKADEVQIYKYIVHNTAYFFKKTATFMPKPIRGDNGSGMHCHISIEKEGKNIFFGKEYGNLSKYALFSIGGIIKHAKSINAFANPTTNSYKRLIPGFEAPVSLSYSLNNRSAAIRIPTFNDDKSCRFEIRFPDSSSNPYLLFSAILMASIDGINNKIFPGNPIEKNLYKFKEKNLNKMSSSLEESIYHLDKDREFLTKNNVFTNDFIDSYIELKQKEINIVKSTPHPVEFELYYM

SEQ ID NO: 15922 - protein, 296 aa, Thermotoga maritima MSB8
MRTLKELERELQPRQHLWYFEYYTGNNVGLFMKMNRVIYSGQSDIQRIDIFENPDLGVVFALDGITMTTEKDEFMYHEMLAHVPMFLHPNPKKVLIIGGGDGGTLREVLKHDSVEKAILCEVDGLVIEAARKYLKQTSCGFDDPRAEIVIANGAEYVRKFKNEFDVIIIDSTDPTAGQGGHLFTEEFYQACYDALKEDGVFSAETEDPFYDIGWFKLAYRRISKVFPITRVYLGFMTTYPSGMWSYTFASKGIDPIKDFDPEKVRKFNKELKYYNEEVHVASFALPNFVKKELGLM

SEQ ID NO: 15923 - protein, 368 aa, Platanus occidentalis; identical to SEQ ID NO: 8977

SEQ ID NO: 15924 - protein, 532 aa, Zea mays
MLRTKTPRPRGGKARRAPGVASAVKPAKADGRSPSGELSLQLEHVSLTSLLSDRRPAAGLTRFEVLLEEEESGCYRADPTPQPPRLPEPQSMPPPPPPPTTTTISQASPVDADETMEEKNCCILSQDFFCTPDYITPEMPQVANEFDDDDKENIPCPKSPEKSANPRSKRYRTDCSPKAREVTDFSFDHQITPVLFDSLTRDDSEEEQPKQPALEKRGGYVSQSAVALRCRVMPPPCVKNPYLNTDPCIDAAVYGGRQCNSAVFSPSIGGNGLSRYRTDFHEIEKIGYGNFSVVFKVLNRIDGCLYAVKRSIKQLHNDMERRQAVKEVQAMAALGSHENIVRYFTSWFENEQLYIQMELCDRCLSMNRNQPVKRGEALELLYQICKGLDFMHERGIAHLDVKPDNIYVRNGIYKLGDFGCATLVNRSLAIEDGDSRYMPPEMLNDKYEHLDKVDIFSLGAAVYELIRGTPLPESGSHFTSIREGKIALLPGCPMQFQSLIKSMMDPDPVRRPSAKEILRHPSFDKLHKASSK

SEQ ID NO: 15925 - protein, 438 aa, Pseudomonas putida GB-1
MLHSPRLTQLALSIALAVGAPLATAAEPAKAAAVPATEVTAKAPLPLEELRTFAEVMDRIKAAYVEPVDDKTLLENAIKGMLSNLDPHSAYLGPEDFQELQESTSGEFGGLGIEVGQEDGFIKVVSPIDDTPASRAGVQAGDLIVKINGAPTRGQTMTEAVDKMRGKVGEKITLTLVRDGGNPFDVTLARAVIQVKSVKSQLLENDYGYIRITQFQVKTGDEVGKALAKLRKDNGKKLRGVVLDLRNNPGGVLQSAVEVADHFLTKGLIVYTKGRIANSELRFSADPADASEGVPLVVLINGGSASASEIVAGALQDQKRAVLMGTDSFGKGSVQTVLPLANDRALKLTTALYYTPNGRSIQAQGIVPDIEVRPAKLTAEVDTENFKEADLQGHLGNGNGGADRPTGSSKRKERPQDDDFQLSQALSLLKGLNITSGK

SEQ ID NO: 15926 - protein, 443 aa, Zea mays
MARTAAPAAGYGEDGVYRSPRPAVRIESDTGLSLNDLLFRRADVCPSALALVDSATGQSLTFAAFRSAVLTTAVALSSRAGVRRGDVVLFFAPNCFLYPVCFFAVTALGAVATTANPLYTPREVAKQATDSRAKLAITVSELLPKIVDLGFPTILLDGGGDGDAASAAASKPQGASVTLYSDLVSGARETEYRRPPTKQSDTTALMYSSGTTGASKGVILTHRNFISAAAMMTADQDALGEGPNVFLCFLPMFHIFGLSVITFAQMQRGNSVVVMSRFDMDSVMAAVQRHRVTHLFCVPPVMIALAKLGSVGKYDLSSLRFIGSGAAPLGKDVMEGVAKNFPEAVIAQIAPAELEGLLLSHPEILDAVVIPFPDAEAGEVPIAYVVRSSESSLTEVDVQKFIEKQVAYYKKLRRVTFVDSVPKSASGKILRRELISKVRSSKL

SEQ ID NO: 15927 - protein, 772 aa, Arabidopsis thaliana
MAFTFLSPHPVFLSLTGTTSSFSYKPVLLPFSRNSRTLTVAAGPARRNSYPNPADDDPPEAPEDSMHGVSKFQQIQRQAARARKLEEEDFEKNRNTYLSAIADVEDAAETGRDDEESGGDLFSDIDRAISMKRSEFVKQGLLKPNPPKTASLKKIGEEGNEEEGDVTDDVDELDEEEVVDLDEIDKLTGLTEISDEEDWVDEEGNTRINKKKEFGSDHQFEFDLDDFGESKARIVEPKFKMCLAELLDESKVVPISVYGDLDVEITGIQHDSRGVSAGDLFVCCLGSENFLSEADKRGAVAVVASKEIDIEDTLGCRALVIVEDTNAVLAALASSFYRHPSKNMSVIGVTGTDGKTTTTYLIKSLYEAMGVRTGMFSTVSCYIHGDNKLDTPNATMNPDAVLVQSLMAKMLHNGTESLVMEASPQELALGKCDEVDFDIAVFTNLTRENTDFRGTDEEYRDAEAKLFSRMVDPERHRKVVNIDDPNAAFFVQQGNPNVPVVTFAMENTKADVHPLKFELSLFETQVLVNTPQGILEISSGLLGRHNIYNILAAVAVGIAVGAPLEDIVRGVEEVDAVPGRCELIDEEQAFGVIVDHANTPDGLSRLLDSIRELKPRRIITVIGCEGENERGKRPLMTKIATEKSDVTMLTSDNPRNEDPLDILDDMLSGIGWTMQEYLKHGEHDYYPPLANGHRLFLHDIRRVAVRCAVAMGEEGDMVVVAGKGHEAYQLEGEKKEFYDDREECREALQYVDELHQAGIDTSEFPWRLPESH

SEQ ID NO: 15928 - protein, 635 aa, Vibrio cholerae O1 biovar eltor str. N16961
MGKIIGIDLGTTNSCVAVLDGDKPRVIENAEGERTTPSVIAYTDGETLVGQPAKRQAVTNPQNTLFAIKRLIGRRFEDEEVQRDIKIMPYKIVKADNGDAWVEAKGQKMAAPQVSAEVLKKMKKTAEDFLGEPVTAAVITVPAYFNDAQRQATKDAGRIAGLEVKRIINEPTAAALAYGLDKQGGDRTIAVYDLGGGTFDISIIEIDEVEGEKTFEVLSTNGDTHLGGEDFDNRMINYLVDEFKKDQGIDLRNDPLAMQRLKEAAEKAKIELSSAQQTDVNLPYITADATGPKHMNIKVTRAKLEALVEDLVQRSLEPLKVALADADLSVNDITDVILVGGQTRMPMVQKKVAEFFGKEPRKDVNPDEAVAVGAAVQGGVLAGEVKDVLLLDVTPLSLGIETMGGVMTKLIEKNTTIPTKANQVFSTAEDNQSAVTIHVLQGERKQAMYNKSLGQFNLEGINPAPRGMPQIEVIFDLDADGILHVSAKDKQTGKEQKITIQASGGLSDAEIEKMVQEAEANKEADKKFEELATARNQADQMIHATRKQITEAGEALPADEKAKIETAINELETAKKGEDKAEIDAKVQALMAAAQKLMEIAQQQAQAQGANAGQSSAKEDDVVDAEFEEVNDDKK

SEQ ID NO: 15929 - protein, 153 aa, Brassica napus
QRHKVTVAALVPPLVIALAKNPTVNSYDLSSVRLVLSGAAPLGKDLEDSLGRRLPQAVLGQGYGMTEAGPVLSMSLGFAKEPTPSKSGSCGTVVRNAELKVVHLETRLSLGYNQPGEICIRGQQIMKEYLNDPEATSATIDEEGWLHTGDIGY

SEQ ID NO: 15930 - protein, 510 aa, Solanum lycopersicum var. cerasiforme
MERKTPNRTRRKQRSNQKSKKRMNKGSLSRHFTVGIAKPPLPNQQQLHSSLSNVTLPNPSRFQKLLDSDDLPPAQSQFSSVLPLNLDADDDADVADVAEKDFILSQDFFCTPDYLTPDAPAICNGLDGDKDDYTPCPKSPEKLLSVSRKRPRLASVRPFSSDLSGQQQPVDIPTDTFGTDEMKSEKISESEKGPSYVSQSAIALRYRVMPPPCIRNPYLGDASEIDADPFGNRRSKYPGFNPAISGNDGLSRYRTDFHEIEQIGSGNFSRVFKVFKRIDGCMYAVKHSTKQLHQDTDRRQALMEVQALAALGPHENVVGYYSSWFENEHLYIQMELCDHSLSNKKYCKLFSEVEVLEAMYQVANALQFIHQRGVAHLDVKPDNIYVKNGVYKLGDFGCATLLDKSQPIEEGDARYMPQEILNENYDHLDKVDIFSLGAAIYELIRGSSLPESGPHFLNLREGKLPLLPGHSLQFQNLLKAMMDPDPTRRPSAKGVVDNPIFERWQRNSNK

SEQ ID NO: 15931 - protein, 924 aa, Saccharomyces cerevisiae YJM789
MQIPKYENKPFKPPRRVGSNKYTQLKPTATAVTTAPISKAKVTVNLKRSISAGPTLNLAKKPNNLSSNENTRYFTIMYRKPTTKKHKTWSGDGYATLKASSDKLCFYNEAGKFLGSSMLPSDSDSLFETLFKAGSNEVQLDYELKENAEIRSAKEALSQNMGNPNPPTTSTTETVPSTKNDGGKYQMPLSQLFSLNTVKRFKSVTKQTNEHMTTVPKTSQNSKAKKYYPVFDVNKIDNPIVMNKNAAAEVDVIVDPLLGKFLRPHQREGVKFMYDCLMGLARPTIENPDIDCTTKSLVLENDSDISGCLLADDMGLGKTLMSITLIWTLIRQTPFASKVSCSQSGIPLTGLCKKILVVCPVTLIGNWKREFGKWLNLSRIGVLTLSSRNSPDMDKMAVRNFLKVQRTYQVLIIGYEKLLSVSEELEKNKHLIDMLVCDEGHRLKNGASKILNTLKSLDIRRKLLLTGTPIQNDLNEFFTIIDFINPGILGSFASFKRRFIIPITRARDTANRYNEELLEKGEERSKEMIEITKRFILRRTNAILEKYLPPKTDIILFCKPYSQQILAFKDILQGARLDFGQLTFSSSLGLITLLKKVCNSPGLVGSDPYYKSHIKDTQSQDSYSRSLNSGKLRVLMTLLEGIRKGTKEKVVVVSNYTQTLDIIENLMNMAGMSHCRLDGSIPAKQRDSIVTSFNRNPAIFGFLLSAKSGGVGLNLVGASRLILFDNDWNPSVDLQAMSRIHRDGQKKPCFIYRLVTTGCIDEKILQRQLMKNSLSQKFLGDSEMRNKESSNDDLFNKEDLKDLFSVHTDTKSNTHDLICSCDGLGEEIEYPETNQQQNTVELRKRSTTTWTSALDLQKKMNEAATNDDAKKSQYIRQCLVHYKHIDPARQDELFDEVITDSFTDLKDSITFAFVKPGEICLREQ

SEQ ID NO: 15932 - protein, 155 aa, Physcomitrella patens
VKDIDGSDVELSKYRGKVLLIVNVASKCGLTTTNYKELADVYTKYKSQDFEILAFPCNQFGGQEPGTNEQIKEFACTRFKAEYPIFDKIDVNGPQEAPLYKYLKLQKGGGWLLGDSIKWNFAKFLVDKNGNVVDRFAPTTPPSKIEKSIETYLSR

SEQ ID NO: 15933 - protein, 237 aa, Vitis vinifera
MEDNTPASFVDQLVVPGDVVLDLSKMGNQTIKLGGGLHQDCDAITVTKAGRLRFSKPNKYWVESSQKRYVPCVEDTVLGIVVDSKADNFLVDIKGPALAFLPVLAFEGGTRRNIPKFEAGTLLYVRVVKANTGMNPELSCTDASGKAAEFGPLKDGYMFESSTGLSRMLLSSPTCPVLEALGKKLSFEIAVGLNGRVWVNASSPSTVILVANAIMNSESLSVVQQKIMVDKLLQRIQ

SEQ ID NO: 15934 - protein, 159 aa, Corynebacterium glutamicum ATCC 13032
MTSIHDISVTLNDGTETTMADWAGHLLLIVNVASKCGLTPQYEGLQKLYEEYQDRGFFVIGVPCNQFNGQEPGTDAEVCAFAQNQYDVTFPLLSKTEVNGEGAHPLYKVLKEATDGSEIEWNFEKFLVDAEGNTIKRFAPRTEPSAAEVVEAIEENLPI

SEQ ID NO: 15935 - protein, 266 aa, Triticum aestivum
MSGMGSRPGESNLVEPRGLPSAGMAMQPWWTGTGFGAVSPAVVAPGSGAGISLSSNPFGGGAPQGKKKTVDDDPRAESSDDDSPRSGEPKDGSFDEEKQHATSRMPALASDYLQPYSQLELNQPMASAAYPYPDAYYTGMVGPYGAQAVAHFQLPGLTHPRMPLPLEVSEEPVYVNAKQYHGILRRRQSRAKAELERKAIKARKPYLHESRHQHAMRRARGTGGRFLNTKKDESGGASNGGRTEASKGEQSSEYLRVPPDLHLRQA

SEQ ID NO: 15936 - protein, 757 aa, Pasteurella multocida subsp. multocida str. Pm70
MKIQHIIHENQLGLLFQQGSFGLEKESQRVTADGAIVTTPHPAVFGNRRYHPYIQTDFAESQLELITPPTKKLEDTFRWLSVIHEVVQRSLPEEEYIFPLSMPAGLPAEEQIRVAQLDNPEDVAYREYLVKIYGKNKQMVSGIHYNFQLSPDLITRLFRLQNEYQSAVDFQNDLYLKMAKNFLRYQWILLYLLAATPTVESAYFKDGSPLAKGQFVRSLRSSQYGYVNDPEINVSFDSVEKYVESLEHWVSTGKLIAEKEFYSNVRLRGAKKAREFLTTGIQYLEFRLFDLNPFEIYGISLKDAKFIHVFALFMIWMDHTADQEEVELGKARLAEVAFEHPLEKTAYAVEGELVLLELLSMLEQIGAEPELFEIVKEKLTQFTDPSKTVAGRLVRAIEQAGSDQQLGAQLAQQYKAQAFERFYALSAFDNMELSTQALLFDVIQKGIHTEILDENDQFLCLKYGDHIEYVKNGNMTSHDSYISPLIMENKVVTKKVLQKAGFNVPQSVEFTSLEKAVASYALFENRAVVIKPKSTNYGLGITIFQQGVQNREDFAKALEIAFREDKEVMVEDYLVGTEYRFFVLGDETLAVLLRVPANVVGDSVHSVAELVAMKNDHPLRGDGSRTPLKKIALGEIEQLQLKEQGLTIDSIPAKDQLVQLRANSNISTGGDSIDMTDEMHESYKQLAVGITKAMGAAVCGVDLIIPDLKQPATPNLTSWGVIEANFNPMMMMHIFPYAGKSRRLTQNVIKMLFPELE

SEQ ID NO: 15937 - protein, 1150 aa, Arabidopsis thaliana
MVAQQLQERCGGTSQEDPVETTKSLICALNYISRDLPLPPHLFTAVSSIYHGASSSSLSDSDVSPPLPTSPPLCFRVYVQSFLLFRVSMEIRYLQWLVLSNYSLKVFALICGLVSLLFLQANKAPYGADLMGEFEDALLKQRPDCESGSRLIQLLDNRNKSHIQRRLSELEELPSTRGEDLQAKCLLELYGLKLRELQGKVRTAVSSEFWLRLNCADVSSQVFDWGMMRLPRPFYGVGDPFAMEADDQFRKKRDAERLSRLEEEEKNLIETAKRKFFAEVLNAVREFQLQIQATQKRRRQRNDGVQAWHGRQRQRATRAEKLRLMALKSDDQEAYMKLVKESKNERLTTLLEETNKLLANLGAAVQRQKDAKLPEGIDLLKDSESDLSELDAPRSEPLQDLLPDQDIDITESDNNDDSNDLLEGQRQYNSAIHSIQEKVTEQPSLLEGGELRSYQLEGLQWMVSLFNNNLNGILADEMGLGKTIQTISLIAYLLENKGVPGPYLIVAPKAVLPNWVNEFATWVPSIAAFLYDGRLEERKAIREKIAGEGKFNVLITHYDLIMRDKAFLKKIEWYYMIVDEGHRLKNHESALAKTLLTGYRIKRRLLLTGTPIQNSLQELWSLLNFLLPHIFNSVQNFEEWFNAPFADRGNVSLTDEEELLIIHRLHHVIRPFILRRKKDEVEKFLPGKTQVILKCDMSAWQKVYYKQVTDMGRVGLQTGSGKSKSLQNLTMQLRKCCNHPYLFVGGDYNMWKKPEIVRASGKFELLDRLLPKLRKAGHRILLFSQMTRLIDVLEIYLTLNDYKYLRLDGTTKTDQRGLLLKQFNEPDSPYFMFLLSTRAGGLGLNLQTADTVIIFDSDWNPQMDQQAEDRAHRIGQKKEVRVFVLVSVGSVEEVILERAKQKMGIDAKVIQAGLFNTTSTAQDRREMLEEIMRKGTSSLGTDVPSEREINRLAARSEDEFWMFERMDEERRRKENYRARLMQEQEVPEWAYTTQTQEEKLNNGKFHFGSVTGKRKRKEIVYSDTLSELQWLKAVESGEDLSKLSMRYNRREENASNTKTSTSKKVIESIQTVSDGTSEEDEEEQEEERAKEMSGKQRVDKSEEEEEEGEEENDGKAIFKWNTHKKKRSRYSFTCSSSDSRAQSSNGSRRK

SEQ ID NO: 15938 - protein, 818 aa, Cryptococcus neoformans var. neoformans JEC21
MLRRTIQRPSEPPLTSATSGGYGIVSTPFKVPKSSAPKRESALPARKRKAVSYKEEGSFDGSGDYEDNNEGRASKKGKFAMGNKEYGSDGVLGDMAKWCNRKFPVFQPKDKSGVFTKSFSIPVMYCPKTSEPIIHSLSHASLGARRHPTLIPRPLHNPMDDHAIVLFDPTIDDKPNPEDMKAAEFHEEMKKKEELNKGPHRSLKAILGIVDEKKNKQVVKVPVVIDPRLSKVLRPHQIEGVKFLYRCTTGLIADGAWGCIMADEMGLGKTLQCIALLWTLLKQSPVAGKPTCEKVIIACPTSLVGNWANELVKWLGTGAVSPMVVDGKGGKAELIPAVRRWVQAHGRNVTLPVMIVSYETLRTLQEELASCEIGLLLADEGHRLKNAETLTFQALTSLKVQRRVILTGTPIQNDLSEYFALLNFANPEYLGSKLDFKKNFESKILRGRDADATEKEKLESDAKLKELGGLVSKFIIRRTNDLLSKYLPVKYEHVVFCRPSPLQASLYNLFVTSKDVQRLLRGKDSQPLKAIGLLRKLVNHPDLLNLPEDLPGSEALLPDGYNGKGRDRTVNCQYSGKFVVLERMLDHINHHTNDKIVLISNATQTLDLMEKLCRSKRYGYLRLDGSMSVPKRSKIVAQFNQPESKEFVFLLSSKAGGCGINLIGANRLVLFDPDWNPASDQQALARVWRDGQKKECFVYRFQTTGTIEEKIFQRQCQKQNLSACVVDEAEDTARHFTQGDLRQLFNFNPETLCDTHDTYKCKRCREGKQFVKAQALLYGDASTWNHYPNEELGKMHDDLLRAELGLPEVSYVFQYISH

SEQ ID NO: 15939 - protein, 476 aa, Campylobacter upsaliensis RM3195
MGKFVNNIEEFFTYCKENEVVFVDFRFTDIIGTWHHITYNFHSINEETFELGIPFDGSSLKGWQPVNKSDMILKPDAPSAFLDPFTADQTIIVFCDVYDIYKGQMYEKCPRSIAKKALQFLQESGVADMAYFGPENEFFIFDSVKIVDNANCSKYEVDTEEGEWNDNKEFVDSYNTGHRPRNKGGYFPVAPIDSLVDIRAEMVQTLEKVGIKTFVHHHEVAQGQAEIGVHFGTLVEAADNVQIYKYIVKMVAHLNGKTATFMPKPLYGDNGSGMHVHMSLWKNGVNLFYDKEGYGELSQDAIHYIGGILKNARSVAAFTNPSSNSYKRIVPGFEAPCILTYSCQNRSASCRIPYGMGKNSARVEIRFPDSTANPYLAFVSLLMAGLDGIKNKHIPVGPMEENLFDLTLDEVREKGIEQLPHTLRGSLEALIRYNSFLKPVMSDLFIDDYQHLKFATQVWPVEARPTAYEFKTCYSC

SEQ ID NO: 15940 - protein, 118 aa, Glycine max
MEGKGFTEEQEALVVKSWNEMKKNSQELGLKFFKKILEIAPAAQQLFSFLKDSTVPLEENPKLKPHAMAVFVMVTKLALLETIKEAVPEMWSPAMKNAWEEAHDQLAEAIKSEMKPSD

SEQ ID NO: 15941 - protein, 768 aa, Nitrosomonas europaea ATCC 19718
MSTPIAIHTDPSVHSTKDLKFLEIRYLNGPNMWTYHPVLEAIVDIGELENYPSDTIPGFYERLSSWLPSLIEHRCSYGEPGGFLRRVQEGTWPCHILEHVTLELQNLAGMRGGFGRARETSTSGVYKVVVSAWHKEITLKALYLARELVLAAMGFNQMQLAYDVQHAIGQLRDMIDSHWIGPSTACIVDAAAAHNIPSIRLLDKGNLIQLGHGSRSRYIWTAETDRTTAIAENISRDKELTKSLLRACGVPVPEGRIVTDPADAWLAAEDIGLPVVIKPGDGNHGRGVFIELSNREEIEAAFPIALQEGSDVLVERYIPGIEHRLLIVGGQLVAAARGDSVFVTGNGVSTIAKLIEDQINSDPRRGTSENHPLNFIELDNAIRMELAHQGYTGDSILPSGTKVRIQRNGNHAIDITDEVHPATADLAVLAARIIGLDIAGIDLVVEDISRPLAEQGGAIVEVNAGPSLLMHIKPAIGKPRPVGEAIIDQLFPNQDQGRIPVVGITGSKGMTTIARFVASLLTLSGRRTGLACSSGLYLDHRKIDHGNCANHKSARRILMNRTVEAAVFENGFDTMLEEGLPYDSCQVGIVTRIEPALHFAHQWIDTSEQVFKVLRTQVDVVSPTGGKREGDILPEIILPTGAAILNAQDPMLVQMADLCQGEVIYISCDPTLPVISVHRQEGTGPTRGKRAVTVRNWEILLIDGTAETILIRLDELQAKTGNHPVETAHLLAGVGAGWALGMSPDLIRTGLITFLQHQEKQSIVYQTF

SEQ ID NO: 15942 - protein, 361 aa, Oryza sativa Japonica Group
MLTDCSPKGLGSNDIFDSQWIAPVQFEGLDDSEEEQLKESSSHKRGSYVSQSAVALRCRVMPPPCIRNPYLNTDHQIDDNVFGGRQCKSSGFSPSVDGDGLSRYRTDFHEIEQIGRGNFSVVFKVLKRIDGCLYAVKRSIRQLHNDRERRQAVKEVQALAALGCHENIVGYFTSWFENKQLFIQMELCDRCLSMDRNQPLKCGEALELLYQICKGLDFIHERGIAHLDVKPDNIYVRNGVYKLGDFGCATLIDRSLAIEDGDSRYMPPEMLNDKYEHLDKVDIFSLGAAIYELIRGTQLPDSGPQFTSLREGKIALLPGCPMQFQSLIKSMMDPDPVRRPSAKEVLRHPIFDKLHKAPAKK

SEQ ID NO: 15943 - protein, 856 aa, Nitrosomonas europaea ATCC 19718
MKVLQIRALRGPNVWSKLAAIEATLVFEQNECLPDSIPGFDTRLREYFPDIALLQPVDWQETTLAHILAFITLKLQERAGCSVSFSRVIKMAEANTWRVVVEYSEEAVGRLALEQSLALCRAVAEAAPFDTSEAVNRLRELYEDIRLGPSTNSIVQAAVRRKIPYRRLTDGSLVQFGWGSRQRRILASESDLTSVVAESIVQDKDLTKMLLHTAGIPVPTGRPVISADDAWAAACEIGAPIVIKPQDGNQGKGVTANLTDRDQIKAAYHVAAERSRNVLVERYISGHDYRLLVVGNKLVAAARRDPPQVVGDGIHSIAQLVKQINSNPLRSEGHANLLTRIHLDEISLAHLALQGLNAASVPDKGKLVTLRNNANLSTGGTATDVTDEVHPDIAECAVMAARMTGIDICGIDVICSSLSRPLGEQGGAVIEVNAAPGLRMHLQPSYGKPRAVGEAIIDHLFAPGENARIPVIAVTGTNGKTTTVRLIANMLENNRLRVGIACTDGVFVNGQCVDTGDCSGPQSARNILFHPEVDAAVLETARGGILREGLGFDYCDVAVVTNIGRGDHLGLANINTAEELAAVKRTIVENVNPKTGVAVLNADDPLVLGMASHCPGNVTFFSRNHRHPVILEQRVQGKRVIYMEDHHIIVAEAGTERRISLSQIRLTKNGMISFQIDNAMASIGAGLAIELDWTTICAGLADFVSDAQTVPGRFNLFNYREATLIADYGHNPDAMEALVCAIDHIPAKKRTVVISAAGDRRNEDIRLQTRILGDVFDEVVLFQDKCQRGRADGEVLGLLREGLENAKRVRKVSEIRGEFKAIDTALTNLEAGELCLILIDQVEQALGYIHSRIAVA

SEQ ID NO: 15944 - protein, 170 aa, Glycine max
MGASLSVSEKSIHEFMVKDAKGRDVNLSIYKGKVLLVVNVASKCGFTNTNYTQLTELYSKYKDRGLEILAFPCNQFLKQEPGSSQDVEEFACTRYKAAYPIFGKVRVNGPDTAPVYKFLKANKSGFLGSRIKWNFTKFLVDKEGNVLRRYGSTTSPFSIENDIKRALGEA

SEQ ID NO: 15945 - protein, 304 aa, Zea mays
MEAEAETKRTRESGEDAAAAGISAVIPGWFSEISPMWPGEAHSLKVDKVLFQGKSDYQNVMVFQSSTYGKVLVLDGVIQVTERDECAYQEMITHLPLCSIKDPKKVLVIGGGDGGVLREVSRHSSVEQIDICEIDKMVVDVSKQFFPHLAVGFEDPRVSLHIGDGVAFLKNAPEGPAQELFEKPFFQLVARALRPGGVVCTQAESIWLHMHIIEDIVVNCRQVFKGSVNYAWTTVPTYPSGVIGFMLCSTEGPAVDFQHPVFNIEEDEHPMKSKGPLKFYNSEIHTASFCLPSFAKRVIESKAN

SEQ ID NO: 15946 - protein, 641 aa, Pseudomonas putida
MGKIIGIDLGTTNSCVSILENGNVKVIENAEGARTTPSIVAYANDGEILVGQSAKRQAVTNPHNTLFAVKRLIGRRFEEQVVQKDIELVPYKIAKADNGDAWVEVNGQKMAPPQISAEVLKKMKKTAEDYLGEPVTEAVITVTAYFSDSQRQATKDAGRIAGLDVKRIINEPTAAALAYGMDKAKGDHTVIVYDLGGGTFDVSVIEIAEVDGEHQFEVLATNGDTFLGGEDFDMLLIDYLVEEFKKESGMNLKGDPLAMQRLKEAAEKAKIELSCRAADRRYITADATGRKHLNVKISRAKLESLVEGLVQRTIEPCRIALKDAGIDASKIDDVILVGGQTRMPLVQKTVADFFGKEARKDVNPDEAVATGAAIQGAVLAGDVKDVLLLDVSPLTLGIETMGGVMTALIEKNTTIPTKKSQVFSTADDNQSAVTIHVLQGERKQASSNKSLGKFDLAEIPPAPRGVPQIEVTFDIDANGILHVGAKDKATGKTQSIVIKANSGLSDDEIERMVRDAEANAEEDRKFEELAAARNQGDAGDALVHSTRKMVADAGDKVTAEEKTAIEAAVVALEAAVKGDDKAAIEAKVEELSKVSAPVAQKMYAEQQAEQPQGGAQQAEPEAKHDDVVDAEFEEVKGDDKK

SEQ ID NO: 15947 - protein, 627 aa, Rhodococcus sp. RHA1
MARAVGIDLGTTNSVVCVLEGGDPVVVANSEGSRTTPSVVAFAKNGEVLVGQPAKNQAVTNVDRTVRSVKREIGTDWHVKIDDKNYTAQEISARVLMKLKRDAESYLGEDITDAVITVPAYFNDAQRQATKEAGQIAGLNVLRIINEPTAAALAYGLDKGEKEQTILVFDLGGGTFDVSLLEIGEGVVEVRATSGDNHLGGDDWDDRIVKWLADKFKASSGFDLTKDKMAMQRLREAAEKAKIELSSSQSTSINLPYITVDADKNPLFLDEQLSRSEFEKITSDLLDRTRAPFQSVITDAKISVGDIDHVVLVGGSTRMPAVTNLVRELTGGKEPNKGVNPDEVVAVGAALQAGVLGGEVKDVLLLDVTPLSLGIETKGGVMTKLIERNTTIPTKRSETFTTADDNQPSVQIQVYQGEREIASHNKLLGSFELTGIPPAPRGVPQIEVTFDIDANGIVHVTAKDKGTGKENTIRIQEGSALSKEDIDRMIRDAEAHAAEDSRRREEAETRNQAESLVYQTEKFIKDNEDKVPADVKDKVQSAIKNVQDALAGTDIGAVKTAVEKLGTESQALGQAIYAAQAASEGGTGGGDGGAGAAAGAGASGNGQGADDEVVDAEVVDEPREGHR

SEQ ID NO: 15948 - protein, 164 aa, Mycoplasma penetrans HF-2
MFKMSDFYKFKVNKINGKEIELSEYKNKVVLVVNVASKCGFVKQYENLENMYQKYKDQGLVILGFPCNQFFFQEPKTNQEILSFCTTKYNVTFDMFEKINVNGKEANPLYTWLKEQMPWTARAKNVKWNFEKFLLDKNGNVKYRFESKKIPEEFEQEVVNLINE

SEQ ID NO: 15949 - protein, 298 aa, Fragaria x ananassa
MGDTFEYNYQNNSSCSSSAPASSVSVAQSHSSTDEISLFLQQILVRSSSLTGQQFLFSSSPAGYALPENLGSPSNDSFVGGVIRGVDVSTAVVTASGPNVSSSSVGASENEADEYDCESEEGLEALVEEAAVKSGGRSSSKRSRAAEVHNLSEKRRRSRINEKMKALQNLIPNSNKTDKASMLDEAIEYLKQLQLQVQMLSMRNGMSLHPMCLPGASQFSQIRMDFGGEENRPVHLNMSGILNMNQDPSTQNLYNPNQSLCTRFVKCSQFRRCIWIGSIYSGSLGTLSAPKLIQGNLQ

SEQ ID NO: 15950 - protein, 933 aa, Gibberella zeae PH-1
MAAEARASIWARLKAVKPPFVSKKPHFNFISIHYTWIIGATLCASVIIYGSGRGQTSYIDSLMFASGANTQAGLNPIDVNLLNTFQQVVVYFFTLTSNPITLHTSVVFLRLYWFEKRFQGWVTDARQRRATISKAKTRPRNDDRQNEEGVNGRHITIVPPQGRRQRITNDGILLDGSEAYQSQAIVDDDDDNDHQRRQPPPASSDESDTVSAGRSNSIELSPLEKPGQAHHDNRDEWKEEQSRTQNTPSGIKFAETVKRSDGVDDDLTKFPQRRTHAEHIAILERQRNQDNEVLRIPGPRETERGLGPRRLEEDDGDDDNNTIAMTRTVESRPDHATIDSRGPPGRRPTIVIAEPKRPLKHELTDDARAIGGTLDAIRMRKPRILNRGQKETHDDGDSTMSRAFRTRTIDTIRSALTNDHTKDMPYLSYTPTMGRNSNFVGLTLEQREELGGIEYRSLRTLAVILLSYFWGFQLIAVTFLLPWILHTEKYGRIVEASAVSRTWWGFWTANSAFNDLGLTLTPDSMNSFNTSEYIMMIMWFFVIIGNTGFPVMLRFVIWVLSRLVPTNTGLWEELRFLLDHPRRCFTLLFPSSANWWLFWILVALNAIDLLFFVVLDLNSGPVAQLPVHTRIADGLFQAASTRTAGFSCFSLSDLHPALPVLYMIMMYISIFPIAISIRRTNVYEEKSLGVYSSKKDDDEEESASALNYVGTHLRRQLSFDLWYVFVGFFLLAISEGGSLKAKDFNLFDILFEVISAYGTVGLSMGVPNVNASLCSQFTVVGKLIIVAMQIRGRHRGLPYGLDRAVLLPSEARFQKEAEENQPILIRTRTNASMGAASGMEPPSSPGFPGRRGSASRFRERANSRIISQFLYPGPVIPSNEIHGHKRATSNNSNNTRDFPRFNTEPVFEEEKDEVPPLRPIESHQFTPRRAETG

SEQ ID NO: 15951 - protein, 417 aa, Oryza sativa Indica Group
MSSGGGRPPAAQHIVRSVRQRFVPLPPPLARAPFAAAPGDYHRFAAASRGGEIDEGIVIRRTPLKRKTPCGESEAAESSERMMTSPGFTEGVGSPLMTPVSGKSSRTTKSMAKFNKAGPQTPISNAGSPGNPSTPASSRYDNSLGLLTRKFINLLKQAQDGILDLNDAAKILDVRKRRIYDITNVLEGTGLIEKKLKNRIRWRGSDDSGTNLDSDISCLKTEVENLYIQEQALDRSISEIREKMEELTEDESNHRWLFVTEDDINGLPCFQNEALIAIKGPRGTTVEVPDPDEAGDYLQRRYRILLRSTMGPIDIYLVSQYKKMEELGETATPPRHASVVEPPSIATEAGHSSKQTMPLNVQQDIQETPELNASRAFGRMKKITPSDVDTDADYWLLTDDDISITHMWTTACILDEI

SEQ ID NO: 15952 - protein, 649 aa, Gemmata obscuriglobus UQM 2246
MAEEKIIGIDLGTTNSVVAVMDGTTVKVIPNQDGNPTTPSVVAFTDKGDRLVGDQAKRQAVTNPRRTIYSIKRFMGRRHNEVESEEKLVPYKIVGGSNDLVKVDIDGKNFTPPEISAMVLRKLKEAAEAYLGHTVRKAVITVPAYFNDAQRQATIDAAAIAGFDTEYEMRDKDGKVVKQRMRIINEPTAAALAYALDKKKDQKIAVFDLGGGTFDISVLDVGEDGVFQVKSTNGDTHLGGDDFDQVLMDHIADEFKKQNGIDLRKDQMALQRLKVAAEQAKKDLSSQTNVDINLPFITADENRNPLHLVTSISRVQFERLAEHLIERCKKPVLAALKDAKYTPQNIDEVVMVGGMTRMPRVQQLVKEIFGKEGHRGVNPDEVVAVGAAIQGAQLLLGAAADILLQDVTPLSLGLETLGGVMTVMIPRNKTIPTKASEKFTTAADNQPSVEIQVFQGERPMAQDNKLIGKFHLDGIPPAPRQTPQIEVTFELDANGVLSVSAKDLGTGKSQQIRIEGSSGMTKDEVEKMKRDAEAHAEEDKQKREFADAKNAGEGLIHQLEKMFADAGDKLTDADKAPINAGIAKLKEAIGRNDLAAVKAATAELQQSSQAMASHMYSKTGGATPGPGTPPPGTKDGPDDVIDAEYEVKK

SEQ ID NO: 15953 - protein, 391 aa, Acorus gramineus; identical to SEQ ID NO: 9003

SEQ ID NO: 15954 - protein, 300 aa, Physcomitrella patens subsp. patens
MCTVAQNIDERARNDFLMLLREILRLDMRAREGVALLGSGFLKLDARAREDVEKLDTQARKDMMRFRHIALGLTETASMELSSAAEEHWNDGALDADLRLADLRARRRAMEDLYAALQAVKSVHDALVRTLKIRSVLSAKQGSNVRSLNTNSGWTAFQTGPTLSKTRVGYLQDAYWKMASALAEAEGMECTDPDELEFIVAALLDMEEVDGGGGALLVTESASSPDVATRLALADALSDAPSLWTLGNAGMGALQRLSMDSNPAVAAAASKAINELKSQWRQQDQLIFPYRQIDDASENE

SEQ ID NO: 15955 - protein, 407 aa, Acorus gramineus; identical to SEQ ID NO: 9004

SEQ ID NO: 15956 - protein, 457 aa, Alkaliphilus metalliredigens QYMF
MIRRKLNEIQEMVKGSGLKKSHEDIWINGVSIDTRTIKDTQLYIPIIGEKFNGHEFIEKAMGNGATATLWDKNQPIPNIDFPFILVEDTLDAIQTLAKAYRNQLNVKIIGITGSNGKTSTKDILFNILQTVYKTHKTLGNLNNHLGVPLTLLEMAENTEIAVIEMGMSGLGEIELLSKIASSDVAIITNSTNVHINDLGSVENILKAKLEIIEGLKPHGLFIYFGDSPPLRVGVEKLDLKQKKVTFGINRDNDYTVKLISSENEGIYFELVGSDSPRLFLSMLGNHQIYNAAAAIAVAQYFNITLEKIQEGMLKIEATGMRNELIKCNGFDILNDSYKSNPISLRSVLDTMYSFKKYKQKIVVLGDMFGTGENEITTHIDIGEEIDPSQIDYVFTIGELGKYFAQGAKTRFPDERVFSFMDKSSLTTKLKEMIKKDAIVLIKGSRILELEKVVDELK

SEQ ID NO: 15957 - protein, 385 aa, Amborella trichopoda; identical to SEQ ID NO: 9005

SEQ ID NO: 15958 - protein, 124 aa, Oryza sativa Japonica Group
MMMMDLGFLEGGAGMADAGHDESGSPPRSGGVREQDRFLPIANISRIMKKAVPANGKIAKDAKETLQECVSEFISFVTSEASDKCQKEKRKTINGEDLLFAMGTLGFEEYVDPLKIYLHKYREV

SEQ ID NO: 15959 - protein, 394 aa, Amborella trichopoda; identical to SEQ ID NO: 9007

SEQ ID NO: 15960 - protein, 727 aa, Xanthomonas axonopodis pv. citri str. 306
MTYNVSSCMKAGLLALVLTTPMALLARADTALPAAATPDQATATKLVYGLLSDSRYAYRPRTLDEAMSKDVFKRYLETLDGGKQFFTQADIDSFAPLQAGVGDALRGGNLEPAFKVFSVYKKRVDQRVKYARDLLKQDFDFSGNDKFEYDRKDVPWAADDKQLDVLWRQSVMNDWLRLKLAGKKPDDIRKTLDKRYVALADSVKQLKGEDVFQFFVNAYTNAVDPHTDYFTPRTAETFNQQMSLSLEGIGAQLQKQDDMVVIREVIPGGPAAVDGTLKPGDRIVGVGQAKSGAIEDVIGWRIDDVVAKIRGSKDTQVRLEYIPAESGIDGKHRTVTLTRQKVRLAEQAAKGETITLPATGSEPQRRIGIIKLPGFYQDFEGRRRNAADYASATRDVAKLLAGFKTDKVDGVVLDLRNNGGGSLDEAIELTGLFIEQGPVVQVRESGGRVTVNGDSDPKVAWDGPLAVLINRGSASASEIFAGAIQDYGRGLVIGETSFGKGTVQNIVDLDRWPAAEGQRYGQVKLTIAQFFRVSGSSTQHKGVVPDIAFPASVDATEFGESTYDNALPWTRIAAAPHTQYGNFAALLPKLQALHTARIASDKEFQWWEEDVKQFRDEKAKKYISLNEAERVAERQKQDQQRKDRQQIRKQLGLPLDPLAEDSDDGLTGNERDIVKDTAREKAAEKRPDPLLHESAAILADALGLLSQDKPLSAQVLPKSTSPGRWAD

SEQ ID NO: 15961 - protein, 164 aa, Bacteroides fragilis NCTC 9343
MAAQNKSFYDFTVKTIDGKEYPLSGLKGKKVLVVNVASKCGLTPQYAELQELYDQYKDQNFVIIGFPANNFMGQEPGTNEEIAKFCSVNYDVTFPIMAKISVKGKDMAPLYHWLTEKKLNGKQDAPVQWNFQKFMIDENGNWVGFVAPKESPFSETIISWIEKK

SEQ ID NO: 15962 - protein, 360 aa, Oryza sativa; identical to SEQ ID NO: 12223

SEQ ID NO: 15963 - protein, 3543 aa, Arabidopsis thaliana; identical to SEQ ID NO: 14204

SEQ ID NO: 15964 - protein, 1132 aa, Arabidopsis thaliana; identical to SEQ ID NO: 11677

SEQ ID NO: 15965 - protein, 147 aa, Lactococcus lactis subsp. lactis Il1403
MNGETVSMSDFKGKVVIVVNTASKCGFTPQFEGLEKLYENYKDQGLEILGFPCNQFVNQDAGENSEINEFCQLNYGVTFPMFQKIKVNGKEAHPLYQFLKKEAKGALSGTIKWNFTKFLIDREGNVIERFAPKTEPKEMEEEIQKLL

SEQ ID NO: 15966 - protein, 469 aa, Brucella suis 1330
MTTANDILKQIKDNDVKFVDLRFTDPKGKLHHVTMDIGLVDEDMFVDGVMFDGSSIAGWKAINESDMVLMPDPETAHIDPFFAQSTLVILCDILEPLSGESYSRDPRTTAKKAEAYLKSLGIGDTVYVGPEAEFFVFDDVKFKADPFNTGFKLDSAELPSNDDTDYETGNLGHRPRVKGGYFPVPPIDSLQDMRSEMLTVLSEMGVTVEKHHHEVASAQHELGTKFDTLVRNADKMQIQKYVVHQVANAYGKTATFMPKPVFGDNGSGMHVHFSIWKDGKPTFAGNEYAGLSENCLYFIGGVIKHAKAVNAFTNPSTNSYKRLVPGYEAPVLLAYSARNRSASCRIPFGSSPKSKRLEVRFPDPSANPYLCFSALLMAGLDGIKNKIHPGQAMDKDLYDLPPKELKQIPTVCGSLREALQSLDKDREFLKAGGVFSDDQIDSFIELKMAEVMRFEMTPHPVEFDMYYSV

SEQ ID NO: 15967 - protein, 490 aa, Yersinia pseudotuberculosis IP 32953
MRDLFAPWGLDVPERALREMTLDSRIAAAGDLFVAVVGHQTDGRRYIPQAIAQGVAAIVAEADGVAPDVSVAEIHGVPVIYLRNLNQHLSTLAGQFYHQPGAALRLVGVTGTNGKTTTTQLLAQWSQALGETSAVMGTVGNGLLGQVIPTENTTGSAVDIQHLLRNLVDQGATFAAMEVSSHGLIQDRVAALPFAAVVFTNLSRDHLDYHGNMTSYEAAKWLLFSTHQSEHKIINADDDVGRRWLSQLPQAVAVSMAGNVPKGWNGPWLSANKVIYHDNGASIAFDSSWGEGELESRLMGAFNVSNLLVALATLLVQGYPMAQLLAAAPHLQPVCGRMEVFNAPGKPTVVVDYAHTPDALEKALAAARLHCTGKLWCVFGCGGDRDKGKRPLMGGIAEQLADCVVVTDDNPRSEEPQAIVADILSGLLDAGRVQAIHGRAEAVTSAIMQAKEDDVVLIAGKGHEDYQLVGNRRLDYSDRVTVARLLGGQA

SEQ ID NO: 15968 - protein, 727 aa, Xanthomonas campestris pv. vesicatoria str. 85-10
MTYNVSSCMKAGLLALVLTTPMALLARADTALPAAATPDQATATKLVYGLLSDSRYAYRPRTLDEAMSKDVFKRYLETLDGGKQFFTQADIDSFAPLQAGVGDALRGGNLEPAFQVFSVYKKRVDQRVKYARDLLKQDFDFSGNDKFEYDRKDVPWAADDKQLDVLWRQSVMNDWLRLKLAGKKPDDIRKTLDKRYVALADSVKQLKGEDVFQFFVNAYTNAVDPHTDYFTPRTAETFNQQMSLSLEGIGAQLQKQDDMVVIREVIPGGPAAVDGTLKPGDRIVGVGQSKNGAIEDVIGWRIDDVVAKIRGSKDTQVRLEYIPAESGIDGKHRTVTLTRQKVRLAEQAAKGETITLPATGSEPQRRIGIIKLPGFYQDFEGRRRNATDYASATRDVAKLLAGFKTDKVDGVVLDLRNNGGGSLDEAIELTGLFIEQGPVVQVRESGGRVTVNGDSDPKVAWDGPLAVLINRGSASASEIFAGAIQDYGRGLVIGETSFGKGTVQNIVDLDRWPAAEGQRYGQVKLTIAQFFRVSGSSTQHKGVVPDIAFPASVDASEFGESTYDNALPWTRIAAAPHTQYGNFAPLLPKLQALHTARIATDKEFQWWEEDVKQFRDEKAKKYISLNEAERVAERQKQDQQRKDRQQIRKQLGLPLDPLAEDSDDGLTGNERDIVKDTAREKAAEKRPDPLLHESAAILADALGLLSQDKPLSAQVLPKSTAPGRWAD

SEQ ID NO: 15969 - protein, 164 aa, Synechococcus sp. PCC 7002
MTTQTPTSIYDFSATAIDGTSVDLSTYKDQVLLIVNTASQCGFTPQYKGLQALHEQYGNKGLVVLGFPCNQFGQQEPGNESQIQSFCETTFGVSFPMFQKIDVNGSNAHPLYQYLTKEVPGILGTKNVKWNFTKFLINRQGQVVKRYAPTATPEAIAKDIQELL

SEQ ID NO: 15970 - protein, 236 aa, Arabidopsis thaliana [sequence omitted]

SEQ ID NO: 15971 - protein, 1055 aa, Nostoc sp. PCC 7120
MKVLHGSWIPNQYSDFVQSGAFYLWVETPINNKKRTHTQVHPGHLSSLELLNFLTQTLGIKETEAQLKQRICSKYFALPTANNEPLPSPELVKYLEVEVPEEYENFQYWQVTCYETVTSVKAVIAINIIKLLKDIHFLALYNASEFQLGSDLLFWYHYTQSFRQIITKDQYIPSLKYRANAATTKKKPKQPPPGFEIYAGWEIISEQYEANIQKYIEYMPLICVAGNSTQTDKLEFFAPETLLRHFSEYLLNNLVSKTPLTAAFEKQIDDSLIHYCLYPQKHNPLKTHTALQEYQQWLGWKNRIIRTQAESPFHLCFQLHSPDAEQIDNWQMQFLVSSKKDPSLKLALADYWIMNSKTKAGVHKEFGKDFDTNLLLNLGYAARMYPKLWQGLETDSPTGMQLSLDEAFDFLKDSAWVLEDSGFKVIVPAWYTPAGRRRAKIRLKASSGRKVAATVGESKSYFGLDSLVQYQYELAIGEQTLTPQEWEQLINTKAPLVHFRGQWMELDRDKMQQLLEFWQSHGDEQPQMSLLEFMQRSAQGEDDWEIEYDAALSEIMAKLQDKSQLEPISEDLNLQGNLREYQKRGVAWLQYLEKLGLNGCLADDMGLGKSVQVIARLVQEKDSQSSPLPTLLIAPTSVVGNWQREIAKFAPHLKTMVHHGSDRLQDAAEFKSACQQHDVVISSFTLARLDEKLLNSVTWQRLVLDEAQNIKNPKAAQTKAILKLSAKHRLALTGTPVENRLLDLWSIFNFLNPGYLGKEAQFRKSFEIPIQKDNDKVKSTTLKKLVEPLILRRVKTDQSIIKDLPDKVEQKLYTNLTKEQASLYEVVVRDVEEKLQEAEGIQRKGLILSTLMKLKQICNHPRQFLQDNSEFLPERSHKLSRLVEMVDEAISEGESLLIFSQFTEVCEQIEKYLKHNLHCNTYYLHGGTSRQRREQMISDFQNPDTEASVFVLSLKAGGVGITLTKANHVFHFDRWWNPAVEDQATDRAFRIGQKKNVFVHKFVALGTLEERIDQMIEDKKKLSSAVVGSDESWLTELDNEAFKKLIALNKSTIME

SEQ ID NO: 15972 - protein, 385 aa, Pasteurella multocida subsp. multocida str. Pm70
MKALHFGAGNIGRGFIGKLLADSGIQVIFADVNDHVIEQLKTQRAYPVKIVGDRLNVIETVSNVTGVNSKNEADIIACFTEVDLVTTAVGPNVLKIISSTIAKGLSARFRAGNTRPLNIIACENMVRGTSFLKDNVFSYLTPEEQQQAEAQIGFVDSAVDRIVPPVQFDPANPLLVTVEEFSEWIVDKTQFKGTIPAITGMEQTDNLMAFVERKLFTLNTGHATTAYLGKLKGHQFVKDSIDDPDIREAVKATMQESGAVLIKRYGFDPHAHAAYIEKILKRFANPYLQDDVDRVGREPLRKLSYNDRLIKPLRGTLEYGLPNQHLIQTIASALAYRNESDPQAVELAQLLQQDTLESAVKKITELTESNIVQQIVTAYNALQKN

SEQ ID NO: 15973 - protein, 497 aa, Thermosynechococcus elongatus BP-1
MNLRELLTAAAITPGFEHPALNQEVKSLRMNSWECEPGSLFIGMPGTRVEGGNFWPSALAAGAIAAVVSPQAKPREGEACVIVVPDIERACGRLAAAFYNYPSQHLSLLGVTGTNGKTTTTHLVEHLLNRVGYPTALLGTLYSRWPGHCEVASHTTPFAVTLQEQLAAAVDAGCRFGVMEVSSHALAQDRVWGCQFEVAAFTNLTQDHLDYHRDLEDYFAAKAKLFTADYLKGRAILNGDDPFGQRLAQQLPRDRYWTYGLSKDADFRAENLNYRSNGVTGAVHTPLGSGTLDSPLVGQFNVANVLAAIAMGAAVGLPLEAMLNALRDFPGVPGRMEQVRLDPEQDITVVVDYAHTPDSLENLLRAARPFIPGKLICVFGCGGDRDRSKRPQMGAIAARLADQVVVTSDNPRTENPQRILDDILAGIPPETAMIVEGDRRQAILQAILTAAPGDGVIIAGKGHEDYQILGTEKVHFDDREEARNALKERLKQPLQRG

SEQ ID NO: 15974 - protein, 1186 aa, Vitis vinifera
MPDTLDKERPASNGNSSVLSGSVLPDSTETKGFKRSHDNGELDVDNKRFRTVIIDSDDETHEVGNVSNSLVNNMTKMEGQSVLQETEGDFVGSGSLPSKHMNGNFHCTACNKVAIEVHCHPLLKVIICGDCKCLIERKMHVKDPDCSECYCGWCGRSNDLVGCKSCKTLFCITCIKRNIGEECLSDVKASGWQCCCCSPSLLQQLTSELEKAIGSSSLTVSSSDSDSDDSDEDINLLLFCISSKRRRKKKIRRILDDAELGEETKRKIAIEKERQERLKSLQVQFSEKSKMMNAASCNGNLSEDTSVEVLGDASKGYIVNVVREKGEEAVRIPPSISAKLKVHQITGIRFMWENIIQSIRKVKSGDKGLGCILAHTMGLGKTFQVIAFLYTAMRSIDLGLRTALIVTPVNVLHNWRQEFIKWRPLELKPLRVFMLEDVSRERRAELLAKWRAKGGVFLIGYSAFRNLSLGKNVKDRHMAREICYALQDGPDILVCDEAHMIKNTRADTTQALKQVKCQRRIALTGSPLQNNLMEYYCMVDFVREGFLGSSHEFRNRFQNPIENGQHMNSTSDDVKIMNQRSHILYEQLKGFVQRMDMSVVKNDLPPKTVFVMAVKLSSLQRKLYKRFLDVHGFTNDKVSSDKIRKRCFFAGYQALAQIWNHPGILQLTKEEKDYARREDGVENFLADDSSSDDNIDYNTVLGGNIFPMFSVFPENSVCVSLYTKNIHLVKWSAVWIQRLSLLNKALLCKWIWRFATEREEEGGWWSCEVRYGYGVGFWKSIMKEQSTLLGNFFFFFFGWWNDLLHENNYKEVDYSGKMVLLLDILTMCADVGDKALVFSQSLSTLDLIEYYLSKLSRQGKKGKCWKQGKDWYRLDGRTEGSERQKLVERFNDPLNKRVKCTLISTRAGSLGINLHSANRVIIVDGSWNPTYDLQAIYRAWRYGQTKPVFAYRLMAHGTMEEKIYKRQVTKEGLAARVVDRQQVHRTISKEEMLHLFDFGDDENPDILPERGKEEEHTTNQNMTGQVGNSLKDKLSLSHGSCSSDKLMESLLVRHYPRWIANYHEHETLLQENEEEKLSKEEQDMAWEVYRRTLEWEEVQRVPLDESTFERKPAVSNAAPLVTESISLSETKISRLRNHLVQRKCTNLSHMLTLRSQGTKVGCSTVCGECAQEISWEDLNRDGRAVR

SEQ ID NO: 15975 - protein, 163 aa, Chlamydomonas sp. W80
MASPFYALAATDIAGKEFPFAQLQGKVVLVVNVASQCGFTPQYKGLQELYDKYKDEGLVIIGFPCDQFGHQEPGQESEIASFCQKNFGVTFPMMAKIEVNGDNTHPVYQFLKSEKKQLFMERIKWNFEKFLINKQGEVVERFSSAGDPMRNIAPAVAKLLAEA

SEQ ID NO: 15976 - protein, 695 aa, Physcomitrella patens subsp. patens
MSCEKVMEGHAHIPCLDEQSFVKRQESRRITLTHAIHPPGRGIFSQCCGFGTCFGRSVSMLSCGRIPLLPALSFLICNAGCGILKPSASDLVLFVLGVAHLVRLCKCPFSGLVIQRACAVSFTWFIFEWFKYYFLPHSGFDDALITTTTALFSLSPLFPELMLLANSVNFDEQKFDFTMQGGEGFEVFTEAPHTHSEKMSLSASTHLREACTQILMGAQGGSKDRKGKRNMVIGVGCRFEMKGDAKVDEKVCMMSDKKTVVPLPARNVGGPAEAARCAFNDAMLVRATVQNIDERARSDFHLLSRQILRLDRRVREDVALLGSGFLKLDARAREDVVKLDTNARQKMMRLRHIALGLTESASMELSNAAEEHWSDGALDVGSSLLSFNCLASLVLLLDADLRLVDLRARRRAMEDLYAALEVVKNVRDALVNTLRVRSNKPAQVDVGKVGVSEGAADDSQDFRSYLRKSNPMPDRLTAIQDACLKMASALVEAEGMECTDPDELEFIVAALLDMEEVDGGSGALLVTESASSPDVATRLALAGALADAPSLWTLGNAGMGALQRLSTDSNPEVAAAATKAINELKSQWRQPDHLTFPYSQSHFAPIWVALISAMSTHTDNQQINDMIFITGFLYMQVSFHEVETAAKHLSMVLQTFELELCHNYSISISEVLISDHVTLDLVIELATQELEKTAI

SEQ ID NO: 15977 - protein, 1194 aa, Treponema denticola ATCC 35405
MARQTYGTTPWGAWFLDMLKAYDDSGRLSRGKTYANTGKVNSLVVNGQTAGAKVKGNYSPWYHVYFKFPPLSKTNKTAIRSILEKHPIELAGLRAGIMSPALIEALKKKKVRLIPARWNLIERDCTCPDSGDPCKHMAAVLFLLAKEIDHDPRLLFKLAGFDIDSINVPETEVFEKGGTQKLGLLQEQPVPLSLRKNETLNKAADLSSDSSVSETAHNSCELQSPLKFSLGESYLPLITNILPPEPNFSSSDFIIKLTEFYHKAVLNYGLNFYGQEKQSEKQEEKSVNPFLFARVKVNIDNIRKQKRAFPLEPKSPLTVNIKLGETHEINQTLLQAQNFYKTRNSLNEMSPSVKILFSLFALAGKLIQSSAFIPAVFTENKKLFIFWKSLSASSEIKADIFKFAASLTKDFFLPVGKWGRLYCAELLLTALLTEYAASLKFFPNKSYTKDKEIDKLFFLNEEIDISVPGKRNLDTVIYSWLSVLNYSNCGYEYRLTLEALKDDEFFLLSALVRKAKEKRIEAGDDSFALEAEAPFAELNTAAKRSKNPDDILRFPATLAAYLPALSILAIKKNVMLSREETGLFLQKSAKLLQRFGIDIVLPKSLKNILTPKPVISVKSVKGAGNIVSFLNIDDVLSYDRALMLGDTLIDIDEFKKLFLNKSGLVKFNDQFLLLDPEEVAKMLKALEKPADTKEVLQAVLSGNAVCSKPASEIIKNIFRQEEVPVPQNLNAELRPYQKQGYRWLYANIKSGFGCLLADDMGLGKTVQIISLMLSFKNSKEAESPFLVIAPASLLSNWEHEIAKFAPSLKTAVYHGAGRKFTTEADVIISTYQTMQKDIEKLKDKKVFCIILDEAQAIKNSGTKKAHAVKAIQARGRVALTGTPVENNLEDMRSIFDFFLPGYLGTADEFRKKWRIPIELHNSETEADDLKKITSPFLLRRLKTDPKVISDLPDKIITNQYCNLTPEQLAIYENLVETELHKVMGAETKIERQAYVLKLLTALKQVCNHPRAYDKETPIEMKYSGKAAVLIELLNEIISSGEKAIIFSQYVGTLDILKNIIQKELGTEPLLLHGQMPASKRKKAVEVFQTDSAYRIFLISLKAGGTGLNLTAANRVIHFDLWYNPAVEDQATDRAFRIGQTKNVFVHRLICSGTFEEKIDEMIQKKREISGMSISAGETWISKLSNEELAGLFKS

SEQ ID NO: 15978 - protein, 259 aa, Debaryomyces hansenii CBS767
MVSNIVIPGDGILNDTNTTKTTIGPGIYKNPQTQEIIPASAGILNVKTNKQNTNTVIFTDSNSKRYIPQTNDFVIGIIVGVFGESYKVQLQDFSTSVQLSMMAFPNASKKNRPNLKIGQAVYARVSQAIPEIDTELECIDPITGKEGGFGLLDESGYIFNINLNFARELLFNQSSVFLEKLSTKCKFEIAIGINGKVWLKCGDGIKKQTNDAEDDDKEKSSSSARDLRATLAACRFLTKCQHINPSQIDIELKEAFKHF

SEQ ID NO: 15979 - protein, 488 aa, Haemophilus influenzae R2846
MKKLTALFNLPELKNDIELHNMVLDSRKVKAGDLFVAIKGHQVDGNQFIDSALHSGASAVVSETELSSEHLTVAFIRNVPVVKYYQLARHLSSLADVFYDSPSKNLTLVGVTGTNGKTTISQLLAQWAELLGHRAAVMGTIGNGLLGQIVEAKNTTGSAVEIQSSLSTFKHAGADFTSIEVSSHGLAQHRVEALHFKAAIFTNLTRDHLDYHQSMENYAAAKKRLFTELDTQIKVINADDEIGYQWLTELPDAIAVSMNADFKVGSHQWMKAINIHYHFKGADITFESSWGNGVLHSPLIGAFNVSNLLLVMTTLLSFGYPLENLLATAKSLKGVCGRMEMIQYPNKPIVIVDYAHTPDALEKALIAAREHCQGELWCIFGCGGDRDRGKRPLMAQVAEQFAEKIIVTKDNPRTEPQSQIEADIVAGFKNMEKVGIIPDRAQAIQFAIESAVENDVILIAGKGHEHYQIIGSEVVHFSDQEIALDFLK

SEQ ID NO: 15980 - protein, 150 aa, Glycine max
  misc_feature (8)..(8): Xaa can be any naturally occurring amino acid
  misc_feature (12)..(15): Xaa can be any naturally occurring amino acid
  misc_feature (18)..(18): Xaa can be any naturally occurring amino acid
  misc_feature (20)..(20): Xaa can be any naturally occurring amino acid
  misc_feature (23)..(23): Xaa can be any naturally occurring amino acid
  misc_feature (27)..(27): Xaa can be any naturally occurring amino acid
  misc_feature (29)..(30): Xaa can be any naturally occurring amino acid
  misc_feature (32)..(32): Xaa can be any naturally occurring amino acid
  misc_feature (34)..(34): Xaa can be any naturally occurring amino acid
  misc_feature (43)..(48): Xaa can be any naturally occurring amino acid
SITFKHQXIIGXXXXKRXAXSIXLAFXQXXFXGXTTDPVNATXXXXXXIVVLFSTLVFGFLTKPLIRYLLPHSATRKSISHSESGPPFDDLNLPFLSLEESAATNISRAKASLSMLIESPVFTIHRYWRRFDDAYMRPIFGGPHGNQSQC

SEQ ID NO: 15981 - protein, 192 aa, Neisseria gonorrhoeae
MSIKNAVKLIEESEARFVDLRFTDTKGKQHHFTVPARIVLEDPEEWFENGPAFDGSSIGGWKGIQASDMQLRPDASTAFVDPFYDDVTVVITCDVIDPADGQGYDRDPRSIARRAEAYLKSSGIGDTAYFGPEPEFFVFDGVEFETDMHKTRYEITSESGAWASGLHMDGQNTGHRPAVKGGYAPVAPIDCG

SEQ ID NO: 15982 - protein, 429 aa, Prochlorococcus marinus subsp. pastoris str. CCMP1986
MNSSFNKFLIFKKWIIIIMICIFSTNFFYIPSADALSDSKQFVLDAWTLVNEGYYDPERLDELQWKRIRQKTLQKQIETSEEAYSAIEDMLKPLEDPFTRILKPKDYELLKTSNFGSEINGVGLQLGEDEITKEINVISTLAGSPAEEAGIISGDQIVKVDGISCSELGLANTASKLRGESGTKVLVQIKSISDETKEIDLERRSVDLRPVRTKRLRDDSHTIGYLRITQFSESVPKKIEEALQELKDKEVEGVILDLRNNSGGLVSSGIAVADSFLSEKPIVETKDRNGIKDAIISQKNTSFEGPMVTLVNKGTASASEILAGSLQDNNRSTLMGEQTYGKGLIQSLKSLGEDSGIAITVASYLTPQGNNIQGKGITPDKILGLPEAREYGNSEDKWVKNAEIFLNALFDENDVEDKVNELENKDIEN

SEQ ID NO: 15983 - protein, 197 aa, Oryza sativa Indica Group
MESRKPPPSALVDNHVVPGDVVLDLTEMTNQTIKLGAGLRQDCDTIQTTSAGRLRLSKPNKYWVESSQKRYIPSVEDTVLGVVVDTKPDNFLVDIKGPNLAFLPVLAFEGGTRRNIPKFEIGTLIYARVVKANSIMNPELSCMDATGKAAEFGQLKDGYMFDTSTGLSRIIFEWHRATKYGGKSLGETILMLPSGPY

SEQ ID NO: 15984 - protein, 392 aa, Annona sp. SM-1999; identical to SEQ ID NO: 9040

SEQ ID NO: 15985 - protein, 613 aa, Listeria innocua Clip11262
MSKIIGIDLGTTNSAVAVLEGGEAKIIPNPEGARTTPSVVGFKNGERQVGEVAKRAAITNPNTISSIKRHMGTNYKETIEGKDYSPQEISAIILQYLKSYAEDYLGETVDKAVITVPAYFNDAQRQATKDAGKIAGLEVERIINEPTAAALAYGMDKTETDQTILVFDLGGGTFDVSILELGDGVFEVHSTAGDNELGGDDFDKKIIDYLVAEFKKDNGIDLSQDKMALQRLKDAAEKAKKDLSGVTSTQISLPFITAGEAGPLHLEVTLTRAKFDELTHDLVERTIAPTRQALKDANLSASDIDQVILVGGSTRIPAVQETIKKELGKEPHKGVNPDEVVAMGAAIQGGVITGDVKDVVLLDVTPLSLGIETMGGVMTTLIERNTTIPTSKSQTFSTAADNQPAVDIHVLQGERPMAKDNKTLGRFQLADIPPAPRGIPQIEVSFDIDKNGIVTVRAKDLGTGKEQNIVIKSSSGLTDEEIEKMVQDAEANAEEDKKNKENAELRNNADQLVFTVDKTLKELEGKVEEEEVKKAEAARDELQEALKGENFDAIKEKTDSLNEIVQNLSVKLYEQAAAEQQAAGGAEGQEAPQNDDVVDAEFEEVNDDDKENK

SEQ ID NO: 15986 - protein, 341 aa, Annona sp. SM-1999; identical to SEQ ID NO: 9041

SEQ ID NO: 15987 - protein, 390 aa, Aquilegia sp. SM-1999; identical to SEQ ID NO: 9044

SEQ ID NO: 15988 - protein, 392 aa, Aquilegia sp. SM-1999; identical to SEQ ID NO: 9045

SEQ ID NO: 15989 - protein, 547 aa, Synechococcus elongatus PCC 7942
MSHTRGRSLPLLPVLPFLLADLSLAAVTAKPEPSADLATTLTICLLGATLVALISRRFRIPYVTGLVLAGLTITNLLPRRLGIDSGLILNLFLPILVFQAAINTDISRLRSSFAPISVLAGPGILLATGVTASVLKFGLNLDWIPALLVGSILAITDTVSVIAVFREIAVPSRLTTIVEGESLFNDGVALVIFGLIVELQAGEQVTAISAVQSFFLVVLGGGLLGLATGYLASGLFRTLADDSLSGILLTVAVAFGTFQLGEALNVSGVVAVVVAGLTVGNLALDRAQSPSSRLTLINFWEYAAFCVNTFIFLFIGVEVDPRSLLQTLPAVLLAIVAYQLARLVTVYPLMALVNRFDRPIPFRWQHVLFLGNIKGSLSMVLALSLPATLGNRSELVNLVFGVVLLSLVVQGLSLPWFVKRLKVATRSTRSQEAEQLQAQLIAGKAVQSELLNLYDAGVLPKAVHEELRARYQLAIAGAEQSLRGLYNRRSTNLRNSAAPAFSSLQRRLLLVEKNALLDSARKGILTEEAIADRLQVIDAELLRAEAD

SEQ ID NO: 15990 - protein, 345 aa, Austrobaileya scandens; identical to SEQ ID NO: 9046

SEQ ID NO: 15991 - protein, 360 aa, Austrobaileya scandens; identical to SEQ ID NO: 9047

SEQ ID NO: 15992 - protein, 396 aa, Brasenia schreberi; identical to SEQ ID NO: 9048

SEQ ID NO: 15993 - protein, 352 aa, Cabomba sp. SM-1999; identical to SEQ ID NO: 9049

SEQ ID NO: 15994 - protein, 300 aa, Oryza sativa
MSVAAEGKEKGVGGGGGGAGAGACELCGAAARVYCGADEATLCWGCDAQVHGANFLVARHARALLCRGCARPTPWRAAGPRLGPTASLCERCVRRGGGGRGGGGGGGAAGGGGRGGGGDEEMGGEGDEEEEDEDEEVVVEEEEDEDDEDEEGEGEGENQVVPWAEEAEATPPPVASSTSSSSREAAANGANAADRVKEDQPCSTSQPSLCRYASSAHHGGGGRSDEATSSRNGGGVGGRFLASRHRKRSPSDFRRSGLAQSLIDSKLAFRFQEHCKSTFPSSSLSILPCTWQLFLRQLKQ

SEQ ID NO: 15995 - protein, 390 aa, Calycanthus floridus; identical to SEQ ID NO: 9051

SEQ ID NO: 15996 - protein, 393 aa, Calycanthus floridus; identical to SEQ ID NO: 9052

SEQ ID NO: 15997 - protein, 444 aa, Blastopirellula marina DSM 3645
MPRRNLTIIFVFAFVSLICYGAASRNRFMRLFGESLDIISYEYVRSIDAETLFNSAMNGMTMELDQNSTYIPPIDFEDFREELDQEFGGIGIHVMYDEKNDQMLVVTPVSGTPAYEAGVQAGDVILAIDGKKVAQDGFEKAVQRLRGVVGTKVKLQVQHIGRTKPTEIEVERARIQVASVLGDTHDGAGDWNYFFEAYPRIGYIRIESFGDLTSDEFQVAWESINGKVDGLIIDVRNNPGGYLTAAEEICDMFLDKGVIVSTRGRDGRIEEVSEATSSGTIIPQNLPVAILVNQYSASASEIVAACLQDHDRAVVIGQRSYGKGTVQSIFPLDRAQRALKITTATYWRPSEQNIHRFPDYGDDDPWGVSPNPGFDVPLSDEDLKNMLRSRSFRDVDRSNIADQAAIDGREKSEEEIELEGFVDPQMEKAIEYIQSQVKDDVAAR

SEQ ID NO: 15998 - protein, 389 aa, Streptomyces avermitilis MA-4680
MSGPDPFCEPRRFGRGAALTLLFASVLVAGAATGSFDEPDDSGRKASSARPAPASHREDVAEAAAEAAADGKSPVEAAERAVSRSGDRWGAVYSQGEYEEFEEALDGQYTGVGLWARRERDGRIEVSRVQSGSPAAAAGIREGDRLRTVDGENVAGKPVTDVVSLLRGDAGDAAAGTRVRLGLARGTHAWDETVRRARLSTDPVTVRRLADDVTVIKVAAFTKGSGDRVRAAVADAPHADGIVLDLRGNSGGLVTEAVTAASAFLDGGLVATYDVNGEQCALHADSGADTTRPLVALVDGGTMSAAELLTGALQDRGRAVVVGTRTFGKGSVQMPSRLPGGSVAELTVGHYRTPSGHSVDGRGITPDLEADTEALERAGTVLSGLGDPS

SEQ ID NO: 15999 - protein, 340 aa, Solanum lycopersicum
MEVIMNNHNNGTINTNTKIIHKNGSICNGNGNVNGNSHTHNNENKLVEFTNSIKPGWFSEFSALWPGEAFSLKIEKLLFQGKSDYQDVMLFESATYGKVLTLDGAIQHTENGGFPYTEMIVHLPLGSIPSPKKVLIIGGGIGFTLFEVSRYPSIEKIDIVEIDDVVVDVSRKFFPYLAAGFDDPRVSLIIGDGAAFVKAAQPGYYDAIIVDSSDPIGPAKDLFERPFFEAVAKALRPGGVVCTQAESIWLHMHLIKKIIANCRQVFKGSVNYAWTTVPTYPTGVIGYMLCSTEGPEVNFKNPVNSIDKYVKSKGPLKFYNSDIHKSAFILPSFARDLFES

SEQ ID NO: 16000 - protein, 475 aa, Acidobacteria bacterium Ellin345
MTELRNFLALPYDELEELNLKAKEQRMKRVAADKIQEERLKYLTDEKRIKAVTVLFSDLEGRLHMLDYDKKFLLKSYDNLTFDGSSIRGFTAQRESDLRLYIDWSAFYWGPADIFGPGKVLVFGEVISKEGKHYEADVRGVLKTFSETLHKKEGYTLNAANEIEGFLFKGEDAERRFHDTHAFEYVNTGGYYHSLPGDPLRTFIDTTAEVQRSMGFQNEKDHPEVAPSQFEINYSYGEVVAAADQIQLYKLICRQVATKMGLSASFLPKPVVGVNGSGMHTNVSISKGGKNLFWDPKGEEQLSSFGWSFVDRILTHGNDICLMLNASVNAYRRLDPHFEAPNQIKASPTDRGSMVRIPIGNEKSMRVEVRSVGPDANPYMVMYSVFKTGLHGEIAKIKNLRQAERYLPDNIYTALEHFRLADWTTKLLGADVKGRYADLKQASADRCARLLGTVVKAPEVQFHHDVYNQYLWNQF

SEQ ID NO: 16001 - protein, 297 aa, Thermoanaerobacter tengcongensis MB4
MILKLEVGVGLKNLNGKWGLDSSKEFYWEPDVEGGYRVYKVKSVIIEHQSLYQKIDIVELETWGKSLFLDGSLQSTESDEFIYHELLVHPAMRVHPSPKRVLICGVGEGKSVREVLKYPTVKEVIGVDIDKEVVALCQKHLGKTPIDDKRVRLVYQDVAEFIKNYRGEPFDVAIVDVTDDLDGPARSVHQLDFYKRLYEILGEKATVVVQGTSAFSKVKNVGFCHIYEILKEVFPFVIPYADYIPSFSDLWTFFVALKGIKDLTPRHEIPRDLKYYDEYTNERIFTLAKPLREKLGV

SEQ ID NO: 16002 - protein, 344 aa, Calystegia sepium
MEVMAAHNNGFTNHQNGTTTNHQNGTTTNHHNGTANHQNGNGTAHEDGGKDFGCIKPGWFSEFSQMWPGEAFSLKIEKLLFQGKSDYQDVMLFESATYGKVLTLDRAIQHTENGGFPYTEMIVHLPLGSIPNPKKVLIIGGGIGFTLMEVSRYPTIEKIDIVEIDKMVVDVSRQFFPYLGAGFEDPRVTLHIGDGAAFVKDAQKGYYDAVIVDSSDPIGPAKDLFEMPFFEAVAKALRPGGVVCTQAESIWLHMHFIKQIIASCRQVFKGSVNYAWTTVPTYPSGVIGYMLCSTEGPDVDFKNPVNPIDKDTSHVKSKGPLKFYNAEIHKAAFTLPSFVQKLLE

SEQ ID NO: 16003 - protein, 446 aa, Lactococcus lactis subsp. lactis Il1403
MTITAADIRRDVKEKDIKFLRLMFTDILGTLKNVEVPATDEQLDKLFENKMMFDGSSIEGFVRINESDMYLYPDLDTWIVFPWGDEYGKVAGVICDVYTPEGEPFAGDPRGVLKRNLKSMEKLGFKSFNLGPEPEFFLFKLNENDEPTLEVNDKGGYFDLAPTDLAGNTRREIVNVLTDLGFEVEASHHEVAIGQHEIDFKYANALKACDNIQIFKLVVKTIARKHGLHATFMAKPVHGINGSGMHCNMSLFTEDGANAFADPTGDMGLSDVAHSFIAGLLKHAYNFTAITNPTVNSYKRLVPGYEAPVYVAWAGRNRSPLIRVPASRGLSTRVELRAVDPTANPYLALAVLLAAGLDGVEHKLEAPEAIESNIYVMTEEERKAHGITDLPSTLHNAVKALPEDTIVTEALGEHVLVNFVEAKRIEWASYAQFVSQWEIDNYLELY

SEQ ID NO: 16004 - protein, 296 aa, Parvularcula bermudensis HTCC2503
MSGRFIIDVDGQRWFKEEVTPEIGHALRIDRTLYEGEIDHQHLIVFENQRFGRLFALEGFVQISTADEFIYHEMLVHVPFFAHGRAKRVLIIGGGDGGAIREVLRHRTVEQVTLVEIEKAVVDFSKEWFPSLSAGAFDDPRLDLRIADGAAFVKEDQEPYDVILVDSTDPVGPGKVLFTEEFYRDCYARLGDEGIMVTQCGLPFLQAPELKTAYENQSASFAAPRFYTIAVPAYSGGLMALGFARKGGEDPSPADLAARIEKADLGTFKVYSAKTHQGAFMGPAYIDTILKTGQFG

SEQ ID NO: 16005 - protein, 340 aa, Datura inoxia
MEVISTQTNGSAIIMNYSHHNGNSDHRNGGATAHDHDNGRKLLGNSNSIKPGWFSEFSALWPGEAFSLKIEKLLFQGKSDYQDVMLFESATYGKVLTLDGAIQHTENGGFPYTEMIVHLPLGSIPKPKKVLIIGGGIGFTLFEVLRYSTVEKIDIVEIDDVVVDVSRKFFPYLAANFNDPRVTLVLGDGAAFVKAAQAGYYDAIIVDSSDPIGPAKDLFERPFFEAVAKALRPGGVVCTQAESIWLHMHIIKQIIANCRQVFKGSVNYAWTTVPTYPTGVIGYMLCSTEGPEVDFKNPVNPIDKDETHANSKLGPLKFYNTDIHKAAFILPSFARSMIES

SEQ ID NO: 16006 - protein, 633 aa, Saccharomyces cerevisiae
MLSKVLLNIAFKVLLTTAKRAVDPDDDDELLPSPDLPGSDDPIAGDPDVDLNPVTEEMFSSWALFIMLLLLISALWSSYYLTQKRIRAVHETVLSIFYGMVIGLIIRMSPGHYIQDTVTFNSSYFFNVLLPPIILNSGYELNQVNFFNNMLSILIFAIPGTFISAVVIGIILYIWTFLGLESIDISFADAMSVGATLSATDPVTILSIFNAYKVDPKLYTIIFGESLLNDAISIVMFETCQKFHGQPATFSSVFEGAGLFLMTFSVSLLIGVLIGILVALLLKHTHIRRYPQIESCLILLIAYESYFFSNGCHMSGIVSLLFCGITLKHYAYYNMSRRSQITIKYIFQLLARLSENFIFIYLGLELFTEVELVYKPLLIIVAAISICVARWCAVFPLSQFVNWIYRVKTIRSMSGITGENISVPDEIPYNYQMMTFWAGLRGAVGVALALGIQGEYKFTLLATVLVVVVLTVIIFGGTTAGMLEVLNIKTGCISEEDTSDDEFDIEAPRAINLLNGSSIQTDLGPYSDNNSPDISIDQFAVSSNKNLPNNISTTGGNTFGGLNETENTSPNPARSSMDKRNLRDKLGTIFNSDSQWFQNFDEQVLKPVFLDNVSPSLQDSATQSPADFSSQNH

SEQ ID NO: 16007 - protein, 1457 aa, Oryza sativa Japonica Group
MDPRRPPSRGGAAANGGGLSYSTLFNLEPLLNFKVPLPEDLDRYRRSSPNGSMSSQGQGSLSDQYNGINDASHGLHRKRKRNLDGASDDDEVDAYSNQITEEHYRTMLSEHVQKYRRSKFKEDVFSSDPPQVIVPQKHKNGSARVTKYRSDTRNVAMLGGVEATAEYNGTKSTNAYGGFNKVVASLDSSYLDMGDNVSYKIPEGYDKLALSLNLPVFSDIRVEETFLNGTLDLRTLAAMLSTDQKFETTNRGGLAEPQPQYESLQERVKVQKFSLQVTEDPFAIPEGAAGRIRRFIISESGSLHVHYVKVLEKGDTYEIIERSLPKKQIIRKDPSEIAREESEKTIKLWHAIAVKGIPRHHRNFMALLKKRQVDAKRFSENCQREVKFKVSRSLKLMRSAAIRTRRLARDMLIFWKRVDKEQYELRKREEKEAAEALKREEELREAKRQQQRLNFLLSQTELYSHFMQNKAGESAPSDEASVPEEDEEDPEEAELKREALRAAQHAVSQQKRMTNAFDSETGRLRQSSDSGIPTDDLASMEPNKIDLLHPSTMPEKSSVQTPELFKGALKEYQLKGLQWLVNCYEQGLNGILADEMGLGKTVQAMAFLAHLAEDKNIWGPFLVVAPASVVNNWAEEILVNEEKLLRRVKWQYMVLDEAQAIKSSSSQRWKTLLSFNCRNRLLLTGTPIQNNMAELWALLHFIMPTLFDSHEQFNEWFSKGIEGHAEHGGALNEHQLSRLHAILKPFMLRRVKIDVIAEMTKKKEEIVPCRLSSRQQVFYQAIKNKISLNELLDGSRGNLNDKKLLSLMNIVMQLRKVCNHPELFERNEGSSYFYFADIPNSLLSPAFGELQDVHYAGKRNPIMFEIPKLVYKGIVSNMEMPVRGCGFLYGSFNRMFNIFSPSYIHQSAFPEAISPNNTVLLSGAFGFTRLINLSPVEASFLATCSLFNRLAFSAVRWNKKYTDELVDVFLDSESTDLESTHNDLTTVRAVVRLLLSPTKAESSFLRTKIETGPSDSPYEALVLSHHERLVSNIRLLRSTYAFIPPARAPPINVWCADRNFAYKLTDEMHDPLAKKLVLGFARTSEFNGPREPTSPHSLIEELHTDLPFPEPMLQLPYRIFGSSPPMSNFDPAKMLTDSGKLQTLDILLRRLRAENHRVLLFAQMTKMLDILEDYMNFRKFKYFRLDGSSAISDRRDMVRDFQNRNDIFVFLLSTRAGGLGINLTAADTVIFYEIDWNPTQDQQAMDRTHRLGQTKEVTVYRLICKDTIEEKILQRAKQKNAVQELVMKGKHVQDDHLMRQEDVVSLLIDDTQISHKLKEISMQAKDRLKKRRTKGIKVDKEGDLMLEDLDDQTSGAAEHDNTSSKKKKSSQKKLPKLQDNGSVDKNAEAEGGEVEDEDSIAAPRPKRSKRLMKNLNEDKEPEQEPTTDGDNPAEAAENNISPDDNDTEEAKDRTPSA

SEQ ID NO: 16008 - protein, 403 aa, Clostridium acetobutylicum ATCC 824
MDNKKKKWIVITVAIVVVTNIASLFLGGRFLVFAGNSRVAVDKDTYDTVQKFSKLFSVRDQLYKYYDGKISDSVLLDGALKGMTSSLKDPYTVYMDKSETKSFNSEIQGQQYVGLGMEVQAKDNKVIVSTVFDNSPAEKAGMKSGDVIVKVNGTDAVSTDLEKTVSMIKGKEGTSVTLTLYRSTKGNFDITAKRQKVAIDTVSGEMLSNEIGYMQVSMFDENTGNNFNKKIDELKQQGMKGLILDLRSNPGGLLSACIQVTSNFVTKDKVIVSTIDKYNSKEEYKSKGGNYIGLPLVVLVDGNTASASEIFSGAIRDYKLGTLIGEKTFGKGVVQAPFDLNDGTQLKITISKYYTPNGENIHHKGIKPDIEVKYPDTLKDKPYDRNSDPQFQKALEQIKSKMK

SEQ ID NO: 16009 - protein, 341 aa, Datura inoxia
MEVISTQTNGSAIIMNYSHHNGNSDHRNGGATAHDHDNGRKLLGNSNSIKPGWFSEFSALWPGEAFSLKIENLLFQGKSDYQDVMLFESATYGKVLTLDGAIQHTENGGFPYTEMIVHLPLGSIPKPKKVLIIGGGIGFTLFEVLRYPTVEKIDIVEIDDVVVDVSRKFFPYLAANFNDPRVTLVLGDGAAFVKAAQAGYYDAIIVDSSDPIGPAKDLFERPFFEAVAKALRPGGVVCTQAESIWLHMHIIKQIIANCRQVFKGSVNYAWTTVPTYPTGVIGYMLCSTEGPEVDFKNPVNAIDKLDETHVNSKLGPLKFYNTDIHKSAFILPSFAKNLTES

SEQ ID NO: 16010 - protein, 192 aa, Neisseria gonorrhoeae
MSIKNAVKLIEKSKARFVDLRFTDTKGKQHHFTVPARIVLEDPEEWFENGPAFDGSSIGGWKGIEASDMQLRPDASTAFVDPFYDDVTVVITCDVIDPADGQGYDRDPRSIARRAEAYLKSSGIGDTAYFGPEPEFFVFDGVEFETDMHKTRYEITSESGAWASGLHMDGQNTGHRPAVKGGYAPVAPIDCG

SEQ ID NO: 16011 - protein, 411 aa, Arabidopsis thaliana
MTSIIGAALPYKSPEKAIASSSYSAENDSSPVDAVIFAGTSLVLGTACRYLFNGTRVPYTVVLLVIGIFLGSLEYGTKHNLGKLGHGIRIWNGINPDLLLAVFLPVLLFESSFSMDVHQIKRCMGQMVLLAGPGVLISTFCLGALIKLTFPYNWDWKTSLLLGGLLGATDPVAVVALLKELGASKKMTTLIDGESLMNDGVSVVVFQLFFKMVMGHNSDWGSIIKFLVQNSFGAVGIGLAFGIASVFWLKFIFNDTVAQITVTLSASYFAYYTAQEWAGVSGILTVMILGMFFAAFARTAFKGDSHQSLHHFWEMAAYIANTLVFMLSGVIIAESVLSGQTISYKGNSWSFLFLLYLYVQLSRCVVVGVLYPLLCRSGYGLDWKESIILTWSGLRGAVSLSLALSVKLSVI

SEQ ID NO: 16012 - protein, 177 aa, Glycine max
  misc_feature (26)..(26): Xaa can be any naturally occurring amino acid
  misc_feature (60)..(60): Xaa can be any naturally occurring amino acid
  misc_feature (62)..(62): Xaa can be any naturally occurring amino acid
  misc_feature (106)..(106): Xaa can be any naturally occurring amino acid
  misc_feature (118)..(118): Xaa can be any naturally occurring amino acid
MEAETAAKRARRRGRCGGGWSREQGXISRVIPGWVSEISPMWPGEAHSLKVKKVLFQASXTXQDVLVFQSLTYGKVLVLDGGIQVTERDECPYQEMITPPPLCSIXKDPRKALVIGGXENGAFCGKVPRHSSVGANPPLGKRTRWGAMGPKNFFPHLPLGFKDPPGAPEHGERGPPS

SEQ ID NO: 16013 - protein, 454 aa, Sinorhizobium meliloti 1021
MSYSFEELKEDVAAGRIDTVLACQVDMQGRLMGKRFHAEYFVESAWKETHSCNYLLATDMEMETVPGYKATSWEKGYGDYTMKPDLSTLRRIPWLEGTALVLCDMLDHDTHAEVPHSPRAILKKQVARLEAMGFKAYMASELEFFLFDQSYDDARLSGYRDLQLASGYNEDYHIFQTTKEEDVMRAIRNGLQGAGIPVENSKGEASAGQEEINVRYADALTMADRHAIIKNGCKEIAWQRGKAITFLAKWNYSAAGSSSHIHQSLWSKDGETPLFFDKNGQYGMSELMRHYVAGQLAHASEVTYFLAPYINSYKRFMAGTFAPTKAIWSKDNRTAGYRLCGEGSKAIRIECRVGGSDLNPYLAFAALIAAGIAGIENKMELEAPFVGDAYQGKEVREIPHTLREAGEALSGSKMLRAAFGEEVVDHYVHAAEWEQQEYDRRVTDWEVARGFERA

SEQ ID NO: 16014 - protein, 675 aa, Coccidioides immitis RS
MSRQSRRDVASSPFAWTTIFYLLFVFIAPLALLGTAHAAEEQAPLQENYGTVIGIDLGTTYSCVGVMQNGKVEILVNDQGNRITPSYVAFTDEERLVGDAAKNQYASNPKRTIFDIKRLIGRKFEDKDAQNDIKHFPFKVVNKDGKPQVRVDVNGKPKNFTPEEVSAMVLGKMKEIAEGYLGKPVTNAVVTVPAYFNDNQRQATKDAGTIAGLNVLRVVNEPTAAAIAYGLDKTGDERQIIVYDLGGGTFDVSVLSIDNGAFEVLATAGDTHLGGEDFDQRVITYLAKQYNKKNNVDITKDLKSMGKLKREVEKAKRALSSQMSTRIEIEAFHEGNDFSETLTRAKFEELNMDLFKKTLRTVEQVLKDAKVKKSEIHDIVLVGGSTRIPKVQQLLEEFFGGKKASKGINPDEAVAFGAAVQGGVLSGDEGAKEVVLMDVNPLTLGIETTGGVMTKLIPRNTVIPTRKSQIFSTAADNQPVVLIQVYEGERSMTKDNNLLGKFELTGIPPAPRGVPQIEVSFELDANGILKVTAGDKGTGKAESITITNDKGRLSQEEIDRMVEEAAKFADEDKAMKAKIEARNSLENYAFSLKNQVNDKEGLGGKIEDDDKETILEAVKEATDWLEEHAATATTEDFEEQKEKLSNVAYPITSKLYGAGEAPSGEEDEPSGHDEL

SEQ ID NO: 16015 - protein, 388 aa, Aspergillus niger
MGKKAIQFGGGNIGRGFVAEFLHKAGYEVVFVDVMDKMVEALQQNKSYKVTEVSEEGEHTTTITNYRAINSKTHESDVIQEIATADVVTCAVGPHILKFIAPVIAKGIDARTESKPVAVIACENAIGATDTLHGFIKQHTSQDRVESLYDRAQFANSAIDRIVPQQAPNSGLDVRIEKFYEWAVEKTPFGSVGHPDIPAIHWVDNLEPYIERKLFTVNTSHATTAYFGHFRGKKMIADALEDEEIRGLVHKVLEETASLIVAKHDISEEEQKEYVKKIVSRISNPYLEDKVERVGRAPLRKLSRKERFIGPASQLAERGMKYDSLMDAVEMALRFQNVPGDDESAELANILNEQRAEDATIHLTGLDEEHPLYPAVLERVRKVQQGTK

SEQ ID NO: 16016 - protein, 743 aa, Streptococcus suis 89/1591
MLQKLSPNSPILQATFGIERESLRINSNHRVAQTPHPHKLGSRSFHPYIQTDYSEPQLELITPIAQSTKEARRLLGAITDVAARSMDKQEYLWPLSMPPVISEEEIQIAQLDSDYEYQYRVGLGERYGKLVQSMSGIHYNFELGKDLTQQLFELSEETDFIAFKNTLYLKLAQNFLNYRWLLTYLYGASSLAEKGFLTTEVGCVRSIRNSKYGYVNSDNVHISFSSLQQYVADIEQAVQSGQLSAEKEFYSSVRLRGAKTSRDYLSKGISYLEFRSFDLNPYDPLAISQETLDTVHLFILSLLWLDQLTDVDNTLAKADKLNNLIALSHPHTPLPNDADATPILTAMKAIVLHFGLDDYYGQLIAHAEAALQDPRLTLSGKIAEQVEDGSLEKFGQQQGQVFHDYAWTAPYALKGYENMELSTQMILFDAIQLGLNVEILDEEDQFLKLWHGDHVEYIKNGNMTSKDNYVIPLAMANKVVTKKILDQAGFPVPAGAEFANKTDALRYYGQVTSSAIVVKPKSTNFGLGISIFQEPASLADYEKALDIAFSEDSHVLVEEFVAGTEYRFFILDGKCEAVLLRVAANVVGDGSSTIRELVEQKNQDPLRGRDHRSPLEIINLGDIELLMLEQQGYTPDTVLPEGVQAFLRGNSNISTGGDSIDMTDQMDESYKQLAAAMATAMGAWACGVDLIIPDRTKPASKEDPNCTCIELNFNPAMYLHTYTYAGPGQSITPKILKKLFPEL

SEQ ID NO: 16017 - protein, 639 aa, Shewanella sp. MR-7
MGKIIGIDLGTTNSCVAVLDGGKARVLENAEGDRTTPSIIAYTDDETIVGQPAKRQAVTNPNNTFFAIKRLIGRRFKDDEVQRDVNIMPFKIIQADNGDAWVESRGNKMAPPQVSAEILKKMKKTAEDFLGEEVTEAVITVPAYFNDSQRQATKDAGRIAGLEVKRIINEPTAAALAYGIDKKQGDNIVAVYDLGGGTFDISIIEIDSNDGDQTFEVLATNGDTHLGGEDFDNRLINYLADEFKKEQGLDLRKDPLAMQRLKEAAEKAKIELSSTNQTEVNLPYITADATGPKHLVVKITRAKLESLVEDLIIRTLEPLKVALADADLSVSDINEVILVGGQTRMPKVQEAVSNFFGKEPRKDVNPDEAVAVGAAIQAGVLSGDVKDVLLLDVTPLSLGIETMGSVMTKLIEKNTTIPTKAQQVFSTADDNQSAVTIHVLQGERKQASANKSLGQFNLDGIEPAPRGMPQIEVMFDIDADGILHVSATDKKTGKKQNITIKASSGLSEEEVAQMVRDAEAHAEEDKKFEELVQSRNQADGLVHATKKQVEEAGDALPADDKAKIEAAMSAVEVATKGNDKEAIEKATQELIEASAKLMEIAQAKAQTQGGAQEGAAKQSNATADDVVDAEFEEVKDDKK

SEQ ID NO: 16018 - protein, 649 aa, Blastocladiella emersonii
MTTKLDSPAVGIDLGTTYSCVGVWQNDRVEIIANDQGNRTTPSYVGFTDSERLIGDAAKNQVAMNPHNTVFDAKRLIGRRFDDDVVQADMKHWSFTVVNKNSKPLFQVEFKGETKTFTPEEFSSMILTKMKETAEAYLGTKVNHAVVTVPAYFNDSQRQATKDAGAIAGLNVLRIINEPTAAAIAYGLDKKAEAGEKNVLIFDLGGGTFDVSLLTIEDGIFEVKATAGDTHLGAEDFDNRLVNHFVQEFKRKHKKDLSGKARPRRLRTACERAKRTLSSSAQTSIEIDSLFEGIDFYTSITRARFEELCADLFRSTLDPVEKVLRDAKMAKNEVHEIVLVGGSTRIPRIQKLVSDFFNGKEPNKSINPDEAVAYGAAVQAAILAGDQSEKVQDLLLLDVAPLSLGIETAGGVMTPLIKRNTTIPAKKSETFSTYADNQPGVLIQVYEGERARTKDNNLLGKFELTGIPPAPPRVPQIEVSFDVGADGILNVSAVDKSTNRSNKITITNDKGRLSKEEIERMVAEAEKYKKEDEEAASRIQAKNGLESYAYNLRNTLNDDKVAGKMDAADKETLNKAIDETISWLDGNQEGAKDEYEHKQKELEGVANPIMTKLYSAAGGAPGGMPGGFDPSGAPPPAADTTGPTIEEVD

SEQ ID NO: 16019 - protein, 3529 aa, Arabidopsis thaliana; identical to SEQ ID NO: 13421

SEQ ID NO: 16020 - protein, 221 aa, Glycine max
MACSVHLLLLLLTSLLALFFNPTCVYGNDELRALLDLKSSLDPEGHFLSSWTMGGNPCDGSFEGVACNEKGQVANVSLQGKGLSGKLSPAIAGLKHLTGLYLHYNSLYGEIPREVANLTELSDLYLNVNHLSGEIPPEIGKMENLQVLQLCYNQLTGSIPTQLGDLKKLSVLALQSNLLGGAIPASLGDLGMLMRLDLSSNNLFGSIPIKLADLPSLQVLD

SEQ ID NO: 16021 - protein, 349 aa, Canella winterana; identical to SEQ ID NO: 9075

SEQ ID NO: 16022 - protein, 159 aa, Prochlorococcus marinus str. MIT 9515
MVIDVQNTPVLSADGKSKKLGEFSKDVILIVNVASYCGNTAQYEDLQKLHKIYSKKGLRILAFPCNDFGNQEPDSLSKIQNFCTTEYGVEFEIMEKVHAKGNTTEPYTTLNKVEPKGDVEWNFEKFLIGRDSNVIARFKPSVKPFDDNLIAAIEVALDS

SEQ ID NO: 16023 - protein, 393 aa, Canella winterana; identical to SEQ ID NO: 9076

SEQ ID NO: 16024 - protein, 345 aa, Zea mays
AWSRPRYEVILKDKAVLSKIKNSARGVDEAHRLKNCEASLYTTLLEFSTKNKLLITGTPLQNSVEELWALLHFLDPVKFNSKDSFVERYKNLSSFNETELANLHKELRPHILRRVIKDVEKSLPPKIERILRVEMSPLQKQYYKWILERNFQNLNKGVRGNQVSLLNIVVELKKCCNHPFLFESADHGYGGDSIGDRNKVERIVMSSGKLVLLDKLLVRLRETNHRVLIFSQMVKMLDILAEYLSLRGFQFQRLDGSTRADLRHQAMEHFNAPGSDDFCFLLSTRAGGLGINLATADTVIIFDSDWNPQNDLQAMSRAHRIGQQETVNIYRFVTCKSVEEDIWNA

SEQ ID NO: 16025 - protein, 239 aa, Oryza sativa Indica Group
MESRKPPPSALVDNHVVPGDVVLDLTEMTNQTIKLGAGLRQDCDTIQTTSAGRLRLSKPNKYWVESSQKRYIPSVEDTVLGVVVDTKPDNFLVDIKGPNLAFLPVLAFEGGTRRNIPKFEIGTLIYARVVKANSIMNPELSCMDATGKAAEFGQLKDGYMFDTSTGLSRMLLSSPTCPVLEALGKKLSFEIAVGLNGRVWVNAPSPSNVIVVSNAIIKSESLSGIGQRSMVESLLERLS

SEQ ID NO: 16026 - protein, 391 aa, Chloranthus spicatus; identical to SEQ ID NO: 9079

SEQ ID NO: 16027 - protein, 397 aa, Chloranthus spicatus; identical to SEQ ID NO: 9080

SEQ ID NO: 16028 - protein, 414 aa, Degeneria vitiensis; identical to SEQ ID NO: 9082

SEQ ID NO: 16029 - protein, 135 aa, Arabidopsis thaliana
  misc_feature (105)..(105): Xaa can be any naturally occurring amino acid
  misc_feature (131)..(131): Xaa can be any naturally occurring amino acid
MASSMLSSAAVVTSPAQATMVAPFTGLKSSASFPVTRKANNDITSITSNGGRVSCMKVWPPIGKKKFETLSYLPDLTDVELAKEVDYLLRNKWIPCVEFELEHGXFVYREHGKHFPGTTDGRYWSMWELPXFGCT

SEQ ID NO: 16030 - protein, 393 aa, Degeneria vitiensis; identical to SEQ ID NO: 9083

SEQ ID NO: 16031 - protein, 388 aa, Drimys winteri; identical to SEQ ID NO: 9086

SEQ ID NO: 16032 - protein, 394 aa, Drimys winteri; identical to SEQ ID NO: 9088

SEQ ID NO: 16033 - protein, 392 aa, Eupomatia laurina; identical to SEQ ID NO: 9090

SEQ ID NO: 16034 - protein, 393 aa, Eupomatia laurina; identical to SEQ ID NO: 9093

SEQ ID NO: 16035 - protein, 154 aa, Vitis vinifera
MEMLAGEDDRSSGFHHLHLSCSLRDVHYSCGSCGYQLNLNSCNRTSVLGSKYEKSIKKGIISFFSIDETRFTQTNELRCLPYFNSRCSWGLFRRRSKLLCKKCGNHIGNAYKTNNRSGKLDSSAWDGISDSSRIYDIKICALQPSSSLESDAFV

SEQ ID NO: 16036 - protein, 227 aa, Plantago major
QSAEVDEFIYHECLIHPPLLSHPNPKSVFIMGGGEGSAAREALRHKSIEKVVMCDIDQEVVDFCRKHLVANHEAFRNGKLDLVINDAKAELENRQEKFDIIVGDLADPVEGGPCYQLYTKTFYETILKPKLNENGIFVTQAGPAGVFTHKEVFSSIYNTIKQVFKYVRAYTAHVPSFADTWGWVIASDQPLSIEAGNMDKKIAERIDGELMYLNGASFVASTILNKT

SEQ ID NO: 16037 - protein, 160 aa, Klebsiella pneumoniae subsp. pneumoniae MGH 78578
MTPFYQLTATRLRGQPLSMADYAGKVVLVVNTASHCGFTPQYAGLEALYKKYAAQGLVVLGFPCNQFGKQEPGGADEIEQTCHVNYGVSFPMFEKVDVNGPAAHPLFRYLKQALPGVLGGRIKWNFTKFLIGRDGTPLTRFAPFTTPEKMEASIVAALTR

SEQ ID NO: 16038 - protein, 469 aa, Photobacterium profundum SS9
MSVENVLALIQENEVKFIDLRFTDTKGKEQHITIPSHQIDSDFFEDGKMFDGSSVAGWKGINESDMVMMPDASSAVLDPFTEDSTLNIRCDILEPATMQGYDRDPRSIAKRAEEFMRSTGLADTVLVGPEPEFFLFDDVKFNTDMSGSFFKIDDIEAAWNSGSDFEGGNKGHRPGVKGGYFPVAPVDSSQDIRSAMCLIMEEMGLVVEAHHHEVATAGQNEIATRFNTLTTKADEIQIYKYVVHNVAHAFGKTATFMPKPLVGDNGSGMHVHMSLNKDGQNLFAGDKYGGLSEMAIYYIGGIIKHARAINAFANPATNSYKRLIPGYEAPVMLAYSARNRSASIRIPVVPSPKARRIEVRFGDPAANPYLAFAAMLMAGLDGIQNKIHPGEAMDKDLYDLPAEEAAEIPQVAESLEIALKNLDEDREFLTAGGVFSDDFIDSYIKLKSEDVEKVNMTTHPLEFELYYSV

SEQ ID NO: 16039 - protein, 198 aa, Plantago major
MGDISISNGSGHGVQRKSCWYEEEIEENLRWCFALKSILHTGASQYQDIQLLDTKPFGKALVIDGKLQSAEIDEFIYHESLVHPPLLNHPNPKTIFIMGGGEGSTAREILRHRDVQKVIMCDIDEEVVDFCKSHLLVNKEAFYDPRMELVINDARAELERREELYDVIIGDLADPLEGGPCYQLYTKSFYEFIVKPKL

SEQ ID NO: 16040 - protein, 215 aa, Plantago major
KRVLVVGGGDGGVLREICRHSSVELIDICEIDEMVIDVSKKFFPELAIGYEDPRVHLHVGDAIDYLKRAPQGKYDAVIVDSSDPVGPAQELVEKPFFETIARALRPGGVLCNMAESMWLHTHLIQDMMSACQDIFKGSVRYAWANVPTYPSGVIGFLLCSTEGPAVDFLHPVNPIEKLEDALKYRRELMYYNSEMHEAAFALPSFVKREVEALRD

SEQ ID NO: 16041 - protein, 661 aa, Saccharomyces cerevisiae YJM789
MSRKSIVQIRRSEVKRKRSSTASSTSEGETLHKNTHTSSKRQRTLTEFNIPTSSNLPVRSSSYSFSRFSCSTSNKNTEPVIINDDDHNSICLEDTAKVEITIDTDEEELVSLHDNEVSAIENRTEDRIITELEEQVNVKVSTEVIQCPICLENLSHLELYERETHCDTCIGSDPSNMGTPKKNIRSFISNPSSPAKTKRDIATSKKPTRVKLVLPSFKIIKFNNGHEIVVDGFNYKASETISQYFLSHFHSDHYIGLKKSWNNPDENPIKKTLYCSKITAILVNLKFKIPMDEIQILPMNKRFWITDTISVVTLDANHCPGAIIMLFQEFLANSYDKPIRQILHTGDFRSNAKMIETIQKWLAETANETIDQVYLDTTYMTMGYNFPSQHSVCETVADFTLRLIKHGKNKTFGDSQRNLFHFQRKKTLTTHRYRVLFLVGTYTIGKEKLAIKICEFLKTKLFVMPNSVKFSMMLTVLQNNENQNDMWDESLLTSNLHESSVHLVPIRVLKSQETIEAYLKSLKELETDYVKDIEDVVGFIPTGWSHNFGLKYQKKNDDDENEMSGNTEYCLELMKNDRDNDDENGFEISSILRQYKKYNKFQVFNVPYSEHSSFNDLVKFGCKLKCSEVIPTVNLNNLWKVRYMTNWFQCWENVRKTRAAK

SEQ ID NO: 16042 - protein, 542 aa, Capsicum annuum
MPMENETRDLIFRSKLPDIYIPKHLPLHSYCFENISEFNSRPCLIDGANDQIYSYAEVELTSRKVAVGLNKLGVQQKDTIMILLPNSPEFVFAFMGASYLGAISTMANPLFTPAEVLKQAKASSAKIIITLACYIGKVKDYATENDVKLICIDSAPEGCIHFSELTQSDEHEIPDVKIQPDDVVALPYSSGTTGLPKGVMLTHKGLVTSVAQQVDGENANLYMHSEDVLMCCLPLFHIYSLNSVLLCGLRIGAAILIMQKFDIVHFLELIQKYKVTIGPFVPPIVLAIAKSPLVDHYDLSSVRTVMSGAAPLGKELEDTVRTKFPNAKLGQGYGMTEAGPVLAMCLAFAKEPFEIKSGACGTVVRNAEMKIVDPDTGCSLPRNQPGEICIRGDQIMKGYLNDLESTTRTIDKEGWLHTGDMGFIDNDDELFIVDRLKELIKYKGFQVAPAELEALLLNHPNISDAAVVPMKDEQAGEVPVAFVVRSNGSTITEDEVKDFVSKQVVFYKRIKRVFFVETVPKSPSGKILRKDLRARLAAGVTN

SEQ ID NO: 16043 - protein, 1002 aa, Myxococcus xanthus DK 1622
MRAHGRCAMHSRGVGKQRPMSATAQLLETVRKEAKPGIWSNGVNLARSGAVVLQSQKGGELELRVRAKGRPVALTVVLYPNDDAWECDCPSQVDPCEHVVAAAISIQQAEKQDTPMETAATRWARVVYHFTRVDGGLELRRSIVQVDGAETPLEGSLTSLMARPAEAAKLQVENADLLADRILEQRRTRGTLAPETLEAVLKVLESARNVLLDGRPVAVSDEQVLPRAVVEDRSGQIVVTVSKDPRVQEVVSPGVALASDTLVRLGETTMSGPWLQNLPIVRTYSADHLGDLTSKIMPELGRRLPVEVRSKRLPRLDRELKPRILLELNQLDAGLSVLPTLVYGAPPVVRIDNGRMVYLRGAVPLRDEAAEQRLIHQLRDELNLVPGRRLTVQGSEMVRWADKLRRWRGDLAGDAAGLVSPDVKLRPSLHLESSVTGQGVPDVRFQLSFQVEGAKGEVKAVDAAAVIRAWTEGLGLVPLDGGGWAPLPRAWLDKHGQRVADLLNARQEDGKVSNHALPELTALCETLEQPPPPGLDRLAPLVSGFEKLPPPELPAELNATLRQYQLQGVSWLGFLRGAGLGGILADDMGLGKTLQTICALGPGSLVVCPTSVLPNWAAELKRFRPSLKVCVYHGPGRALEPSADVTLTTYAIMRLDAAVLGAKTWDSLVLDEAQAIKNPDSQVARAAFGLKANFRLALSGTPLENRLEELWSLMHFTNPGLLGGRKHFEDKISRPISEGRQDAAEGLRRRIRPFVLRRLKRDVAPELPPRIESVMHVQMDERERSVYDAVMAATRKEVVALLNEGGSVLKALEALLRLRQAACHPALVPGQRANTSSKVETLVDALETAVSEGHKALVFSQWTSLLDLIEPRLKAAGIGFGRLDGTTANRGEVTERFQSQEGEPVLLMSLKAGGTGLNLTAADHVFLVDPWWNPAAEAQAADRAHRIGQERTVMVYRLVSQGTVEERILGLQEKKRAIFEAALSEAAAATAITREDLLELFS

SEQ ID NO: 16044 - protein, 445 aa, Oceanobacillus iheyensis HTE831
MGKSFTKDEVIKQIKEENVKFIRLQFTDMLGTIKNVEIPYSQLDKALDNKMTFDGSSIEGFVRIEESDMLLYPDLDTFVVFPWTSEKGKVARFICDIYNPDGTPFEGCPRYNLKRNLKKMEELGFDAFNIGTEPEFFLFKLDEKGEPTLELNDHGGYFDLAPTDLGENCRRDIVLELEEMGFEIEASHHEVAPGQHEIDFKYSDAVKHADDIQTFKLVVKTIARKHNLHATFMPKPLFGVNGSGMHVNMSLFNGKENAFYDTSGELELSNTAYQFIAGIIKHATNFTAVTNPTVNSYKRLVPGYEAPCYVAWSGSNRSPLIRIPSSRGLSTRIEVRSVDPAANPYMALSVLLASGLDGIEQGLEAPESVDRNIYVMDKAEREANGVQDLPATLKDAMENLKKDKILVDSLGEHLFEHFIEAKEIEWDMFRTTVHPWEREQYLSNY

SEQ ID NO: 16045 - protein, 526 aa, Burkholderia xenovorans LB400
MRKNLKNIGLIAAGLATGVFATLQLSASAQQPASAASSAVAPLPLDQLRLFAEVFGQIKHEYVEPVDDKKLLTAAIKGMVSSLDPHSSYLDKTDYEELQEQTKGRFAGLGIEISSEDGLIKVISPIEDTPAFRAGIRPGDLITRINDKPVRGMTLDQAVKQMRGDPGTKVTLTIFRKTDDRTFPLTVTRAIIKVQSVKMKILAPGYAYVRITSFQERTTPDLAAKLQDIARQQPNLKGLVLDLRNNGGGLLQSAVGVAGAFLPPNSVVVSTNGQIPDSKQVYRDTYDNYRLQSFDSDPLKDEAPIFKTVPMIVLTNAYSASASEIVAGALQDQHRALIVGKTTFGKGSVQTVRPMTADTALRLTTAYYYTPSGRSIQNKGIRPDIAVDQYAEGDPDDALVTREVDYSNHLANTQDPNEKKEAEQREQERMDQLRQLEEQNDKKTPEQRQKDRERKPVEFGSADDFMLQQALNKLEGKPVQESKSLTERRLAQNKPPASASAPVAVKPTQPVPGASAPASAPATPSN

SEQ ID NO: 16046 - protein, 146 aa, Lotus japonicus
MGFTAQQDALVGSSYEAFKQNLPSNSVLFYTLILEKAPAAKDMFSFLKASGPTHSPQLQAHAEKVFGLTRDAAAQLLAKGEVTLADAGLGAVHVQKAVADPHFAVVKEALLKTVQAAVGDKWSEDLSTAWGVAYDGLAAAIKKAMS

SEQ ID NO: 16047 - protein, 663 aa, Debaryomyces hansenii
MIDTKPILSQGYGYGYALGLGTAFALIMMALSKMMAKFMNEKQNSERFSTASRSVGSGLIASSTVSAWTWPATLLTSGAWAYTYGLAGPFMYGIGGTIQIILFVFLAIEIKRNSPGCHTVAQLIYVRFGKAGHICYLCYCIATNVLVSSLLLLGGSQGFALTTGMHVTAASFLLPTGVCIYTFFGGLKATFISDWIHTVIIYIIICISCFTIYTTSTHIGSPGKMWDLLQEVEKVFPSASEGNFLSFKSRDMILTSWSVMLGGLSSVFGDPGYSQRAIASDPKGLFSGYVMGGVCWFVVPWALGTSAGLASRALLTNAISVTYPRELTSLEINGGMPVIYGLKAIFGSKGAAAGLLMLFMSVTSATSAELIAFSSITTYDVFQTYIKPKAGGKLLVKFAHCSVIFFSLLMAVLSIVFNYIGVTSGWLLGFIGIILSPEVAALVMAIYWKKMSRQSLLFGAPFGTLTGISCWLGSSYHFGGKVINKNTLMAPEATFIGNATAIGSTILYIVIITLIKPENFDFEIFLRSFKAGDDASASDRKAMEISVQDKKLLRKQSILVILLNLLVIGGAYIITPLSLYATGFTFTKKYFTQWVIIMMIWLVFASGYILAFPLWQGRFALLKIVKSLFKKNHESSEEGISIEGLVTYTKDEEYVIVKEVPIH

SEQ ID NO: 16048 - protein, 716 aa, Glycine max
  misc_feature (27)..(27): Xaa can be any naturally occurring amino acid
  misc_feature (514)..(514): Xaa can be any naturally occurring amino acid
  misc_feature (526)..(526): Xaa can be any naturally occurring amino acid
  misc_feature (554)..(554): Xaa can be any naturally occurring amino acid
  misc_feature (563)..(563): Xaa can be any naturally occurring amino acid
FIFQWLQQAERRIPPFRRRKSTPHEQXLSHHSSNNNNNIDSMSKAIAQYTEDARLHAVFEQSGESGRSFNYSESIRIASESVPEQQITAYLVKIQRGGFIQPFGSMIAVDEPSFRILGYSDNARDMLGITPQSVPSLDDKNDAAFALGTDVRALFTHSSALLLEKAFSAREISLMNPIWIHSRTSGKPFYGILHRIDVGIVIDLEPARTEDPALSIAGAVQSQKLAVRAISQLQSLPGGDVKLLCDTVVESVRELTGYDRVMVYKFHEDEHGEVVSESKRPDLEPYIGLHYPATDIPQASRFLFKQNRVRMIVDCHASAVRVVQDEALVQPLCLVGSTLRAPHGCHAQYMANMGSIASLVMAVIINGNDEEGVGGRSSMRLWGLVVCHHTSARCIPFPLRYACEFLMQAFGLQLNMELQLAAQSLEKRVLRTQTLLCDMLLRDSPTGIVTQSPSIMDLVKCDGAALYFQGNYYPLGVTPTEAQIRDIIEWLLAFHGDSTGLSTDSLGDAGYPGXLPRLGMQFVGWXVAYITEKDFLFWFRSHTAKEIKWGGAKXILRTRMMGXRMHPRSSFKAFLEVVKSRSLPWENAEMDAIHSLQLILRDSFKDAEHRNSKAVVDPHVSEQELQGVDELSSVAREMVRLIETATAPIFAVDVDGHVNGWNAKVSELTGLPVEEAMGKSLVHDLVFKESEETMNKLLSRALKGILSNTLAFWSIH

SEQ ID NO: 16049 - protein, 187 aa, Ostreococcus tauri
MRSLAPGRALTHQRARVHTRARRMDAVVRAFFGGGAPKNTKSAHGFTVKTIDGESVELSKYAGKVCLVVNELVQLDKKYDDLEVLAFPSNEFGGQEPGSAAQIKEFAKKYGATFPMFEKTMVNGPSANPLWKHLKETAPESGLMALAGSEIKWNFAKFLLDKDGKTVGRYAPTSSPLSIESDILKYL

SEQ ID NO: 16050 - protein, 538 aa, Zea mays
MGYQVVAAQLKLASSADHASVVIITLFVALLCACIVLGHLLEENRWLNESITALIIGLGTGVVILLISRGKNSRLLVFSEDLFFIYLLPPIIFNAGFQVKKKQFFRNFMTITLFGAVGTMISFFTISLGAIATFSRMSIGTLDVGDFLAIGAIFSATDSVCTLQVLHQDETPFLYSLVFGEGVVNDATSVVLFNAVQKIQFTHINAWTALQLIGNFLYLFSTSTLLGIGTGLITAFVLKKLYFGRHSTTRELAIMILMAYLSYMLAELFSLSGLLTVFFCGVLMSHVTWHNVTESSRTTSRHVFATLSFISETFIFLYVGMDALDFEKWKTSSLSFGGTLGVSGVLMGLVMLGRAAFVFPLSFLSNLAKKHQSEKISFRMQVVIWWAGLMRGAVSMALALNKFTRSGHTQLHGNAIMITSTITVVLFSTMVFGMITKPLIRLLLPASGHPRELSEPSSPKSFHSPLLTSQQGSDLESTTNIVRPSSLRGLLTKPTHTVHYYWRKFDDALMRPVFGGRGFVPFVPGSPTERNPPDLSKA

SEQ ID NO: 16051 - protein, 396 aa, Hedycarya angustifolia; identical to SEQ ID NO: 9117

SEQ ID NO: 16052 - protein, 145 aa, Oryza sativa Japonica Group
MAANGSNVVSRGAVRFTEEQEALVLKSWAIMKNDSAHIGHRFFLKIFEVAPSARQLFSFLRNSDVPLEKNPKLKIHAMAVFVMTCEAAAQLRKTGRVTVAKFALLETIKEAVPASMWSPAMKGAWGEAYDHLVAAIKQGMKPAAA

SEQ ID NO: 16053 - protein, 398 aa, Hernandia lychnifera; identical to SEQ ID NO: 9118

SEQ ID NO: 16054 - protein, 345 aa, Hernandia lychnifera; identical to SEQ ID NO: 9120

SEQ ID NO: 16055 - protein, 392 aa, Houttuynia cordata; identical to SEQ ID NO: 9121
  misc_feature (248)..(248): Xaa can be any naturally occurring amino acid

SEQ ID NO: 16056 - protein, 414 aa, Idiospermum australiense; identical to SEQ ID NO: 9122

SEQ ID NO: 16057 - protein, 434 aa, Shewanella oneidensis MR-1
MTSYQILCILSALALVTSVASSRLHKLQETVAITALALGTSLLLLLGGKALGGNVYGYFVAGLEKLDFQALLLNGMLGFLLFAGALQIRLKILRHQKWEILILAFVGTLLSTFIVGGLLYYLAPMFGLPLALSHCLLFGALISPTDPIAVLAILKKMGAPEDIAIQVEGESLFNDGIGLVIFVAISHLAFSTEPLTFTQISLLFVQEALGGVLYGAVLGLLLHHFFRYCEEETQLMLVTLLIPTAGYVMAAELGVSGPLAMVSAGIIIGNYSVPKFFARQERVKLYTFWSLIESFFNALLFLLLGLLLLLVTFKAPLWWFMLLAIPLVLTARAVSVFLPYMGFRLVKSYNPYAESILIWGGLRGGLALAMAMSLPKGIIIDSQPGVELHELVLVMTYAVVVFSILIQGSSMTGLIRRSNAVVTRPDSHTTQESR

SEQ ID NO: 16058 - protein, 395 aa, Idiospermum australiense; identical to SEQ ID NO: 9124

SEQ ID NO: 16059 - protein, 687 aa, Oryza sativa
MARPRRASTATTMQLGLLLAALLLFTSSLAGSVAAAAPPPPAGAKGGGAKSGGGGGTVIGIDLGTTYSCVGVYRNDRVEIIANDQGNRITPSWVAFTDGGERLIGEAAKNQAAANPERTIYDAKRLIGRQFSDAEVQRDMKLLPFAVVDRNGKPHVRVEVKDGDVRVFSPEEVSAMVLTRMKETAEAYLGEKVTRAVVTVPAYFNDAQRQATKDAGVIAGLTVDRIINEPTAAAIAYGIDKKGAEKNVLVFDLGGGTFDVSILAIDNGVFEVLATNGDTHLGGEDFDQRLMDHFVKVIRRKHGRDIAGDARALGKLRRECERAKRALSNQHQVRVEIESLFDGVDFSEPLSRARFEELNGDLFKKTMVPVRKAMADAGLGKGDIDEIVLVGGSTRIPKVQRLLKDYFGGKEPNRGVNPDEAVAYGAAVQASIISGHVDENTESMILLDVAPLTLGLETAGGVMTKLIPRNTVVPTKKTQVFTTYKDRQTTVTIQVFEGERSMTRDNRLLGKFDLTGIAPAPRGAPQIAVTFEVDANGILSVLAADKATGRSEKITISGDDRKISQEEIDRMEREAEEFADEDRRHREQVDARNSLEAYVYNVKSTLGGKMADAMEGEEKEKVEEAVREAHEWLDGNPDAGKEEYEEKLRELEDVCNPVMSAVYQRSGGGGGAPEDGNVDDEDDHDEL

SEQ ID NO: 16060 - protein, 167 aa, Oryza sativa Japonica Group; identical to SEQ ID NO: 15136

SEQ ID NO: 16061 - protein, 390 aa, Lactoris fernandeziana; identical to SEQ ID NO: 9125

SEQ ID NO: 16062 - protein, 341 aa, Lactoris fernandeziana; identical to SEQ ID NO: 9127

SEQ ID NO: 16063 - protein, 393 aa, Lemna gibba; identical to SEQ ID NO: 9128

SEQ ID NO: 16064 - protein, 214 aa, Helianthus annuus; identical to SEQ ID NO: 776

SEQ ID NO: 16065 - protein, 705 aa, Pseudomonas fluorescens Pf-5
MRYQLPPRRISMKHLFPSTALALFIGFGLLPMSTNTFAANSWDQLQPDRDEVIASLNVVELLKRHHYSKPPLDDARSVIIYDSYLKLLDPSRSYFMASDIAEFDKWKTQFDDFLKSGDLNAGFTIYKRYLDRVKARLDFALAELNKGVDKIDFNTKETLLIDRKDAPWLKTTAELDDLWRKRVKDEVLRMKIAGKEPKQIQETLTKRYKNQLARLDQTRAEDIFQAYINTFAMSYDPHTNYLSPDNAENFDINMSLSLEGIGAVLQSDNDQVKVVRLVPAGPADKTKQVAPADKIIGVAQGDKEMVDVVGWRLDEVVKLIRGPKGTLVRLEVIPASNAPNDQTSKIVPITREAVKLEDQAVKKSILNLKQDGKDYKLGVIEIPAFYLDFKAFRAGDPDYKSTTRDVKKLLTELQKDKVDGVVIDLRNNGGGSLQEATELTSLFIDKGPTVLVRNADGRVDVLEDENPGAFYKGPMALLVNRLSASASEIFAGAMQDYHRALIIGGQTFGKGTVQTIQPLNHGELKLTLAKFYRVSGQSTQHQGVLPDIGYPSIIDTKEIGESALPEAMPWDTIRPAIKPAVDPFKPFLAQLKAEHESRSAKDPEFVFIRDKLALAQKLMAEKTVSLNEADRRAQHADIEAKQLALENARRKAKGEEPLKELKKEDEDALAAAEPDKTKPEDDAYLSETGRILLDYLKLNTSVAKH

SEQ ID NO: 16066 - protein, 286 aa, Oryza sativa
  misc_feature (206)..(206): Xaa can be any naturally occurring amino acid
MDPMDIVGKSKEDVSLPKSTMFKIIKEMLPPDVRVARDAQDLLVECCVVWSLLSEFINLLSSESNEVCSREDKKTIAPEHVLRALQDLGFREYIEEVQAAYEHHKHDTLDSPKASKFTGVEMTEEQAVAEQQRMFAEARARMNNGAAKPKEPEPEAQQQTQQPPQPQLHPQPQQPLQPQLQLHPQPQQQPSQLHPQQLLHPQSQQXPQPQPQVHPQPQQPPQLQPQPQLLQQPQLPQQLQPQSQLPPQPQQPPQLQPQPQLHQQPQPQAELQSQSQPQTEHGLDSS

SEQ ID NO: 16067 - protein, 392 aa, Stigmaphyllon puberum; identical to SEQ ID NO: 9130

SEQ ID NO: 16068 - protein, 607 aa, Myxococcus xanthus DK 1622
MGKVIGIDLGTTNSCVAVMEGGEPVVIPNSEGSRTTPSMVGFTDSGERLVGQIAKRQAITNPENTVFAAKRLIGRKFDSPEGKKAIGVSPFKVASSPNGDAWVEIRGKGYSPPEVSAIVLMKMKQTAEDYLGEQVSEAVITVPAYFNDSQRQATKDAGRIAGLSVLRIINEPTAAALAYGLDKVQDGGTERIAVYDLGGGTFDISILELNAGVFEVKSTNGDTFLGGEDFDQRLIDYLAKRFAESNNGLDLRKDRMALQRLKEAAERAKHELSSAPETEVNLPFITADASGPKHLTETVDRATFEALVTDLIDRTIEPCRIALKDAGIPAQQINQVLLVGGMTRMPRVQQKVNEFFGREPHKGINPDEVVAVGAAIQGGVLKGEVKDVLLLDVTPLSLGVETAGGVFTKIIDKNTTIPCKKSQVFSTAVDNQPLVSVHVLQGEREMAADNKTLARFELVGIPPAPRGVPQIEVSFDIDANGIVHVSAKDLGTGKVQQVRVVSNSGLSEAEIQAMISDAQSHASDDKKKKELAELRNNADGLIYTTEKSLEEYASLLSEKDREEIKADLERLKEVLNTSDAAVLKESFQRLEGSAYRIADAIYTGQAS

SEQ ID NO: 16069 - protein, 392 aa, Mascagnia dipholiphylla; identical to SEQ ID NO: 9133

SEQ ID NO: 16070 - protein, 856 aa, Ralstonia metallidurans CH34
MEVSRIRALRGPNLWCRHTAIEAIVACSDKSLRLAELPGFEDRLRGRFPGIGPLRPDDEAGSPSMAHVLEVAALGLQAAAGCPVTFSNTAPTLEPGTYQVVVQYSEEEVGRLAFNLAEQLCIAARDDLPFDLDDALHRLRELDEDVRLGPSTGSIVYAAVARGIPYRRLTQGSMVQFGWGSKQRRIQAAETDMTSAVSESIAQDKELTKSLLHAAGVPVPMGRSVSSAEEAWAAAQEINGPVVVKPRDGNQGKGVAVRIRTREEVMTAYEVAADISSDVLVERYIPGHDFRLLVVGKHLVAAARRDPPQVIGDGVHTVRQLVEEVNRDPRRGEGHATSLTKIRFDDIALATLAKQGLSADAVPAKGTRVVLRNNANLSTGGSATDVTDDVHPDIAARAVAAAQMVGLDICGVDAVCETMLKPFEEQAGGIVEVNAAPGLRMHLQPSYGKGRAVGEAIISTMFADGDDGRIPVVAVSGTNGKTTTVRLITHILASNGLRMGMTGTDGVYIQGERIDTGDCSGPRSARNVLLHPDVDAAVFETARGGLLREGLAFDRCDVAVVTNVGEGDHLGLSYISTVEDLAVLKSVIVQNVAPHGMAVLNAADEMVARMADACPGTVTFFAHDAGLPTMALHRAQGRRVVFVEGDQIVATEGDTEVRIPLADIPLTRNGSIGFQVENAMSSIAAAWALGIDWAVIRRALATFVNDAATAPGRFNVFDFKGATLIADYGHNPDAIQALCNAVETMPSKRRVVVISGAGDRRDEDIRKQTQILGGVFDEVVLYQDQCQRGREDGEVLALLREGLQGAQRTSHVEEIRGEFVAIDTALSHLQPGDLCLILIDQVEEALDHIAKRVAGN

SEQ ID NO: 16071 - protein, 883 aa, Ralstonia metallidurans CH34
MKKKDIEIFDVMSLRGPNMWTYRPVLEAWVDIGELEDFPSNTIPGFYERLSAWLPTLIEHRCSPGVRGGFLMRLKEGTWPGHILEHVTLELQNLAGMPGGFGKARETPIRGVYKVIVRAWHEEVTRAALFTARDLVMAAIEDRPFDVPAAVDNLRRLVDEHCLGPSTACIVDAADDRDIPSIRLSDGNLVQLGYGARQRRIWTAETDRTSAIGESISRDKDLTKSLLESCGVPVPEGRMVESAEDAWDAAEDIGVPVVVKPYDGNHGRGVFTNLMTREEVETAYAVAIEEGSGVIVERFVPGNEHRLLVVGGRVVAVAMGETASVVGDGKSTIDELIESQINSDPRRGSTEDHPLNRVRLDSAARLELKRQGYADGSAVPPEGRTVLIQRNGNVAFDVTDRVHPSVAAHASLAARVVGLDIAGVDLVAQDISRPLAEQRGAIVEVNAGPGLLMHIKPAEGEPRPVGRAIVDHLFPSRNDVEDDGRIPVVGITGTNGKTVVAKLVARLLQLSGKHTGLACSDGLFLDRRQVEKGGRGDRASWDAGHRILMNRAVEAAVFENDSGMILSQGLPYDRCQVGVVTNFGKPDHIGDFYVEDEDRMYNVLRTQVDVVLKTGVAVINAADARLVEMAELCDGDVIFFGLSADLPAIATHRAAGKRAVFVRDGKVVLATGNSETALTDVSAIPLTYAGRVAFQIENVLAAVATGWALGISNDLIRAGIVTFDVGQVDVPGRFTLFEHHGATVVVDDAHNAPALEALAAALDRFPSERRMLVFGAGVQRRDEDLIEQGKVIGATFDRVFLCEDQSVKRELPETEARALLKKGLYEGRRVTKIIDEGARRAAVEAALAQLVAGDLLVLQCDEGSTDSTVEQVHQWMGRAGRRA

SEQ ID NO: 16072 - protein, 374 aa, Vitis vinifera
MAKVSGVVSAVFMAKANGNGVASAEFKANGNGSPEFHANLHRKETVGDGVMAEHGNTIVSSVSLLPPETENSSNGDVCFSSAIPGWYADAPPLWPGEAHVYKVEKVLFRGKSEYQELFIFESATSGKIVILDGYLQLSEKDEFVYQEMLTHLALCSIPNPKKVLLVGGGDGGILREASRHSSLEQIDICEIDKMVIDVYKQFFPDIAVGFEDPRVSVYIGDGVEFLKSVPEATYDAIILDAFQEMGPSAQELADKHILESVARALRPGGVLSTQAESMWNKNFILEDIIADCRKIFKGSVNYAWTTVPVYSSGVVGFILCATEGPPVDFKHPINPIDAVPNHGVAKGPPKFYNSEVHTAAFCLPSFLKGGSSKN

SEQ ID NO: 16073 - protein, 463 aa, Euglena gracilis
VWQNERVEIIANDQGNRTTPSYVAFTDTERLIGDAAKNQVAMNPKNTVFDAKRLIGRKFTDATVQADMKHWPFTVVSKSDGRPIIQVEFRGETKTFLPEEISSMVLTKMKETAESYLGKTVTKAVVTVPAYFNDAQRQATKDAGAIAGLEVLRIINEPTAAAIAYGLDKVKDNRERNVLIFDLGGGTFDVSLLTIDGGIFEVKATAGDTHLGGEDFDNRLVNHFVEEFKRKNKKDVTTNARALRRLRTACERAKRALSSAAQTTVEIDSLIEGIDFYTSITRARFEELNADLFRACITPCEKVLQDSKLDKASVHEVVLVGGSTRIPKVQQLVSDFFGGKELNRSINPDEAVAYGAAVQASILTGQKSKQTDGLLLLDVTPLTLGIETAGGVMTPLIKRNTTIPAKKSQIFSTYADNQPGVHIQVFEGERSMTKDNHLLGTFDLHGIPPAPRGVPQIDVTFDI

SEQ ID NO: 16074 - protein, 146 aa, Lotus japonicus
MGFTAQQDALVGSSYEAFKQNLPSNSVLFYTLILEKAPAAKDMFSFLKASGPTHSPQLQAHAEKVFGLTRDAAAQLLAKGEVTLADASLGAVHVQKAVADPHFAVVKEALLKTVQAAVGDKWSEELSTAWGVAYDGLAAAIKKAMS

SEQ ID NO: 16075 - protein, 158 aa, Bradyrhizobium japonicum USDA 110
MSAIYDFKANSLLGEEVPMRRFEGQVLLIVNTASKCGFTPQYRGLEDLYRDLSPRGFAVLGFPCNQFGAQEPGQASEIQEFCSTNYDVTFPLFEKIDVNGANAHPLYEYLKRQQSGLLGASIKWNFTKFLVDRAGRVIARYAPTARPEGLRQQIETLL

SEQ ID NO: 16076 - protein, 663 aa, Zea mays
MDRVRGSAFLLGVLLAGSLFAFSVAKEETKKLGTVIGIDLGTTYSCVGVYKNGHVEIIANDQGNRITPSWVAFTDSERLIGEAAKNQAAVNPERTIFDVKRLIGRKFQDKEVQRDMKLVPYKIINKDGKPYIQVKIKDGENKVFSPEEISAMILGKMKDTAEAYLGKKINDAVVTVPAYFNDAQRQATKDAGVIAGLNVARIINEPTAAAIAYGLDKKGGEKNILVFDLGGGTFDVSILTIDNGVFEVLATNGDTHLGGEDFDQRIMEYFIKLIKKKYSKDIGKDNRALGKLRREAERAKRALSNQHQVRVEIESLFDGTDFSEPLTRARFEELNNDLFRKTMGPVKKAMEDAGLEKSQIHEIVLVGGSTRIPKVQQLLKDYFNGKEPNKGVNPDEAVAFGAAVQGSILSGEGGDETKDILLLDVAPLTLGIETVGGVMTKLIPRNTVIPTKKSQVFTTYQDQQTTVSIQVFEGERSMTKDCRLLGKFDLNGIPSAPRGTPQIEVTFEVDANGILNVKAEDKGTGKSEKITITNEKGRLSQEEIDRMVREAEEFAEEDKKVKERIDARNQLETYVYNMKNTVGDKDKLADKLEAEEKEKVEEALKEALEWLDDNQSAEKEDYEEKLKEVEAVCNPIVSAVYQRSGGAPGGDADGGVDDDHDEL

SEQ ID NO: 16077 - protein, 811 aa, Cryptococcus neoformans var. neoformans JEC21
MAPATPTFRKPRLQPERGTLLSFFKKETTSVRTGFDVSHTQVESGVVSVEHTVGPSKDSQARNTSSKQNSIHKGKGKEKQKDHNGSVHDPVVISDDDEDDVLPAAPPTRSKRRKFSASSNGNQAPQLPSQSPCRPSEAPPMFASYSEFKPPPTWPQVVNTADVEENGNDQSMMVADEDDTRTPDPWEGKIEEDDSSVELDDRDRPHSPERQDTQSGNGLTVGGMEWEEPDEGMGMEDEVDDADDAQSAISSSIKPSTSKRGRRISPFSFSIPIPEPPSQSTIKGPNAFSLLMSGHKEHEQWKDAEDDLRRDGKRYAGRRRAPFYKVLTGMPVAVDAFRYGAIPGVTAYLLTHAHSDHYTNLSKSWNNGPIYCSQTTANLIIHMLEVDPKWVHGLPNDMPFEMPNTGGVTVTPIEANHCPGSSIFLFEGRQTVNAGDSGFASPYVGSKRVFRYLHCGDFRANPKMVLHPAIARAPINTCYLDTTYLNPKYCFPPQPLVINACATLARRNVVGESDDAPSLEAVQQGSVIGVSGVGSMTYGGGRKVTLKTEDGGEREIEVEIKEEKGEREKQMMQGWLVKKEEGVKEEVKEELGGVGKRAKSRTLVVVGTYSIGKERIVKAVAKAIGSKIYCDQRKKGILLCQTDPELHSMLTSDPIEAQVHLLPLGNIQLDRLQSYLTLLHPHFDRVLGFRPTGWSYSPPAGTDMLPDVNTIIRRDQARRFGEGDLKTMRGSSRNFMMYGVPYSEHSSFFELTCFALSLPGADLKMIATVNVGNEKSRAKMKKWFEKWLAEKAKRKEKGLPSTVEYRDETYW

SEQ ID NO: 16078 - protein, 540 aa, Festuca arundinacea
MGLGLGDPPADYGPIAAVGLFVALMCVCIVVGHLLEENRWMNESTTALLIGLGTGTVILLASSGKHSHILVFSEDLFFIYLLPPIIFNAGFQVKKKQFFRNFMTITLFAVVGTLISFSIISLGALGLISRLNIGALELGDYLALGAIFSATDSVCTLQVLSQDETPFLYSLVFGEGVVNDATSVVLFNAIQNFDLGDLSTLKFFQFIGNFLYLFGASTLLGVATGLLSAYVIKKLYFGRHSTDREVAIMMLMAYLSYMLAELLDLSGILTVFFCGILMSHYTWHNVTESSRVTTKHAFATLSFISETFLFLYVGMDALDIEKWKIVSETYSPMKSIALSSVILALVLVARAAFVFPLSYLSNLTKKTPGEKISIRQQAIIWWSGLMRGAVSIALTYNKFAKSGHTQLPSNAIMITSTIIIVLFSTIVFGLLTKPLIRLLIPTRHLTREVSALSEPSSPKSSLEQVSADGPEADLENAVTIRRPPSLRMLLASPTRSVHHYWRKFDNAFMRPVFGGRGFVPFVPGSPTESSVPLLAPVSEN

SEQ ID NO: 16079 - protein, 573 aa, Ustilago maydis 521
MTQPSSKFSIPLGPYTIYDPNTGIYASRLPPPQAASKTVFDFCLGSVSFDDAGTAITDCSTGRSISYGELRLQSQRFGLGLITKAQLKPGDTILVALHSSIDFAVSVMAAQFAGLRVALANPDYARKELRHVYRLVKPKKVIMHSTYLGRAAAANVKTFTVILTDTKLGRGGVLSIGELLADEALAKAAKPFLPDDLNTTAYLPSSSGTTGLPKAVEISHRNVVSMLSMNLNTPGFVPDELKGEQMRMLTFLPFFHAYGLVGQLHLILALRGQLFILRPFTAQAFCDAVPAHKINMLNFVPPALTKLIKHAGIDRNVFATVKRARCGAAPLDAETEAKFAELTGVQVKQGWGMTELTLAGLDPSSGQQKAGSVGCLIAGTLAKVVDVSSGEPVQTGQRGELLIKGDQVFRGYLANPQETEAAFTADGFFRTGDVVIVDPHTGEFTVVDRLKELIKYQGFQVAPAELEGVLVTHPKIAAAAVVGRLDQSKATELPCAFVQLSDQAKQHAASSTDDLAKEIDQYVRSKVSHHKFLRGGIHFVDQIPVSASGKILRKDVRALLETLPQLSSPRANL

SEQ ID NO: 16080 - protein, 161 aa, Lotus japonicus
MSTLGSTCFTEEQEALVVKSWSVMKKNSAELGLKLFLKIFEIAPSAQKLFSFLRDSKVPLEENPKLKPHAMSVFVMTCESAAQLRKAGKVTVRESTLKKLGATHYKYGVVNEHFEVTKFALLDTIKEAVPEMWSPEMKNAWTQAYDQLVGAIKSEMKPSSS

SEQ ID NO: 16081 - protein, 869 aa, Ostreococcus tauri
MSDVFEEFRHVNGELRKVEDGDVGARGDLSANASLSPPWMRAGSKPKAGGKRKRRGDADADDDDGFVVSDDDGDDEEEIDEENEMSVASESSLGSASDEEVDGFGMSAGYERQSGYNPVVAGFRAPARNSGGGSKAVATTSKLTFNMKRPSTSAAQQQQQQASDDEASLSGSTTDDESVSASESEDIDLGSKARSETKAKLDALAAQAREARAAPSYRQREDYVAQREEDEFDEYRPDAEDWKSAGEQGDADDDRAYEECKNMSKRLRNTLKEAQNAANGKLPVFSVDNVVEATGGRESGTFAVNLKPYQMVGVNFLMLLQQNGIPGAILADEMGLGKTAQAIAFIATSRYHPNAGVHAEKGVRWPRVETKANPVLVVSPASLLENWKRELGMWAPNLRVGVFHGETRVEVRQTEEFHRQHTGECCFDVIIVCYSLFERDSIESQDNRSWLQGMEFSHLILDEAHLLKNRDAQRTIRLTRTARKAHYRLLLTGTPLQNNLRELEALIEFVLPGLLKDGELGDGIDDEQAERRVTKVRRILEPFVLRRLKETVATQLAPKTQVKEVIKMHDTQAEAYKIAVERIRREALEGKGSNGTGTGLTQSRLKAIFVHLRKVANHPLLVRSKYTDEDLVEIAEQCHQRRIFGPDARLERVKTHVDSLSDFGLHQLCGDFMLQGALREKLLSPECGLESAKVQRLRELLVELKAKGSRALIFSQWKIMLDILEWVLCHVGFSYARLDGDTAVEERQELVDKFNAKDSSLDTFLLSTRAGGQGLNLTGADTVILHDCDFNPQIDRQAEDRCHRLGQEKQVTVYRFVTEGTVDEKIVAIAEHKMNLGSTILAEGEQAKPDSKEETRAMQRIIEELVHGS

SEQ ID NO: 16082 - protein, 334 aa, Magnaporthe grisea 70-15
MLSPVPLRVCSRGFRALSVIGLLDKRQVFSALRSPHSHRSLGLTGSYHHSIADGWFREISDMWPGQAMTLKVEKVLHHERSKYQDVLIFQSTDYGKVLVLDNVIQCTERDEFSYQEMITHLAMNSHPNPKKVLVIGGGDGGVLREVVKHDCVEEAILCDIDEAVIRLSKEYLPNMSAGFNHPKVKVHVGDGFKFLADYQNTFDVIITDSSDPEGPAESLFQKPYFQLLFNALTEGGVITTQAENQWLHLPLITKLRKDCKEIFPVAEYAYTTIPTYPSGQIGFMVCSKDPKANLKEPLRSWTQEEELEKCRYYSSDIHKASFVLPNFARKALQD

SEQ ID NO: 16083 - protein, 144 aa, Arabidopsis thaliana
  misc_feature (102)..(102): Xaa can be any naturally occurring amino acid
  misc_feature (114)..(114): Xaa can be any naturally occurring amino acid
MASSMLSSATMAASPAQATMVAPFHGLKPSAAFPATRKVNNDITSITRNGGSVHWMHVWPPIAKKKSGTLSYLHDLTDSELPKEDDYLIRNPRIPCAEFELXIPHSCPVSTVPXPDTMMYGTGQRGSFPCSGAPTSAQVLKRAE

SEQ ID NO: 16084 - protein, 501 aa, Phytophthora cinnamomi
GYIGREVYDAVVTVPAYFNDAQRQATKDAGTIAGLTVQRIINEPTAAAIAYGIDKKSQGEKNVLVFDLGGGTFDVTLLAIDGGVFEVLATNGDTHLGGEDFDQRIMQYFIKKWKKDKNLDVASDKRALQKLRREAERVKRALSAQAQARLEIESLLDGEDFTESLSRARFEKLNEDLFKKTLGPVEKVMKDADLKKSEVDEIVLVGGSTRIPKVQQLIKDYFNGKEPSRGVNPDEAVAYGAAVQGGILSGEQDDLTKDVLLIDVVPLSQGIETVGGVMTKLINRNTVIPTKKSQTFSTYQDNQPAVLIQVFEGERAMTKDNRLLGKFELTGLPPAPRGVPQIEVTFEIDANGILQVSAEDKGTGKAETITITAEKGRLSQEEIDRMVQEAAEFADEDKKVKDRIDGRNALEGYLYSLKNNVEEKLEDKIDEDDKDTVLTAVQDAMDWLEDNQEADKEDFEAKQKEVEKLVNPIMSKVYQGGAAGGDEDYDDEEEDDDHDEL

SEQ ID NO: 16085 - protein, 161 aa, Lotus japonicus
MAENTTTIAFTEEQEALVVKSWNAMKKDSAELSFKFFSKILEIAPPAKQLFSFLRDSEVPLDQNPKLKPHAMSVFLMTCESAAQLRKEGKVTVRESNLKKLGATHFKKGVIPEHFEVTKQALLDTIKEAVPELWSLELKDAWAIAHDQLASAIIAEMKPES

SEQ ID NO: 16086 - protein, 159 aa, Moritella sp. PE36
MTKLYDFEVTTITGEQKKLSDYKGQAVLIVNTASKCGFTNQYAELEELQQTYASKGLAILGFPCNQFKQQEKGSDADINAFCQLNFGVTFDMFSKIDVNGDNAAPLYKWLKSEATGLLGSKGIKWNFTKFLVNRDGDVVDRFAPTLSPKGMVKDIEKLL

SEQ ID NO: 16087 - protein, 492 aa, Bacillus cereus G9241
MSTQMLTLTSISIYMLGMLVIGYFAYKRTSNLTDYMLGGRTLGPAVTALSAGASDMSGWLLMGLPGAMFSVGLSSSWIAIGLTLGAYANWLYVAPRLRTYSEIANNSITIPEFLEHRFHDKSHMLRLVSGLVIMIFFTFYVASGLVSGAVLFENSFGMNYHVGLFIVAGVVVAYTLFGGFLAVSWTDFVQGIIMVVALILVPIVTIMNSNGLGPAFDTIRSVDPTRLDIFKGASTLGIISLFAWGLGYVGQPHIIVRFMAISSVKELKSARRIGMSWMIFSVVGAMFTGLIGIAYYSQQELTLSNPETIFLELGKILFHPLITGFLLAAILAAIMSTISSQLLVTSSAVTEDLYRTFFKRSASDKELVFVGRMAVLVIALVGCALAFKQNDTILALVGYAWAGFGSSFGPAILLSLYWKRMTKWGALAGMISGAATVIIWTQFKFLKEFLYEMIPGFTISLLVIVIVSLLTQPSKETTEQFENFEKQHSDNL

SEQ ID NO: 16088 - protein, 658 aa, Phytophthora cinnamomi
MNLSKILFMAAAAFAGAVVAEDAKGPRGPVIGIDLGTTYSCVGIYKDQKVEIIANDQGNRITPSYVAWDSNDERLIGDGAKNQATINPEKTLFDVKRLIGRKYNDKSVQADKKLLPYLLVNKDGKPFIEVEVKGEKRQFAPEEVSAMVLTKMKQISEGYIGREVYDAVVTVPAYFNDAQRQATKDAGTIAGLTVQRIINEPTAAAIAYGIDKKSQGEKNVLVFDLGGGTFDVTLLAIDGGVFEVLATNGDTHLGGEDFDQRIMQYFIKKWKKDKNLDVASDKRALQKLRREAERVKRALSAQAQARLEIESLLDGEDFTESLSRARFEKLNEDLFKKTLGPVEKVMKDADLKKSEVDEIVLVGGSTRIPKVQQLIKDYFNGKEPSRGVNPDEAVAYGAAVQGGILSGEQDDLTKDVLLIDVVPLSQGIETVGGVMTKLINRNTVIPTKKSQTFSTYQDNQPAVLIQVFEGERAMTKDNRLLGKFELTGLPPAPRGVPQIEVTFEIDANGILQVSAEDKGTGKAETITITAEKGRLSQEEIDRMVQEAAEFADEDKKVKDRIDGRNALEGYLYSLKNNVEEKLEDKIDEDDKDTVLTAVQDAMDWLEDNQEADKEDFEAKQKEVEKLVNPIMSKVYQGGAAGGDEDYDDEEEDDDHDEL

SEQ ID NO: 16089 - protein, 447 aa, Coprothermobacter proteolyticus DSM 5265
MVRKNGNKLAFFLLLAVLLSVAPALSYSNHTLELFPNSSTAIFDGKSYKLTASPVLVQGRLLVPVRDISELIGVDVRWDNQARKAIVTFPYVPDLVSENQTLRDNLQDSLSYLQVLDNPEMQALVTTIKTIKEEYLYPEKTSTVVYAAAKGAVNSLQDPYSSFYDPSEAKQILEALQGAFVGIGVYLQESANGVVVVKVVPGSPAQKAGMQAGDLIIKVDDVDVSSAPIEVISSLLKGEEGTYVKVTVKRADKTLTFTIQRLRIVVPTVSLIMNTTTVAVLQIDQFTETTPSEFRQVMGSVKAPKLVIDLRGNPGGLVESLVDVAGMLMGTKPVFLYRDNEQTTVIDAETPQIYTGRLYVLVDKYSASAAEMLAGALQDNKRATIVGERTFGKGVGQTLFDLEDGSLLYLTTFEFRTPNGKVINNYGIDPDIKVDPATALEYVLRLP

SEQ ID NO: 16090 - protein, 391 aa, Magnolia x soulangeana; identical to SEQ ID NO: 9154

SEQ ID NO: 16091 - protein, 503 aa, Triticum aestivum
MVAAIAGDAETDLTLPISDDLDDNGFPASPPTAPATSSFADDFYRSGIDWSSLQAPPSHRRRPADGTTEKFCGPLVQKNLFQAWGIEKPASGMTEKVCGPPVQKNLFQAWGIQKPPREEAAQGVPVGAGASSSSPSPSVAGSGRKRRWGGSDENGASRKPVACPFYKQIPGTPFTVDAFRYGAVEWCSAYFLSHFHYDHYGGLTKKWCHGPIYCTALTARLVKMLLSIDSAYVCPLELDTEYVIDGVKVTFLEANHCPGAALIHFRPSDGKTYLHTGDFRASKSMQLHPLLQTGCISLLYLDTTYCNPKYKFPPQEDVIDFVVRTAQRYLKKQPKTLIVVGAYSIGKENVYLAISQALEVPIYTDASRRRILHSFGWPDLSKRISSCNQSSPLHVLPLASLQHENLKKYLETLDQRFLAVLAFRPTGWTFSEAAGKELDLIKPSSRGRVTIYGVPYSEHSSFSELRDFLKFLRPQKVIPTVNVGNAANRDKMQAYFREWLKGT

SEQ ID NO: 16092 - protein, 200 aa, Chlamydomonas reinhardtii
MLQTRAPVVSRPAIGRAVRPAARPVVRTQALFGFGKTAEPETTSEFYQFQVKDIDGKNFKLSSLKDKAVLVVNLASACGFTPQYAELQDLQDKYGKQGFVVLGFPCNQFGAQEPGSNQTIKQFAKSNYGVTFPLMSKVDVNGPGAEPLFDWLKTQKGGLLTSDIKWNFSKFLINKEGDVVGRYGSTSSPLSLENDIKKAL

SEQ ID NO: 16093 - protein, 358 aa, Magnolia x soulangeana; identical to SEQ ID NO: 9156

SEQ ID NO: 16094 - protein, 389 aa, Nelumbo nucifera; identical to SEQ ID NO: 9160

SEQ ID NO: 16095 - protein, 399 aa, Colwellia psychrerythraea 34H
MIVSITLLILAVGVFAIILARFIRIPYTLLLVVLGFFLSLFTVAFGIDTGVRASNFQDLMLFILLPVLIFEAAFALNSKLLFKYLPNVLTLATLGLIISTLVIAVFLYFGIAHSGFPFIAALLTGVVISATDPVAVVGQLKALKAPDDLNVLIEGESLFNDATAIVLFSIILSIALGQSEPDLTSAIITFSKVFFGGIIVGSVFGYIAALLVKIIDTSVPHMVVITLFLAYGTFYIAEHLFHVSGIVAVMFAALLFKKSAQDQLKDVHTGLHNIWESLGFIANIFVFVLLGLVVSLNMFTQMWLAIILAIVGAFIARVIAVYCSVWLNQVIVGQPINRKYPPIMIWGGLRGAVTIALVLSLPTELPYWWTIQSIGFGIVLFTLIVQATTTPLLVKKLNI

SEQ ID NO: 16096 - protein, 391 aa, Nelumbo nucifera; identical to SEQ ID NO: 9162

SEQ ID NO: 16097 - protein, 415 aa, Nymphaea odorata; identical to SEQ ID NO: 9164

SEQ ID NO: 16098 - protein, 407 aa, Nymphaea alba; identical to SEQ ID NO: 9167

SEQ ID NO: 16099 - protein, 392 aa, Aspidopterys elliptica; identical to SEQ ID NO: 9168

SEQ ID NO: 16100 - protein, 448 aa, Piper nigrum; identical to SEQ ID NO: 9169

SEQ ID NO: 16101 - protein, 638 aa, Xylella fastidiosa Temecula1
MGKIIGIDLGTTNSCLAIIEGGKGRVIENSEGDRTTPSIVAYTKDGEVLVGAAAKRQAVTNPKNTFYAVKRLIGRKFGDAEVQKDLDLVPYKITQHDNGDAWVATADGKKLAPQEISAKVLEKMKKTAEDFLGEKVTEAVITVPAYFNDSQRQATKDAGRIAGLDVKRIINEPTAAALAYGLDKKGGDRKIAVYDLGGGTFDVSIIEIAEVDGEKQFEVLATNGDTFLGGEDFDKRVIDYLVDEFNKDQGIDLRKDPLALQRLKDAAERAKIELSSSQQTEVNLPYITADASGPKHLNIKLTRAKLEALVDDLVRKSIEPCRIALNDAGLRTSDVQEVILVGGQTRMPKVQQAVADFFGKEPRKDVNPDEAVALGAAIQGGVLAGDVKDVLLLDVTPLSLGIETMGGVFTKIIEKNTTIPTKASQVFSTAEDGQSAVTVHVLQGEREQARFNKSLAKFDLAGIEPAPRGQPQIEVSFDIDANGILHVSAKDKKTNKEQKVEVKAGSGLSDSEIQQMVADAEAHREEDKKFQELVQARNHADGLIHSTRSAIKEHGSKVGGELIGRVEASLAELEAAVKGDDKNQIEAKSKTLEEVAQSLHMAATAEQQSGSTGAGAGASAKVDDVVDAEFTEVKADKK

SEQ ID NO: 16102 - protein, 341 aa, Piper nigrum; identical to SEQ ID NO: 9172

SEQ ID NO: 16103 - protein, 392 aa, Caucanthus auriculatus; identical to SEQ ID NO: 9173

SEQ ID NO: 16104 - protein, 394 aa, Sagittaria sp. Mathews 383; identical to SEQ ID NO: 9174

SEQ ID NO: 16105 - protein, 397 aa, Sagittaria sp. Mathews 383; identical to SEQ ID NO: 9176

SEQ ID NO: 16106 - protein, 392 aa, Malpighia stevensii; identical to SEQ ID NO: 9180

SEQ ID NO: 16107 - protein, 216 aa, Saccharomyces cerevisiae
DHYIRLKKSWNNPDENPIKKTLYCSKITAILVNLKFKIPMDEIQILPMNKRFWITDTISVVTLDANHCPGAIIMLFQEFLANSYDKPIRQILHTGDFRSNAKMIETIQKWLAETANETIDQVYLDTTYMTMGYNFPSQHSVCETVADFTLRLIKHGKNKTFGDSQRNLFHFQRKKTLTTHRYRVLFLVGTYTIGKEKLAIKICEFLKTKLFVMPNS

SEQ ID NO: 16108 - protein, 230 aa, Oryza sativa
QCTERDEFSYQEMITHLALNSHPNPKKVLVIGGGDGGVLREVVKHASVEEAILCDIDEAVIRLSKKYLPGMSVGFQHPNATTHVGDGFEFLKTHKNEFDVIITDSSDPEGPAETLFQKPYFELLNDALREGGVITTQAENQWLHLSLIADLKKSCKEVFPVAEYAYTTIPTYPSGQIGFMVCCKDANRNVKEPVRSWTREEEEKLCRYYNQDIHRASFVLPNFARKALGN

SEQ ID NO: 16109 - protein, 160 aa, Oryza sativa
VLVKRLGWHVGKEIFMISGDTSADDREVAMDQFNNSADAKVLFGSIKACGEGISLVGASRVIILDVHLNPSVTRQAIGRAFRPGQQKKVFVYRLVAADSPEVKFHETAFKKEVIPKLWFEWSELCTTEDFKLNQVHIDDSEDELLEANAIRQDIKALYRR

SEQ ID NO: 16110 - protein, 643 aa, Saccharophagus degradans 2-40
MGKIIGIDLGTTNSCVSILEGNKAKVIENSEGDRTTPSIVAFTEDGEILVGQSAKRQAVTNPQNTLFAVKRLIGRKFTDDVVQKDISMVPYKIIAADNGDAWVEVKGDKKAPPQISAEVLKKMKKTAEDYLGETVTEAVITVPAYFNDSQRQATKDAGKIAGLDVKRIINEPTAAALAYGMDKSKGDSTIAVYDLGGGTFDISIIEIADVDGEHQFEVLSTNGDTFLGGEDFDLRLIEYLAEEFKKTNGIDLHNDPLALQRLKEAAEKAKIELSSSQQTEVNLPYITADATGPKHLVVKLSRAKLESLVEELVNRSLEPLKMAIKDAGVSVSDIDDVILVGGQTRMPMVQAAVAKFFGKEPRKDVNPDEAVAMGAAIQGAVLSGDVKDVLLLDVTPLSLGIETMGGVATPLIEKNTTIPTKKSQVFSTADDNQTAVTIHVVQGERKQASQNKSLGRFDLADIPPAPRGMPQIEVTFDIDANGILNVSAKDKATGKEQSIVIKASSGLSDDEIEKMVQDAEANADADRKFEEVVTARNTLEGLIHATKKTLEEAGDKATADEKSAIESAIAEAEEAAKGEDKDAMEAATKKLTEASSSLAQKLYAEQGAAGAGAAGAADAAADQPADDGAVDAEFEEVKEDDGK

SEQ ID NO: 16111 - protein, 392 aa, Madagasikaria andersonii; identical to SEQ ID NO: 9184

SEQ ID NO: 16112 - protein, 296 aa, Yersinia pseudotuberculosis IP 32953
MSQKELWYETLHANFGQYFSVENVLYREKTEHQDLVIFENPELGRVMALDGVVQTTERDEFIYHEMMTHVPLLAHGQAKKVLIIGGGDGAMLREVSRHKNIEQITMVEIDAGVVEFCRQYLPNHSAGAYDDPRFKLVIDDGVNFVNQTTEKFDVIISDCTDPIGPGESLFTSVFYEGCARSLNEGGIFVAQNGVCFLQQDEAVNSHNKLSHYFSDVSFYQAAIPTYYGGIMTFAWATQNPALRQLDLATLQNRFAQAGLACRYYNPAIHVGSFALPQYLLDALTTIPKVIGVDSSE

SEQ ID NO: 16113 - protein, 148 aa, Brassica napus
  misc_feature (106)..(106): Xaa can be any naturally occurring amino acid
MASSMLSSAAVVTSPAQATMVAPFTGLKSSAAFPVTRKANNDITSIASNGGRVSCMKVWPPVGKKKFETLSYLPDLTEVELGKEVDYLLRNKWIPCVEFELEHGVXYREHGKHPPGYYRWPVTGTMGKLPLVRDAPDSAPGVERNPQP

SEQ ID NO: 16114 - protein, 408 aa, Aquifex aeolicus VF5
MKRISFIPLLILVFFAGFILGQSSENKKEEDKYFYLKLFTEALKIVEREYVEPVPIKKLIYGAIDGMVSSLDPFSDFFTPEEYKEFLSETEGEFGGVGIEITMENGRPVVVSPIEGTPAWKAGIRPGDIIIAVDGEDTFNMSLMEVVKKIRGKPGTKVKLTILRKGEGKPIEVTLVRARIKVPSVKYTNYKGIGYIKISQFTSGTSKSLEKAILELENQNVKGFIIDLRNNPGGLLSEAVDVGDLFIPKGKLIVYTKGRKGELHRYFAEREPITQGLPVVLLVNKGSASASEIVAGALQDYHIATLVGEKTFGKASVQNLIPLSDGSAMKLTIAYYYTPKGRLIHKKGIKPDVEVKMDEETWKKLFETIRKMRFEGHMEKVILLPDIDVQLRKAIEILEKKAKLKKAA

SEQ ID NO: 16115 - protein, 421 aa, Oryza sativa Japonica Group
MDGNARSAANQTKQIVTDNELVELLWHNGGVVAQPQAAQARVVSSSGRGQSASVLTGDDTETAAWFPDTLDDALEKDLYTQLWRSVTGDAFPAAAAAGPSSHHAPPPDLPPPAARPPMRSGIGSSWTGDICSAFCGSNHIPETAAQRCRDAGAALPPERPRRSSTHDGAGTSSSGGSGSNFGASGLPSESASAHKRKGREDSDSRSEDAECEATEETKSSSRRYGSKRRTRAAEVHNLSERRRRDRINEKMRALQELIPHCNKTDKASILDEAIEYLKSLQMQVQIMWMTTGMAPMMFPGAHQFMPPMAVGMNSACMPAAQGLSHMSRLPYMNHSMPNHIPLNSSPAMNPMNVANQMQNIQLREASNPFLHPDGWQTVPPQVSGPYASGPQVAQQNQIPKASASTVLPNSGAEQPPTSDGI

SEQ ID NO: 16116 - protein, 469 aa, Dehalococcoides sp. VS
MSLEHVEKLIKDHKVEFVDLRFTDMRGVQHHVTFPKSIVEPALFEDGKMFDGSSISGWKGINESDMILLPDSTTAFLDPFTADPTLVLTCDILDPATMQAYSRDPRGVAKRAEAYLKASGVADQAFFGPEPEFFIFDSVRYANEMGHTFFHIDSEEAAWNSGKEYEGGNSGYRPGVKGGYFPVAPLDSLHDIRAEMCKTLEQVGIEVEVHHHEVANAGQCEIGTKFNSLVAKADELLTMKYIIKNVAHRNGKTATFMPKPIVGDNGSGMHVHQSFAKGGVNLFSGDGYGGLSQLALWYIGGVFKHARAINAFTNSGTNSYKRLVPGFEAPVMLAYSARNRSASCRIPYVANPKARRIEMRFPDPIQSGYLTFAALMMAGLDGIKNQIDPGAPSDKDLYDLPPEEEKGIPTVCHSLDQALEALDKDRDFLKAGGVFTDDFIDGYIALKMQEVTKFRAATHPLEYQMYYAV

SEQ ID NO: 16117 - protein, 726 aa, Marinobacter sp. ELB17
MSIVERLCSQRVARSKPVKALALAISLSVSFGAVASSESLQSYQPVAPTIDQARANILIARQLQFTHFRDLRVSDDLSGDIFDTYLKYLDGQKVYLTQDDLDGFVDIRDHLGSALRTGKLQPGFDIYNLVQKRIIERLHFALNLLDQSVGTLDFGSNDSILLDRSDSDWVANSARLDELWTKRIKNAVLAQRLNGSDDDAITDTLRQRYEAQLKRAYQARSEDAFQAYMNAFAGMWDPHTSYFSPRTSENFNINMSLSLEGIGAVLQGDNEYTKVVRLVPGGPAFQQGQLQPADRIVSVTQEGETPVNVIGWRLDEVVDLIRGPRDSVVTLEVIPSGAADETITKAIAIKRDQVKLEEQSASKKVIELDRNGETYKVGAITIPTFYADFQAMQAGDRNYKSTTRDVRSLLEELEAEGVEGLVIDLRNNGGGALHEANDLVGLFIDSGPTVQIRNANNDVQILNDEDPEVAFKGPMVVLVNRMSASASEIFAGAIQDYGRGLVVGSQTFGKGTVQAVRPLNHGQLKITQSKFYRVSGGSTQHKGVMPDIEIPSRIDNSLIGEDALDRALPWDQIDAVDHTQYFDFSNIIDELRLRHDKRFEASPEFSLLQQEIDFLKQQRQQNSVSLNMDERQQQHKQIERTRLTIANARRELLGETPFDTMEELDDWQDLQAADLNSNDEETDFVIREGGEIMADMLELDRRTAALPAMGSPLTAKAQTARASTEL

SEQ ID NO: 16118 - protein, 1765 aa, Cryptococcus neoformans var. neoformans JEC21
MGAMDDRRYSYPPPRTSYVQPSTHPSPTASDYRYRSPVLPQHPPTHHSPSSYSASLYGQPKEDPAIAYARMREEMRTAEEARREAEALEYRRKRDMEFAARRPGSELMDDPRRIPHSSFPRSQMYGPSADQSRVMPSRNGKDYISEPPSPSELYPTDEDTERLPIDRYRRDIDVPPLPRQLPPPPSEIGRMADRARSPSAPIAPPLLKVVRKRTKVIRPNDFLVGNEDVWEDGLIRYQSKREDEVRAIAQWAASCQVRNGVGEPSLPQTQDESIKVRKINGDIATPTNKKKRKSRKLNLDDELLGLASSPPGSPNAAAEAEKSESKHHIYGMNGPIDPANPPSPSTIVYPSGLTRAEVIAKCEAGDVEGLTEDDVKAVQDEMWMREKAAQAAENGGVLPTNKDGTVRRKPGPAKGWRKIRGIDKKKETTPGKAQSTTAGSVAGSVADEEAEADIAALLDDSIAKKGKKVKRRKLEEPGAESPRFADAEDEYNEHRPSDSVLLDEIEDEHSRAGSVGESNALDTLPAASAPPKKKNSKTKEPGVGKGRWTRPTKPEKELVKKAEALASRTSKASLAGPSDDTFGVGPGPAEEVQEEIKHEYAPNTHDPRGVSENEAKIRHELVEDLQKQAWSNIVRDVPRIYRVFQGYDQSMKQIAQRRAQACVRNAFGQRNQKTMQRQSGKVNKEGAAKAKRIVKELAAFWRKNEKDEVIARKKAEREALERAKAEEEARETKRQSRKLNFLLTQTELYSHFIGKKIKTKEAEAAEGMDVEEEEKRGMEEIAIGEDGEPLPDLDYDEDDEENLRKHAARGAQAAIQAARDKARAFDDSIVGRGAPLPGDDTMDGDELNFQNPSLGENSVTITQPKMLMAQLKEYQLKGLTWLGNLYEQGINGILADEMGLGKTIQSISLLAYLAEHHNLWGPFLVIAPASTLHNWQQELARFVPRLKALPYWGSPKDRETLRKIWSRKNQTFSEDSPFHILITSYQLAVQDEKYLQGMKWQYMILDEAQAIKSSSSARWKSLLSLHCRNRLLLTGTPIQNSMHELWALLHFIMPQLFDSHEEFAEWFSKDIESSSGGVTGNLKPEQLKRLHMILKPFMLRRVKKHVQKELGDKIEIDLLVDLSQRQREIYKALRQRVSITDLLATAENNTDNGNPKNMRSLVNLVMQFRKVCNHPDLFERADVVSPFVFGEFSQSGNLAREGDGMYLPDSARNAIEVQIPRILWTDGGKLDIPGEQSLAGSDTKILQNLLNIWTPEWINERTKCADAEFGFVKLVGSSPGETSRSAKSPVLVQLLEGAEKERRWTEEGRFVDDSEFAASVKKGFRVPSVIPVLTQPGQVSLREISRRVWDESYLSRDDARCIGDYAIAPIVKPIASNRSFLNAQDRILNQPLAHSTLYGLAPSELHDPLAAEQFSRIAPSVPLTGLIPSSASSQTPVSPLHIPPTKRLIVDSAKLARLDSLLRELKAGGHRVLLYFQMTKMMDLIEEYLIFRQYKYLRLDGSSPIAERRDMVTSWQTNPDIFVFCLSTRAGGLGINLTAADTVIFYDHDWNPSSDAQAMDRAHRVGQTKQVTVYRLVARGTIEERILQMARGKKDIQDVVVGTKSVSDVAKPSEIVSLFMDDEELAESVAKRKQAEAHGYIAPTIIPNGRRSQFGDGLVLDDGEGDDGFFNAAAAARANAEEEEGLGAEEESKGKGKAKAAAAVTFPVPGEKRSHKKGMGKKAQAAAAAAALERVIAGNEEPLAASKPPAKKKVKIALGPDGLPL

SEQ ID NO: 16119 - protein, 939 aa, Cryptococcus neoformans var. neoformans JEC21
MKDTLDKRTNARKDEKYPSLNGSPSDVLRAIHRHSPQPLRRPKPRYVDPDEEESPVKPTPATPSMISSVRQPSLVHAAQSARDDQEEKMIQRLASQFPNVERSTISSLLRKYPGNPDRAINQIHYANQMKAEQESYTSARSTTSKRSSPLPVPVSPAASNSKSKKKNENSTIYANRKRHRRSNDSEEEFSGSESEDDFSDGDDGRKRRKGEDDEPDAEGAALKAFNEDSVETLTGTIACRPEQAAIIIKHRPYEDVDDVRAKLTKARGVSFKLFEQYTEIMEGFVQIDACLNRCEAIASDVAKTLAVWKGASHAQDGSVVGTPRSDGLNDVKVDVAKVSELLKNETDVKKRKILKQYIQTQPSTLSEGTVLKDYQLLGVNWLNLLYSKRIGCILADEMGLGKTIQVIAFIAALKERGIIGPHLIFVPASTLENWTREFRRFAPDIDVQTYYGSQAERAGLRSDLKAQFRRGELEVVLASYTQMTSADDLSFFRKKIDFETCVYDEGHRLKSCTTKAYTDLLSIKPKWRLLLTGTPLQNNLQELLSLCQSLLMFIHKDTFTDAEPYLRAIFKSQGSASLLSHTRTTRARTMLTPFVLRRRKAQVLSLPPKIEIVEHCEMTKVQSKLYSETMQKSKKILSELTEEALEEVAGEDGSVATGKKPEADKKSVKGKKASGVTTSGSNILMDLRKAASHPLLFRRLYTDAKIRQIAKACLNTPSYCDCNLDYVIEDLERLQKELHKYALDPEVFLEGGKVMAMVKHIERCKAEGKRMLLFSQFVMILDILEGALNHLGIRYTRLDGQTKTDERQGLVDEFNDDTDITVFLLSTKAGGVGINLTAASVVVIYDQDFNPHNDRQAADRAYRIGQERKVEVIKLITKNSIDEDMLEIGLTKLQLDDMVGGEEITLDGTDGAGADDKTAKETRKSLLTQLRTKFVESES

SEQ ID NO: 16120 - protein, 202 aa, Pseudomonas putida KT2440
MCVRRYPASSRIVMREKRVMRAHWLTVPVLALLASTSSWAADCPALLQGSLPELRGKGQVDLCERFAGKPLVVVNTASYCGFAPQFEGLEATYKEYHEQGLEMLGVPSNDFKQEDADSEKTAKVCYANYGVTFTMTKTQAVRGKDAIPLFAELASQSSAPKWNFYKYVVDRKGKVIGNFSSLTKPDDPAFRAAIEKAIASQP

SEQ ID NO: 16121 - protein, 392 aa, Saruma henryi; identical to SEQ ID NO: 9199

SEQ ID NO: 16122 - protein, 548 aa, Pseudomonas putida GB-1
MQSAYTVLILLTLVSLSKLVGRMIPLPLPLVQIAAGALLALPTLGLHVALDPELFLFLFLPPLLFADGWRIPKRELWRIRGPVVALAVGLVLFTVVGAGYFIHWLLPSIPLPVAFALAAVLSPTDAVAVSAIAQDRLPTPLMHMLQGEALMNDASGLVTFKFALAAAITGVFSLTDASFSFVLVALGGLAVGVGLSWLVGRLRAWMIARGWDDPATHVVFMLLLPFAAYVLAERLGVSGILSAVAAGMMQSWLDLLPRQTSTRLLNRSVWSLLEFAFNGLIFLLLGLQLPDIIKAVVSHEPTVWPTLAYRCLDVVAIFAALILLRYIWVQSIWRSIGVVRRWRGKPALVLMPTARSCWLLTLGGVRGAVTLAGVMSVPLLMGAGKAFPERDLLIFIAAGVILLSLISACIALPLLLRGVTKSPDERLRQEVQEAWRRTAEAAIHALEAEEVIDSNAPQDAAQATLATELKARLMAEYRDELDSYNDSAEAKALAEQMDLLERHLRLRALRAQRLELYNLHRQHLVGDEVVRQVLGELDMSEANLGQVR

SEQ ID NO: 16123 - protein, 391 aa, Saruma henryi; identical to SEQ ID NO: 9200

SEQ ID NO: 16124 - protein, 493 aa, Bacillus pumilus SAFR-032
MKMKLQELLTYFKSENNELINENPDITSIEMDSREVKEGSLFVCIKGYTVDGHDYAEKAVKSGAAAIVAEHPLNITDVPVIIVKHSQRALARIADAFYEQPTHKLNLIGITGTNGKTSTTHMIEQVMRKAEKKTGLIGTMYMKVNDDILDVKNTTPESVTLQKTFKQMLDQDVDTAIMEVSSHALHLGRVHGCDYDIAVFTNLTQDHLDYHNTMEEYKHAKSLLFSQLGSAFHHNKPKHAILNADDEASSYFEKVTAAEVMTYALEQKADVMAKNIQIMPKGTQFDLVTPIGTKKVTVALVGKFNVYNILAAVSVGIVSGLTFETIVSAIEELEGVKGRFELVNCDQDFPVIVDYAHTPDSLENVLTTCRELTEGKIFCVIGCGGDRDKTKRPQMAQIAVKYADEPVFTSDNPRSEDPSAILKDMENGVPDAYYHSFVNRKQAIFFAIANAKKGDTVLIAGKGHETYQIIGDQVYDFDDAKIAVDAILDLNKS

SEQ ID NO: 16125 - protein, 414 aa, Saururus cernuus; identical to SEQ ID NO: 9201

SEQ ID NO: 16126 - protein, 682 aa, Debaryomyces hansenii
MSGTEAIQLLNQSSGYGILVGVGALFAIGMILTTKLLEKYLHEDAKSTEVFMVANRSVGIPLLASSVYSSWTWATELLWVCTMVYNYGIMASYWYSAGLAVQICLMAVIGIEAKKKIPACHTSLEIVELRYGKACHLLFMFLSLTNNLLSCCSMIVGAAGAISIIAGNLHIVASTMLIPFGVLLYTTVGGLKATFLTDFVHSFILLIILCYVDTAIISSKEIGGLDGLYDLVLKHESDRYIEGNYNGSFLTGKSQGAIFFGIILTLGNFGLTVMDSSFWQKSFSANTKASLPGYLIAGFFIAANVWGLGSIVGLSSIVLEGTPTFPTYPRKMTPSEVSSGFVLPYTVKGLLGNGGVGAILLVIYLAVTSTVSAQMISVSSILSFDIYKKYIKPDAQNHQMIRVSHFGVIFFGLFAAGFSVMLHYVGVDMTWLGYFYSMIICPGVIPLVFTITWSRQTKLAAFISPIIGLVCGLVVWTTTASHYYNEVTVASLGGQLPCMFGGLTALFLPGIVSIVVSLTIRPHRFDWNQLRRAELIISEEDEHIPNQKIELDSSEESNGNKEIIDKASQKTNIRNRYDETDSDNVYDESLETEEQKNRLLTTYSKLGYAAFIFVLLITWVLWPLPLYRDWVWSRAYFKGYITVSLIWVYGALLVIGVYPLIDGRHSATKIIRGVYNDYLKRD

SEQ ID NO: 16127 - protein, 391 aa, Saururus cernuus; identical to SEQ ID NO: 9202

SEQ ID NO: 16128 - protein, 401 aa, Trochodendron aralioides; identical to SEQ ID NO: 9204

SEQ ID NO: 16129 - protein, 390 aa, Trochodendron aralioides; identical to SEQ ID NO: 9206

SEQ ID NO: 16130 - protein, 307 aa, Pinus banksiana
ATDRTYCFSEVELISRKVAAGLAKLGLQQGQVVMLLLPNCIEFAFVFMGASVRGAIVTTANPFYKPGEIAKQAKAAGARIIVTLAAYVEKLADLQSHDVLVITIDEAPKEGCHHISVLTEADETQCPAVKIHPDDVVALPYSSGTTGLPKGVMLTHKGLVSSVAQQVDGENPNLYFHSDDVILCVLPLFHIYSLNSVLLCALRAGAATLIMQKFNLTTCLELIQKYKVTVAPIVPPIVLDITKSPIVSQYDVSSVRIIMSGAAPLGKELEDALRERFPKAIFGQGYGMTEAGPVLAMNLAFAKNPFP

SEQ ID NO: 16131 - protein, 183 aa, Pseudomonas fluorescens Pf-5
MAMRWFAVPALLATLAGSAWAADCPPLLQGSLPKLHAKESIDLCQRFAGKPLVVVNTASFCGFAPQFKGLEALYQRYKDQGLEVVGVPSNDFKQEAKDGAKTAKVCYVNYGVTFTMTEPQKVRGADAVHLFKVLAQQSSAPKWNFYKYVVDRQGNVIASFSSLTKPDNPEFIEAVEKALASKS

SEQ ID NO: 16132 - protein, 874 aa, Clostridium perfringens SM101
MKINNQRIFEGRNIYSHRKCIRLDVDLEGYCETPTKDIDGFNERLLSYVPELYVHRCGIDIEGGFVQRLKEGTYLAHVCEHTIIGIHNKLGIDIKYGKAREIKDDFYYIIFEYKLKKTAILIAELAIDLINSIIKKKDINFDERIEIIKRVIMEESIGPSTKAICDAAKEVGLPIITVGNGNLYQIGYGKKGKRFSATIGNNTKGIAIDIACDKILTKELLDIQNLPVARGEKIFNTIHLLEVVNRIGYPVVLKPQWGSKGNGVFVNINSEKELLRAYAEITKECKEIMMEEYKVGNDYRVMLVDYKVAAVSLRKPPYITGDGVRNIRDLIEAMNANPLRGEGHEKPLTKVKIDEELINMLSKLGYSLNSVLEYGEKVTLRGNANLSTGGSAEDYTDLICKENIEICERAAKTIGLDICGIDICAKSISEPLYENDGIILEVNAAPGIRMHHFPTIGKERNVGRKILDNMFKNNYSNIPVISVTGTNGKTTTVRLISYVLNLIGFNVGCTTTSGVKIGNKYIHKGDDTGYNSARSVLLNPEVDIAVLESARGGLVRRGLAYDLADVGVITNIREDHLGIDGINDMEDLSFVKSLVGEAVKDNGYSVINADDEWSLKVLDRIKKPKILFSMNENNKYLQENLKLENPIVFYRDETIYVKNRGKEYKIASAEDMKFTMNGKLKHNIENAMAACAALVGIEVDYCIISKGLKKFKSCEEDNRGRFNMFDVNGVNVILDYGHNIDGYKVVIDSLKNLGFKNITGIIGVPGDRDLNTMKEVGKISGDFFDSIVIKEDKDLRGKDKGEVASIINEGVLSSNRKDLNVKIILSEEEALRETLKLAKKGETIIMFFEDYESLYDIINEFKNKGTKDLKSASI

SEQ ID NO: 16133 - protein, 224 aa, Lactuca sativa
  misc_feature (222)..(222): Xaa can be any naturally occurring amino acid
LWIHKEDVLICVLPLFHIYSLNSILLWGLRAGAAILIMQKFDIVPFLQLIEKYKVTIGPFVPPIVLTIANNEELVDKYDLSSIRTVMSGAAPLGKELEDTVRMKFPNAKLGQGYGMTEAGPVLAMCLAFAKEPFDIKSGACGTVVRNAEMKIIDPETGASLPKNQRGEICIRGDQIMKGYLNDPEATKSTIDSEGWLHTGDIGYIDDDDELTIVDRLKELIXYK

SEQ ID NO: 16134 - protein, 245 aa, Phalaenopsis amabilis
MGRGRVQLKRIENKINQQVTFSKRRSGLLKKAHEISVLCDADVALIIFSNKGKLCEYSTDSSMEKILERYEHYSYTERALYSNEDNPQADWRLEYNKMKAKVESLQKSQRHLMGEQLDYLSIKELQHLEQQLESSLKHIRSRKTQLMVDSISELQKKEKLLLEQNKTLQDMAKAKAKALVQNAAWEQQNKSQYSSEPPHAVISDSVPTPTSRTFQTRANGEESPQPQLRLGNSLLPPWMLSHVNG

SEQ ID NO: 16135 - protein, 223 aa, Lactuca sativa
LWIHSEDVLMCVLPLFHIYSLNSILLCGLRAGAAILIMQKFDIVPFLELIQKYKVTIGPFVPPIVLAIAKNADVVDKYDVSSIRTVMSGAAPLGKELEDTVRMKFPNAKLGQGYGMTEAGPVLAMCLAFAKEPFEIKSGACGTVVRNAEMKIVDPDTNASLPRNQRGEICIRGDQIMKGYLNDPEATKRTIVDGWLHTGDIGFIDDDDELFIVDRLKELIKYK

SEQ ID NO: 16136 - protein, 444 aa, Mesorhizobium sp. BNC1
MIRKLSLLFAGALMGASAMSLVYGTNGTAAIAADTDTYRQLAIFGDIFERVRAQYVTPPDDKKLIENAINGMLTSLDPHSSYLNAEAAQDMRVQTKGEFGGLGIEVTMENELVKVVAPIDDTPASRAGILSGDLIEKIDGEEVRGMTLNDAVDKMRGLVNTPIELTVLREGQSKPLTFKIIRDTIKVKAVKSRVEGDDIGYLKITSFTEKTTDDLRAAIEDIRKQVPEDKLKGYVLDLRLNPGGLLDQAVNVSDAFLERGEVVSTRGRESGDIARFSSQAGDLTGGKPLVVLINGGSASASEIVAGALKDHRRATLVGTRSFGKGSVQTIIPLGENGALRLTTALYYTPSGESIQGKGITPDIKVEQPLPEDLQDVDLSRGESDLRGHIRGAEEDEEGSGSIAYVPQDPKEDVQLSYALDLIRGVKTDPAYPASPDKAVMNQQQ

SEQ ID NO: 16137 - protein, 68 aa, Triticum aestivum
MTTSRRLADRKTAKFQKNITRRGSVPETTVKKGNDYPVGPVVLGFFIFVVIGSSLFQIIRTATSGGMA

SEQ ID NO: 16138 - protein, 160 aa, Oenococcus oeni PSU-1
MSIYDYKATLENGESYKLDKYKGKIMVIVNTATKCGFAPQFEELEKIYKQFKDSGLVVLGFPSNQFKQELDSSQAAAEACRTTYGVTFLMHEINDVNGKDELPLFSYLKDNAPGAIGKSIKWNFTKFLVKQDGEVAKRYAPKTDPEKMIPDIEELLQLQK

SEQ ID NO: 16139 - protein, 426 aa, Photobacterium sp. SKA34
MSVYSTLCFLAAAAMLIAFVNSKIGKMQTTIAITAGSLILSLLIIIAGHNGWFHLEDVAASQISKINFEDFLLKGILGFLLFAGGLGIKLPHLEDQKWEITVLALGATLFSTFFIGFSLWGICQLIGIQLDLIYCLLFGALISPTDPIAVLAIVKKMNAPRRISTQIEGESLFNDGFGLVIFVTMFTIAFGDTAPTVIGVTQLFLQEAIGGIAYGFVLGLIFHYLISSTNDHSMELLLTIGIPTAGYALAEVLHVSGPLAMVVSGIMIGNWTRYIGFSKESEEHLDHFWELVDEFLNGVLFLLIGMTMLDFSFHQEDWILMIIVVPLVLLSRYISVKLPYVSFNRYRQYNPMSVKILTWGGLRGGLALAMAMAIPAGVMVIPEKGIDVREIILVMTYSVVVFSILIQGLTITPLIEKAKLWELKNK

SEQ ID NO: 16140 - protein, 446 aa, Vitis vinifera
  misc_feature (173)..(173): Xaa can be any naturally occurring amino acid
MESNLQHHQHQQQQMNSSLMRYRSAPSSYFSNFIDGEDCEEFLQHRPSSPETERIFSSRPSSPETERIFSRFMASGGTEDSSSHTVMNMRQNSQAMAPESVVVVSQQNQFMASMKHGAEVLQQQQQQNGYASGSQMMYQTSSPMPHHNSAAPGTVENSYSAVSSMGMDQSQQXKIGGGNNSNLIRHSSSPAGLFSHLNVENGYAIMRGMGNFGSGSGTNGEPSFSSASRLKGQINFSSGPPSSSGLVTPISEMGNKSMGTGSPDNGSFGEGHSNSGGFITGFPIGSWDDSAIMSESFSSLKSVRDDEAKTFSGLNASEAQKGEPANRPPVLAHHLSLPTKTSADLTTIEKYLQFQDSVPCKIRAKRGCATHPRSIAERVRRTRISERMRKLQELVPNMDKQTNTSDMLDLAVDYIKDLQKQVKRNRKKAAIKCKILDPIDPTKPTV

SEQ ID NO: 16141 - protein, 463 aa, Zea mays
MSGVGSGRPPAAQKILQSLRPPLSFATPSRPPFAAPDDYHRFPTPAAATAPAATSGGVGAGAPPRDTIEEGLVIRTPLKRKATSEENDAAAEPSDCIITSPMPTSVSGKTVKASKAKAKNSKTGPQTPTSNVGSPLNPPTPVGTCRYDSSLGLLTKKFINLLKQAPDGILDLNNAAETLEVQKRRIYDITNVLEGIGLIEKTLKNRIRWKALDDSSVQLDNGISALQAEVENLSLQEQALDERISDMREKLRGLTEDENNKRWLYVTEDDIKGLPSFQNETLIAIKAPHGTTLEVPDPDEAGDYLQRRYRIVLRSTMGPIDVYLVSQFDEKFEELGGVATPVKHSNVPRHQPVEDFNTYAGQSSTPMDVAHDVQHGQKIPQDPSALHDFGGMTRISPSDVHTDSDYWLLTEGDVSMTDMWKTGQEVQWDQIDFLSEDVVTPRAHNQQPVTVDGPHMEVPSMDP

SEQ ID NO: 16142 - protein, 550 aa, Yarrowia lipolytica CLIB122
MIIHSTGTLPIFNGTVTDYLRTKPSYSSTDPAYIDVVTGNSISYSEVWKLADRLSSALYNDYGLTDAKPDENVGPVVMLHAVNSPLLASVHYALLDLGVTITPAAATYEAGDLAHQIKVCSPSLVICNQQFEPKVKSASSNTKLIFIEDLLKTQSSAPWKKFTTSNPNRVAYLGMSSGTSGLPKAVQQTHINMSSSTEAVISSQTIFSARKNVTAAIVPMTHVYGLTKFVFHSVAGSMTTVVFPKFSLVDLLEAQIKYKINILYLVPPVVLALAKDSRVQPYIKSICELTTLIATGAAPLPPTAGDALLERLTGNKEGNRDNGMDPLVLIQGYGLTETLQVSVFKPEDPERDLKTVGKLLPNTEVRIVGEKGDVPRSKWSFVTPPTGEIYIRGPHVTPGYFNNDSANSESFDGEWLKTGDIGYMDLEGRLTIVDRNKEMIKVNGRQVAPAEIESVLLGHPMVKDVAVIGVTNPDRGTESARAFLVTEARALPVIKQWFDRRVPSYKRLYGGIVVVDAIPKSASGKILRRVLRERKGDSVFGEYVEEVAKL

SEQ ID NO: 16143 - protein, 183 aa, Escherichia coli O157:H7 EDL933
MQDSILTTVVKDIDGEVTTLEKYAGNVLLIVNVASKCGLTPQYEQLENIQKAWADRGFVVLGFPCNQFLEQEPGSDEEIKTYCTTTWGVTFPMFSKIEVNGEGRHPLYQKLISAAPTAVAPEESGFYARMVSKGRAPLYPDDILWNFEKFLVGRDGLVIQRFSPDMTPEDPIVMESIKLALAK

SEQ ID NO: 16144 - protein, 308 aa, Datura stramonium
MEEANNKESPYISSILPGWFSEISPLWPGEAHSLKVEKILFQGKSDYQNVMVFQSSTYGKVLILDGVIQLTERDECAYQEMITHLPLCSIPNPKKVLVIGGGDGGVLREVSRHSSVEQIDICEIDKMVIDVSKQFFPNVAIGYEDPRVKLHVGDGVAFLKFVAEGTYDAVIVDSSDPIGPAQELFEKPFFESVARALRPGGVVCTQAESIWLHMHIIEDIVANCRQIFKGSVNYAWTTVPTYPSGVIGFMLCSTEGPAVDFKNPINPVDADDSHTKTRGPLKFYNSEIHSASFCLPSFAKRVIESKGK

SEQ ID NO: 16145 - protein, 315 aa, Hyoscyamus niger
MEVTNQSNGCSNNEKESPYISSVLPGWFSEISPLWPGEAHSLKVEKILFQGKSDYQNVMVFQSSTYGKVLVLDGVIQLTERDECAYQEMITHLPLCSIPNPKKVLVIGGGDGGVLREVSRHSSVEQIDICEIDKMVVEVAKEFFPDVAVGYEDPRVNLHIGDGVAFLKNVPAGTYDAVIVDSSDPIGPAQELFEKPFFESIARALRPGGVVSTQAESIWLHMHIIEEIVANCRQIFKGSVNYAWTTVPTYPSGMIGFMLCSTEGPAVDFKNPINPIDDESGPKTIAPLKFYNSEIHQASFCLPSFAKRVIESKGK

SEQ ID NO: 16146 - protein, 317 aa, Datura stramonium
MEVANHNNNNNGCTNDKESPCISSVLPGWFSEISPLWPGEAHSLKVEKILFQGKSDYQDVMVFQSTTYGKVLVLDGVIQLTERDECAYQEMITHLPLCSIPNPKKVLVIGGGDGGVLREVSRHSSVEQIDICEIDKMVVEVAKQFFPDVAVGYEDPRVNLHIGDGVAFLKNVPAGTYDAVIVDSSDPIGPAQELFEKPFFETIARALRPGGVVSTQAESIWLHMHIIEEIVANCREIFKGSVNYAWTTVPTYPSGMIGFMLCSTEGPAVDFKNPINPIDDESHGQTIGPLKFYNSEIHQASFCLPSFAKRVIETKGK

SEQ ID NO: 16147 - protein, 607 aa, Streptococcus pneumoniae R6
MSKIIGIDLGTTNSAVAVLEGTESKIIANPEGNRTTPSVVSFKNGEIIVGDAAKRQAVTNPDTVISIKSKMGTSEKVSANGKEYTPQEISAMILQYLKGYAEDYLGEKVTKAVITVPAYFNDAQRQATKDAGKIAGLEVERIVNEPTAAALAYGLDKTDKEEKILVFDLGGGTFDVSILELGDGVFDVLSTAGDNKLGGDDFDQKIIDHLVAEFKKENGIDLSTDKMAMQRLKDAAEKAKKDLSGVTSTQISLPFITAGEAGPLHLEMTLTRAKFDDLTRDLVERTKVPVRQALSDAGLSLSEIDEVILVGGSTRIPAVVEAVKAETGKEPNKSVNPDEVVAMGAAIQGGVITGDVKDVVLLDVTPLSLGIETMGGVFTKLIDRNTTIPTSKSQVFSTAADNQPAVDIHVLQGERPMAADNKTLGRFQLTDIPAAPRGIPQIEVTFDIDKNGIVSVKAKDLGTQKEQTIVIQSNSGLTDEEIDRMMKDAEANAEADKKRKEEVDLRNEVDQAIFATEKTIKETEGKGFDAERDAAQAALDDLKKAQEDNNLDDMKAKLEALNEKAQGLAVKLYEQAAAAQQAQEGAEGAQATGNAGDDVVDGEFTEK

SEQ ID NO: 16148 - protein, 443 aa, Desulfococcus oleovorans Hxd3
MICKTADDVRKIVKEKNVSFIQFWFTDVLGALKSFAITPDELEEGIEEGMGFDGSSIQGFCRIHESDMIAKPDPTTFQFVPWRGEGDRPVARMFCDILQPDGTPYEGDPRYVLKRLLGQVAEKGYTFYVGPELEYFYFKNDQGTGILDKAGYFDARPMDMGGDLRRQTIFALQAMGIQVEYSHHEVAPSQHEIDLRYAEALNMADITMTYRMTVKEIAHRNGVYATFMPKPIFGENGSGMHVHQSLFKDGKNAFHSKDAKFNLSDIAKHYIAGILKHAPEIVSITNQWVNSYKRLVPGYEAPVYVSWANRNRSAMVRVPMYKPGKEAATRMEFRAPDPSCNPYLAFAVMLGAGMEGIENKYPLPDPIEEDIFEMTPAERHNKGITELPGNLYSAILETEKSGLVKKVLGEHIFKEFIDNKKVEWDRYRTHVSTFELENYLPKL

SEQ ID NO: 16149 - protein, 511 aa, Prochlorococcus marinus str. MIT 9515
MRSVKLHKLLDLVGIIPSLDLIDHKINNISFNSKEVQKGTLFLGMPGLNVDGGKYCIEAIENGAEAAIIGSAAKQKIGSIDRKRILVIEDNLDYIFGQIVAEFWNRPSRKLKLIGVTGTNGKTTITFLLEYLLKKLGKKTALYGTLFNRWPGFSEVASHTTDFADKLQKKLNAAVEAESEFAILEVSSHSIAQNRISGCEFEAAIFTNLTQDHLDYHSDMESYFQIKRKLFFPPYLTEKDGISVLNIDDPWISKLSFDLEKGSSLVSTKITDSEFEKDDFFFVTDKKFTESGSTCIFHTPREKIKLFVPLVGEFNLMNAIQAITILYKLNFSLKDLSKLIQSFPGAPGRMEKIEIDNDDVSSLLPTLIVDYAHTPDGLKKVLKSIKKLCEGKLITVFGCGGDRDCSKRPLMGSIAAEFSDHLFITSDNPRSEDPQKIVNDILMGIEKRDQITIEIDRFKAINESIKFANKEDIVLIAGKGHEDYQILNDKVIDFDDRKIAYKLLQEKSKSK

SEQ ID NO: 16150 - protein, 517 aa, Physcomitrella patens subsp. patens
MCGKSVAVMDGAASTMIQSHRGTSQASYSSGRSAVDEEISAMLHSGNYSHISQAPLAVSVGLEHFPYSVYQGYPGNQTRPVPTTQRNTNMPRGEIGDGNAHVGPLLHRGSPPRHSTFNLEEKYVLEAKSEALDANVLRNGATYGTIYENSRPSAMSTTVPLLHRYHSAPASTYLTQMNEEQIGNTVMSSIFTDGGLTPITENMDVERLGCGNSNSNEFEHYLAPENDFSRRAAFSALHREEATPDSFATTFQNSKNAVLCQSSLSSAGLSQPNISMQDRMAENGSEKNSSRNSDDNNHLISGYAASIYSQEDCHWKSPTSPAKRQRGLDGESETSSGSVEGSTYRKSQQGGLIRHMSLPHSTNGDSSSPGVEDNTFHTVPMRTRAKRGCATHPRSIAERVRRTKISERMKKLQDLVPSMDKQTNTSDMLDETVEYVKSLQRQVQELSDTVVRLEAAAAQKIFSDFQIRQKYLATPNPYSVDVTQADATAHRLSGKQQIQVGTVMSGILDHDTISHDV

SEQ ID NO: 16151 - protein, 172 aa, Zea mays
MTADKHYYYCALRSLPPLSILLRSSCVAWLTSRGRRARAATHACSCGACGYDLRLRSSDRNTAGIVGAGGAAYGRAARRGVVAFDAIDDARFGHADEFRCVDLRARRLFVRRTRLLCRKCGAGLGFGYDDRGQDGARPPRYDIKIRALQPLAADDDHHHHHGDAAAPPTLDA

SEQ ID NO: 16152 - protein, 193 aa, Herminiimonas arsenicoxydans
MKKSLFTLVCGTLLTVLFGTAHIASAQTAAPAACPATLNHVVPRLQDEAPQNLCQYAGKVVLVVNTASYCGFTVQYEGLEQLYAKYQPQGLVVLGFASNDFGQQEPGANKEIAEFCKNTYGVKFPMFAKSSVIGPNSNPVYLSLMKAGAKPPQWNFHKILLGRDGKVIASYPSKIRPDDKKMIADLEQALAKK

SEQ ID NO: 16153 - protein, 483 aa, Streptococcus mutans UA159
MITIETVLTILKNNANFREIIDGKHYQYKYSNPEVAFHHISYDSRDIKASTLFFVKGATFKKEFLEKAIESGLTFYVAEKDYQVGIPLILVNNIKNAMCLIAKEFYDNPQDKLKTLAFTGTKGKTTAAYFAYHILKQGYRPAMISTMNTTLDGKTFFKSKLTTPESLDLFKMMAQAVANGMTHLIMEVSSQAYLVGRVYGLTFDVGVFLNISPDHIGPIEHPTFEDYFYHKRLLLKHSRYVIVNSQMNHFALIKEQVADQPHDFYGKYSDNQIINSKAFSFDLTGKLAGHYDIQLTGSFNQENAVAAALACLQLGASQTDIQKGIVQTTVPGRMEVLIQKNGAKVFVDYAHNGDSLEKLLSVVEEHQKGTLILILGAPGNKGESRRADFGYVINAHPELQVILTADDPNNEDPQLISQEIAHHIKRPVNIIVDRKQAIQKAMSLTQSENDAVIIAGKGADAFQIIKGKRTAYAGDIEVARKYL

SEQ ID NO: 16154 - protein, 657 aa, Candida albicans SC5314
MEPSLSQGAGFGLIIGGGVFFAVVMNYVTHLQNKFSQYNSHKVDEFVSGSRRVGFGLLLAGILSSWTWSLTLLESAVKSYSMGFCGSYYYAIGGLLQVSIFSVISSKIKKNANLVTTFPEMGYFRFGVPGHLAFLWCGFVCNAIVSSCILLGGSAVLHAVTGVSQYASLFLIPFGVAVYVSFGGLRATFISDASHTFIILIFIIVFMFEVYVSNDKIGSAQKMWELLESLPPVENNYQGSYLTFRSEQGAIFAVISVITGIGLVVADQAYLQRAVAADPRITSRAYFFAALCWFVIPFAMGASLGLGARALSVYPDFPKLTDFEVGEGLPAAAAATYLMGKTGSAMIIVMIFFSVTSSYAGELIATSTLVSYDIYKRYINPTATPPQVVKVAKYSVFGWAIFSSCLASIFYGAAKISMGWLFNFLGCATASGVFPIALAFTWKDLNQAGAVGGSVGGMVLAFIVWLITCKTYTGSITVDNLSNQWVSFAGNVTALVMGGVISIVLSLIWPANFDFDNTRNKTSLAEQNTELIKQESSGTTKLDETKDQNVEIETEIANSDLDMDLNAEIDHKHLDQQFKKYTILVIVLAIIFVFIIPVPLGGSPYVFSPNFLLGCVIIIIIWLFFSLFYVVILPLFEARKTLWQITKQILRIDSKSE

SEQ ID NO: 16155 - protein, 539 aa, Spinacia oleracea
MEVISRLTFASVSYPFISSNLNPTPMLNSFNFRVLSWNSAPTNVAEAHLHRLLLRKLNPANDRVVGISNFGCSCRLDLWPSWRRHKRLFFQNGVSTIRWEVKKCSPKFYKIVSNYEKCKRHIYVPSVRLVVGVVLLMSVSVALNQDPSWSLSEENRIFLEAWRTIDRAYVDKTFNGQSWFRYRENALRNEPMNSREETYTAIRKMVATLNDPFTRFLEPEKLKSLRSGTQSSLTGVGISIGPTAVDQSSTGLVVISATPGAPASRAGILPGDVILAIDDASTDKMGIYEAANILQGPDGSSVDLTICSRDEIKHVVLKRERITLSPVKSRLCEMPGSAKDAPPKVGYIKLTTFTENASDAVKEAIETLRSNNVNAFVLDLRDNSGGLFPEGIEIAKIWLNKGVIVYICDSRGVRDIYDVEGSSAVAGSEPLVVLVNKGTASASEILAGALKDKKRAVVFGEPTYGKGKIQSVFELSDGSGLAVTVARYETPAHTDIGKVGIKPDHPLPASFPKDENDFCTCVQDPSSTCYLNGVQLFSR

SEQ ID NO: 16156 - protein, 483 aa, Shewanella sp. MR-4
MTIETPILITFVGYLVLMMGIGFWAYRATDTVDDYILGGRKMGPAVTALSVGASDMSGWLLLGLPGAVYLGGLGEAWIGIGLVVGAWLNWLFVAKRLRIYTQLADNALTLPDFFEKRFHDKQGYLKLVSAVTILVFFTFYASSGMVGGAILFEKVFGLDYNVALVIGSAIIVGYTFIGGFFAVSWTDFFQGCLMLIALLIIPFAVFSHPESHEGIESIDPAMLALISDKTTVIGLLSLLAWGLGYFGQPHILSRFMAIGSADALPLSRRIAMSWMMLSLIGALATGLAGSLYFANQPLANAETVFIHLAQAAFNPWIGGLLIAAILSAIMSTIDSQLLVCSSVITEDFYRKWLRPQADDRELMMVGRMGVLAIAVIAGIIALNPESSVLSLVSYAWAGFGAAFGPVVLLSLFWKQYSRNGAIATIIVGALTVVIWKQLTGGIFDLYEILPGFVFAIIAGVIVSKMSRPAEAITAEFEQFKSAL

SEQ ID NO: 16157 - protein, 237 aa, Hordeum vulgare subsp. vulgare
MPSRPAPFIHRLRLLRSAVVSPSSAPLPCSRPRLAVPFAQPPIRAPAFAAAGSPLLRPVGARFSLSSNMAAAASSASSVHDFTVEDASGKDVDLSTYKGKVLLIVNVASQCGLTNSNYTELAQLYEKYKDQGFEILAFPCNQFGGQEPGTNEEIVQFACTRFKAEYPIFDKVDVNGDNVAPVYKFLKSSKGSLFGDNIKWNFSKFLVDKDGNVVDRYAPTTSPLSIEKDIKKLLASS

SEQ ID NO: 16158 - protein, 447 aa, Methanosarcina mazei Go1
MVQMKKCTTKEDVLEAVKERDVKFIRTQFTDTLGIIKSWAIPAEQLEEAFENGVMFDGSSIQGFTRIEESDMKLALDPSTFRILPWRPATGAVARILGDVYLPDGNPFKGDPRYVLKTAIKEAEKMGFSMNVGPELEFFLFKLDANGNPTTELTDQGGYFDFAPLDRAQDVRRDIDYALEHMGFQIEASHHEVAPSQHEIDFRFGDVLCTADNVVTFKYVVKSIAYHKGYYASFMPKPLFGVNGSGMHSNQSLFKDGKNVFYDPDTPTKLSQDAMYYIGGLLKHIREFTAVTNPVVNSYKRLVPGYEAPVYISWSAQNRSSLIRIPATRGNGTRIELRCPDPACNPYLAFALMLRAGLEGIKNKIDPGEPTNVNIFHLSDKEREERGIRSLPADLKEAIDEMKGSKFVKEALGEHVFSHYLCAKEMEWDEYKAVVHPWELSRYLSML

SEQ ID NO: 16159 - protein, 560 aa, Aspergillus nidulans FGSC A4
MPFRSRWQIEIPNTHLASLLLTSPTEPLSKTHRCFSEAARPDTHYFTTHDFRLWSQRFAAGLRKSGLQKGDRVLLFSGNDIFFPVIFMGIIMAGGIFTGANPTFVARELAYQLQDSGAIYLLCAEDSLDTGIEASKIAGLDMDKVFVFNNALYDGKGEGMKGCRYWGELVASVEEGAGFAWEELDTPEKANTTLALNYSSGTTGRPKGVEISHKNYVSNMLQYNHLFYLNPNWREKAKRARWLCFLPMYHAMAQNIFIAAALNRGVPVYVMPKFDFIKMLEYTEKFRISDYILVPPVVVALAKHPAVKSGKYDLSSVEDIGSGAAPLGREVCEEVEALWPPGKINIKQGWGMTEATCSILGWSPMEKCLTASVGELNPNCEAKIVADDGVTELGKNQRGELLVRGPNVMKGYWRNPQATKETLTEDGWLRTGDIAFVSNEGWFHVVDRKKELIKVKGNQVAPAELEAILLEHPAVADAAVIGVPKDEDEAPRAYIALKPGKNATAKDITTFMEGKVSRIKRITGGVVFVEAIPKNPSGKILRKALREQAKQELQGVYAKL

SEQ ID NO: 16160 - protein, 555 aa, Burkholderia pseudomallei K96243
MAIVFTVLILLLAVALSGVATRVLPLRLPLPLMQIAIGAVLAWPRFNLHVTFDPEIFMLLFIPPLLFADGWRIPKRELYLQRRAILMLAFGLVFMTVLAVGYFAHGLIPGLPLPIAFALAAVLSPTDAVALAGIAGKGRIPPQLMHILEGEALMNDASGLVALKFAIAAALTGMFSLRDASISFVIVASGGLAAGAALAWLFSALSTRFLNAAQEGDPAPGIVMTLLVPFASYLIAEHLGLSGILSAVASGMMMNYTSFSKSSTVAARVRAESTWAMIEFVFNGMVFIMLGLQLPHIIGRALVDAHHTSDALVGAMIGYVAAMLAALYAIRFTWVWLLRWIASRRAAKQGLAGTMAGLRTIAVMTVGGVRGAITLAGVLSIPVALGDGTPLAGRDTAIFVASGVILGSLVVAVIALPLLLRGVRPMRNPHAEEERAARAAAAQAAIRAVDAAHDALAVDLDESAAARCADVTARVMDLYRRRLAGLAADGATPREEARQTEKMELALKIAAIRAERAVLYRLRGEQKINDETLAKLMREVDFSETALSTRKKGIV

SEQ ID NO: 16161 - protein, 401 aa, Oryza sativa Indica Group
MSSGGGRPPAAQHIVRSVRQRFVPLPPPLARAPFAAAPGDYHRFAAASRGGEIDEGIVIRRTPSCGIDAKVEGFVKCLSSGSPGNPSTPASSRYDNSLGLLTRKFINLLKQAQDGILDLNDAAKILDVWVRKRRIYDITNVLEGTGLIEKKLKNRIRWRGSDDSGTNLDSDISCLKTEVENLYIQEQALDRSISEIREKMEELTEDESNHRWLFVTEDDINGLPCFQNEALIAIKGPRGTTVEVPDPDELLPQKKLSDEHPYYIISQYKKMEELGETATPPRHASVVEPPSIATEAGHSSKQTMPLNVQQDIQETPELNASRAFGRMKKITPSDVDTDADYWLLTDDDISITHMWTTASEMQWDQIDTNDFLAEEISDTPCALNQPSAAASEPTGVGFNHG

SEQ ID NO: 16162 - protein, 171 aa, Hordeum vulgare subsp. vulgare
MGAAESSSKLGGSVHDFVVKDVRGNDVELSRYKGKVLLIVNVASRCGLANSNYTEMGQLYEKYREKGLEILAFPCNQFAGQEPDSDEKIVEFACDRFQAQFPIFRKVDVNGNNAAPLYKFLKSERGGLFGERIKWNFTKFLVDKEGHVMNRYAPTWSPLGIENDIKKLLEV

SEQ ID NO: 16163 - protein, 538 aa, Zea mays; identical to SEQ ID NO: 16050

SEQ ID NO: 16164 - protein, 165 aa, Hordeum vulgare subsp. vulgare
MAAASSATSVHDFTVKDASGKDVDLSVYKGKVLLIVNVASQCGLTNSNYTELSQLYPKYKDQGFEILAFPCNQFGGQEPGTNDEIVQFACTRFKAEYPIFDKVDVNGNNVSPLYKFLKSSKGGFFGDSIKWNFSKFLVDKEGHVVDRYAPTTSPMSIEKDIKKLL

SEQ ID NO: 16165 - protein, 474 aa, Nostoc sp. PCC 7120
MTTPQEVLKRIQDEKIELIDLKFIDTVGTWQHLTLYQNQIDESSFSDGVPFDGSSIRGWKAINESDMTMVLDPNTAWIDPFMEVPTLSIVCSIKEPRTGEWYNRCPPVIAQKAIDYLVSTGIGDTAFFGPEAEFFIFDSARFAQNANEGYYFLDSVEGAWNSGKEGTADKPNLAYKPRFKEGYFPVSPTDSFQDIRTEMLLTMAKLGVPIEKHHHEVATGGQCELGFRFGKLIEAADWLMIYKYVIKNVAKKYGKTVTFMPKPIFGDNGSGMHCHQSIWKDGKPLFAGDQYAGLSEMGLYYIGGLLKHAPALLAITNPSTNSYKRLVPGYEAPVNLAYSQGNRSASIRIPLSGTNPKAKRLEFRCPDATSNPYLAFAAMLCAGIDGIKNKIHPGEPLDKNIYELSPEELAKVPSTPGSLELALEALENDHAFLTDTGVFTEDFIQNWIDYKLANEVKQMQLRPHPYEFSIYYDV

SEQ ID NO: 16166 - protein, 171 aa, Saccharomyces cerevisiae
MGHHHHHHMSEFYKLAPVDKKGQPFPFDQLKGKVVLIVNVASKCGFTPQYKELEALYKRYKDEGFTIIGFPCNQFGHQEPGSDEEIAQFCQLNYGVTFPIMKKIDVNGGNEDPVYKFLKSQKSGMLGLRGIKWNFEKFLVDKKGKVYERYSSLTKPSSLSETIEELLKEVE

SEQ ID NO: 16167 - protein, 448 aa, Streptococcus mutans UA159
MAITAADIRREVKEKNVTFLRLMFTDILGTMKNVEIPATDEQLDKVLSNKAMFDGSSIEGFVRINESDMYLYPDLNTWTVFPWGDENGAVAGLICDIYTAEGEPFAGDPRGNLKKALRHMESLGYKSFNLGPEPEFFLFKMDEFGNPTTEVNDKGGYFDLAPTDLADNTRREIVNVLTKMGFEVEASHHEVAIGQHEIDFKYADVLTACDKIQLFKLVVKTIARKHGLYATFMAKPKFGINGSGMHCNMSLFGSDGKNAFFDPQDPKGMQLSEVAYQFLGGLVKHAYSYTAIMNPTVNSYKRLVPGYEAPVYIAWAGRNRSPLIRVPASRGVSTRLELRSVDPTANPYLALAVLLESGLDGIENKIEAPAPVESNIYVMTVEERKEAGIADLPSTLHNALKALQEDEVVKAALGNHIYTSFLEAKRIEWSSYAAFVSQWEVDNYLDLY

SEQ ID NO: 16168 - protein, 308 aa, Hyoscyamus niger
MEEQGNNESAYISSILPGWFSEISPLWPGEAHSLKVEKILFQGKSDYQNVVVFQSSTYGKVLVLDGVIQLTERDECAYQEMITHLPLCSIPNPKKVLVIGGGDGGVLREVSRHSSVEQIDICEIDKMVIDVSKQFFPNVAIGYEDPRVKLHVGDGVAFLKNVPEGTYDAVIVDSSDPIGPAQELFEKPFFESVARALCPGGVVCTQAESIWLHMHIIEDIVSNCRQIFKGSVNYAWTTVPTYPSGVIGFMLCSTEGPAVDFKNPINPIDADDSHTKTRGPLKFYNSEIHSASFCLPSFAKRVIESNAK

SEQ ID NO: 16169 - protein, 168 aa, Kluyveromyces lactis NRRL Y-1140
MSDDFYSYSCETKDGSEYHMSELRGKVVLIVNVASKCGFRGQYGELQELYKEFHAKGFEILAFPCNQFMNQEPGSDEEIGKFCQEHYGVSFKIMKKCKVNGVNALPLYKYLKDQQPRMFGFTFVRWNFEKFLIDRSGRVHGRYSTLTKPKSMKEDIEQLLKQKSQLQS

SEQ ID NO: 16170 - protein, 448 aa, Exiguobacterium sibiricum 255-15
MTRRNITREDIMKIAKAEDVRFIRLQFTDILGTIKNVEIPVSQLEKALDNKMMFDGSSIEGFVRIEESDMYLFPDLNTWVVFPWTEDGTGKVARLICDIYNPDGTPFAGDPRGQLKRVLKEMEELGFTSFNVGPEPEFFLFKKDANGRPTLELNDQGGYFDLAPVDLGENCRKEIVIELENMGFEIEASHHEVAPGQHEIDFKYADAITTADNIQTFKLVVKTIAAKHNLHATFMPKPLYGVNGSGMHANMSLFKGNENVFFDEENSNMQLSDDARAFTAGILKHARAFTAVCNPTVNSYKRLVPGYEAPCYVAWSARNRSPLVRVPAARGLSTRIEVRSVDPAANPYLALATLLASGLDGIKNNLQAPAPIDRNIYVMDKPERVANGIDDLPSTLSHALEVLKADDVVMHALGEHIAEHFVELKEIEWDMFRTQVTEWERDQYMVLF

SEQ ID NO: 16171 - protein, 241 aa, Arabidopsis thaliana; identical to SEQ ID NO: 11124

SEQ ID NO: 16172 - protein, 598 aa, Yarrowia lipolytica CLIB122
MVQIIHKAPLGDMAESELFYGSIPDFMRSSRFADDDTRISVVDYDTDKAMTLARVFKVSGMLRAQFFHTYDVGKKKDGDANPKVIFYVGNTADNLACHIALHDLGAIISPASTAYDVNDLLHQINVVDAALIVAEAARADVAREAVAKAGDKFKHVKVVVFEELLEQNRRVRPNLIRVAPIVHLSKEQAYTTLAYLGMSSGTSGGVPKAVELTHFAMTSNVQQTAKNAPNLVDDDTVCSAVIPTSHIYGLALFMLHMPFLGAKVVYHKKFDLVEMLEGQKKHGVNYWVLVPPIIVALAKHPIIDRYLDSIRANLKTITSGAAPLGGNVVDAVQTRFTGNTRGTLPNNRRIVIYQGYGLTETAPIACLCDPLWDNLNVVTVGTLVPNTEARIVDENGDDQPAFEVTDARALGDAVRRGDKIPSGELYLRGPQIMSGYHKNPKSTEESFEYVDYKAEGLRHYQDRWLKTGDVAVIDNFGRIQIVDRTKELIKSMSKQVAPAELEALLLSHPDVVDVAVIGVWQEEKATESARAFLVVRDPKVDVVAIKKWMDEQVPSYKRLYGGVVVIDAIPKNPSGKILRRLLRQRKDDVVQGLDQAKL

SEQ ID NO: 16173 - protein, 182 aa, Brassica napus
  misc_feature (57)..(57): Xaa can be any naturally occurring amino acid
MAYSMLSSAAVVTSPAQATMVAPFTGLKSSSAFPVTRKANNDITSIVSNGGRVSCMXKVWPPVGKKKFETLSYLPDLTEVELGKEVDYLLRNKWIPCVEFELEHGFVYREHGSTPGYYDGRYWTMWKLPLFGCTDSAQVLKEVQECKTEYPNAFIRIIGFDNNRQVQCISFIAYKPPSFTGA

SEQ ID NO: 16174 - protein, 161 aa, Ustilago maydis 521
MVSFYDLKAKKPSQEDYTFDQLKGKVVLVVNTASKCGYTPQFAELEELNKKYADQGLQIIGFPCNQFAGQDPGSDESIGEFCQRNYGVTFPMMAKSDVNGSNTNEVFQFLKKEKAGILGTEMIKWNFTKFLIDKEGNVIERYGSNTKPSAIAPAIEKLLSQ

SEQ ID NO: 16175 - protein, 316 aa, Coffea arabica
MADAVNSNSKEEAAQLPDGVSSVIPGWFSEISPMWPGEAHSLKVEKILFQGKSDYQNVMVFQSSTYGKVLVLDGVIQLTERDECAYQEMIAHLPLCSIPSPKKVLVIGGGDGGVLREVARHLSVEQIDICEIDKMVVDVSKQFFPDVAVGFEDPRVVLHIGDGVAFLKAVPEGTYDAIIVDSSDPIGPAQELFEKPFFESVAKALRPGGVVCTQAESIWLHMHIIEDIVANCRQIFKGSVNYAWTTVPTYPSGVIGFMLCSTEGPPVDFKHPINPIDANDGRSKTMKPLKFYNSEIHSAAFCLPSFAKKVIDSKAN

SEQ ID NO: 16176 - protein, 314 aa, Nicotiana sylvestris
MEAANHNNNGCTNESPYISSVLPGWFSEISPLWPGEAHSLKVEKILFQGKSDYQNVMVFQSSTYGKVLVLDGVIQLTERDECAYQEMIAHLPLCSIPNPKKVLVIGGGDGGVLREVSRHSSVEQIDICEIDKMVVEVSKQFFPDVAVGYEDPRVNLHIGDGVAFLKNVAAGTYDAVIVDSSDPIGPAQELFEKPFFESIARALRPGGVVSTQAESIWLHMHIIEEIVANCRQIFKGSVNYAWTTVPTYPSGMIGFMLCSTEGPAVDFKNPINPIDDDASHNKTLGPMKFYNSELHKASFCLPSFAKRVIESKGK

SEQ ID NO: 16177 - protein, 638 aa, Pseudomonas fluorescens Pf-5
MGKIIGIDLGTTNSCVSILENGNVKVIENAEGARTTPSIIAYANDGEILVGQSAKRQAVTNPHNTLYAVKRLIGRRFDEEVVQKDIQMVPYKIVKADNNDAWVEVNGQKMAPPQISAEILKKMKKTAEDYLGEAVTEAVITVPAYFNDSQRQATKDAGRIAGLDVKRIINEPTAAALAYGMDKAKGDHTVIVYDLGGGTFDVSVIEIAEVDGEHQFEVLATNGDTFLGGEDFDIRLIDYLVDEFKKESGMNLKGDPLAMQRLKEAAEKAKIELSSSQQTDVNLPYITADATGPKHLNVKISRAKLESLVEDLVQRTIEPCRIALKDAGIDVGSINDVILVGGQTRMPLVQKTVTDFFGKEARKDVNPDEAVAMGAAIQGAVLAGDVKDVLLLDVSPLTLGIETMGGVMTALIEKNTTIPTKKSQVFSTADDNQGAVTIHVLQGERKQAAQNKSLGKFDLADIPPAPRGVPQIEVTFDIDANGILHVGAKDKATGKTQSIVIKANSGLSDEEIQQMIRDAEANSEEDRKFEELATARNQGDALVHSTRKMVADAGDKVTAEEKTAIEAAVVALEAAVKGDDKAAIDAKVEELSKVSAPVAQKMYAEQAQPAEGAAPHAESAEKADDVVDAEFEEVKDHK

SEQ ID NO: 16178 - protein, 449 aa, Deinococcus radiodurans R1
MTSVSPTPDGILRQLQDAEVSFLRLQFTDILGHTKNVEVPRTQFAKALSGDVTFDGSAVQGFTRVEESDMLLSPDLSTFLVYPQFARDDRERGRVARLICDVTLPDGTPFEGDPRRVLRAQVERAQALGLEMYVGTEPEFFLFERGPNGAATTVTHDRAGYFDLAPIDRGERIRREIASRLVEMGFEIEASHHEVAPGQHEIDFRYAPALETADRIATFKFVVKRIALEHGLLASFLPKPIAGVSGSGMHCHLSLFKDGQNVFDDPGGEHGLSDTAHQFVAGLLDHAEGMTAITNPLVNSYKRLVPGFEAPVNIAWSTSNRSALVRIPAKRGPSTRAELRMPDPSCNPYLALAAMLAAGLDGIERQLEPPPAIQRNIFRMTVREKRHHRVKELPGDLREAVDELAKDEVIAAALGEHVMEHYVTAKRAEWREYSSAVHAWELERYLDLV

SEQ ID NO: 16179 - protein, 223 aa, Arabidopsis thaliana; identical to SEQ ID NO: 11320

SEQ ID NO: 16180 - protein, 516 aa, Oryza sativa Japonica Group
MGMEVAAARLGALYTTSDYASVVSINLFVALLCACIVLGHLLEENRWVNESITALIIGLCTGVVILLMTKGKSSHLFVFSEDLFFIYLLPPIIFNAGFCLLEFYSWSIYSAAIAIFSRMNIGTLDVGDFLAIGAIFSATDSVCTLQVLNQDETPFLYSLVFGEGVVNDATSIVLFNALQNFDLVHIDAAVVLKFLGNFFYLFLSSTFLGVFAGLLSAYIIKKLYIGRHSTDREVALMMLMAYLSYMLAELLDLSGILTVFFCGIVMSHYTWHNVTESSRVTTKHAFATLSFIAETFLFLYVGMDALDIEKWEFASDRPGKSIGISSILLGLVLIGRAAFVFPLSFLSNLTKKAPNEKITWRQQVVIWWAGLMRGAVSIALAYNKFTRSGHTQLHGNAIMITSTITVVLFSTMVFGMMTKPLIRLLLPASGHPVTSEPSSPKSLHSPLLTSMQGSDLESTTNIVRPSSLRMLLTKPTHTVHYYWRKFDDALMRPMFGGRGFVPFSPGSPTEQSHGGR

SEQ ID NO: 16181 - protein, 293 aa, Kluyveromyces lactis NRRL Y-1140
MSELTHPTIVDGWFREISDTMWPGQAMTLRVEKILHHEKSKYQDVLVFKSTDYGNVLVLDNAIQVTERDEFSYQEMIAHLALNSHPNPKKVLVIGGGDGGVLREIVKHDSVQEAWLCDIDEAVIRVSKEYLPEMAKSYSHPKVKTHIGDGFQFLRDYQNTFDVIITDSSDPEGPAASLFQQSYFELLNGALTEKGVISTQAESMWIHLPIIKELKKACKEVFPTVGYAYTTIPTYPTGQIGFMVCSKDANVDVTKPLRSISEEEEEAKYRYYNKKVHEASFVLPTWVAKELDL

SEQ ID NO: 16182 - protein, 344 aa, Vantanea guianensis; identical to SEQ ID NO: 9264

SEQ ID NO: 16183 - protein, 121 aa, Arabidopsis thaliana
  misc_feature (82)..(82): Xaa can be any naturally occurring amino acid
MESEGKIVFTEEQEALVVKSWSVMKKNSAELGLKLFIKIFEIAPTTKKMFSFLRDSPIPAEQNPKLKPHAMSVFVMCCESAXVQLRKTGKVTVRETTLKVAWGQAYDHLVAAIKAEMNLSN

SEQ ID NO: 16184 - protein, 181 aa, Xanthomonas campestris pv. campestris str. ATCC 33913
MSQSIHDIPVTDINGGATSLAAHRGKVLLVVNVASKCGLTPQYEGLEALYRDKQAQGLEVLGFPANDFNGQEPGSEAEIAQFCQLTYDVTFPLFSKIAVTGAEIHPLYQALTSAQPQATGDGPMREKLAGYGIAANPAPGVLWNFEKFLIGRDGQVIERFAPDVAADDVRLRQAVDAALAH

SEQ ID NO: 16185 - protein, 534 aa, Solanum lycopersicum
MGLDAVARLGVSILSDGDQVSVDSITLFVALLCGCIVIGHLLEESRWINDSITTLVIGLSTGGIILLTTKGKSSHLLEFDEQLFFIYVLPPIIFNAGFQVKKKQFFRNFVTIMLFGAVGTLISFSIISFGAKELLGKLDIGFLELRDYLAIGAIFSATDSVCTLQALNQDETPRLYSLVFGEGVVNDATSVVLFNAIQKLDLSHINSRAALVFTGNFLYLFLASTFLGVLIGLLSAYLIKKIYLGRHSTDREVALMILMAYLSYVMAELFDLSGILTVFICGIVMSHYTWHNVTFNSKVTTRHAFATLSFIAEIFIFLYVGMDALDIEKWRFVKDSPGKSVGVSAALLGLVLVGRACFVFPLSLFSNCLKRSEHDKFGLKLQVTIWWAGLMRGSVSMALAYNQFTRFGHTQQPGNAVMITSTITIVLFSTVVFGLITKPLVRFLLPSSQGFNNLISSEQSFARPLLTNEQELELEMGNVDPVRPSGLSILLKEPSYTIHNHWRRFDDAFMRPLFGGRGFVPDAPELSKGGCDQY

SEQ ID NO: 16186 - protein, 531 aa, Solanum lycopersicum
MEDHLQISPAGAKAIPGKEQQAAGYGILLQIMMLVLSFVIGHVLRRRHFYYIPEASASLLIGLIVGGLANVSDTETSIRAWFNFHEEFFFLFLLPPIIFQSGFSLSPKPFFSNFGAIITFAILGTFIASFVTGILVYLGGVTYLMYRLPFVECLMFGALISATDPVTVLSIFQELGTDVNLYALVFGESVLNDAMAISLYRTMSLVRSHMSTDQNYFMITIRFVETFMGSLSAGVGVGFVSALLFKYAGLDIDNLQNLESCLFVLFPYFSYMLAEGLGLSGIVSILFTGVVMKRYTYPNLSESSQRFVSAFFHLISSLAETFVFIYMGFDIAMEKHSWSHVGFIFFSILFIVIARAANVFGCAYLVNLVRPPHQKIPAKHQKALWYSGLRGAMAFALALQPVHDLPEGHGQAIFTATTAIVVLTVLIIGGSAGTMLEALEVVGDGQSGSMDETFEGNNGYIAPSYRDESYDGEPSSGNRFRMKLKEFHKSTTSFSALDKNYLTPFFTTQGGDEDEDEPIMHSSRRAGYDGH

SEQ ID NO: 16187 - protein, 555 aa, Mycobacterium abscessus
MIHAETAASYLSSRMPTWMLQPLCAQNTNVNVSLLAVLTAALVLAAISRRFGLATPLVLVVTGLAATAIPGLPSIEMDPDLVLFVILPPLLYTTALESSYVNLRKNVRAVASLAVLLPLVTTVAVGFVAFYAVPELPLAGAMVLGAIVAPPDAVSATAIGRRLGLPRNIMTLLGGESLLNDATALTAYRVAIAAAIGLGATVADGFRIFALAAVGGVFVGFVIGKLVNIIRCKLDDPLSESAIGLVVPFFAYLLAEEIHGSGVIAVVVAGLMLGHRSVHAGYATRLQDDAVWKAVQLLLESFAFLLIGLQLPKVVAGLRGLSFNTIVLSSVAVLTTVIVVRIVFVFAFAYLRPPGQRPSARGVFVVAWAGMRGVVSLAMAFAVPLSTVTGEPLPGHPHIVFLTFVVVVGTLLLHGLTLPWVIRVLGVQSDDERKDALAEAAAQDKAARAAADRLEELLDDNDGIEDTNVRSRAAEILRHWNTRRRNAAWERLGRSDEDAGESPMAAFRNLRLEMLETERAVFIAERDAGNIDDEVLRTVLRGLDLEEATMNQADR

SEQ ID NO: 16188 - protein, 634 aa, Ehrlichia canis str. Jake
MAVIGIDLGTTNSCVAVMEGGDAKAIENSEGARTTPSIVAFTDSERLVGDPAKRQATTNAKNTIYASKRLIGRRYQDVKDIKSSYEVVSAKNGDAWIKVLGKEYSPSQIGAFVLEKMKETAERHLGHKVEKAVITVPAYFNDAQRQATKDAGKIAGLDVIRIINEPTAAALAYGLNKSDKQKVIAVYDLGGGTFDVSILEIADGVFEVKATNGDTMLGGEDFDHAIMDYLMDDFKKTTGIDLHNDAMAVQRIKEASEKAKIELSNRMETDINLPFISSDSTGPKHLSLKLTRAKFENLVDDLIQRTIEPCKKALKDAGISADKIDEVVLVGGMTRVPKVIQKVKEFFGREPHKGVNPDEVVAIGAAIQGSILAGDVRDVLLLDVTPLSLGIETLGGVFTPLIERNTTIPTKKSQVFSTAEDGQTAVTIKVYQGERKMAADNKLLGQFSLEGIPSAPRGMPQIEVTFDIDANGIVHVSAKDKASGKEQAIKIQSSGGLSDDEIQRMIKEAEQKAGEDEKRKKFIELKNNGENLVHSTEKSLNEYGDKIPNSDRLEIENAIRDVRDALGNSDVESVDILQQKVDHLMKVSMKLGEALYGNANNTSSTESTTTNNNNEEDSKVVDSDYQEIDKKDGK

SEQ ID NO: 16189 - protein, 285 aa, Burkholderia vietnamiensis G4
MSTTLLFHPTPDAAYGFPNARRLAHVASPHQHIEVWDTPQLGRLFTLDGRPMTSVGDEYVYHECMTHPAALAHPCPKKALVLGGGDGGAARQLLKHACIERIVVAELDDEVVGMARRYLDDVHQGALDDPRVEVVIGDAAQFVASTVEHFDLVVFDLTPPDSPAAGLYTREFYARLKRILTPRAALSMHLGSPLFHAARIAALLDDLRASFAFVDPLSAHVPLYGSQWLMAIASDTLDAAALFAHDVDERLAARRVHGLRYYDARLHAALFALPRALRDTLGGRR

SEQ ID NO: 16190 - protein, 479 aa, Arabidopsis thaliana
  misc_feature (29)..(29): Xaa can be any naturally occurring amino acid
MSGVVRSSPGSSQPPPPPPHHPPSSPVPXFASTKPPFHPSDDYHRFNPSSLSNNNDRSFVHGCGVVDREEDAVVVRSPSRKRKATMDMVVAPSNNGFTSSGFTNIPSSPCQTPRKGGRVNIKSKAKGNKSTPQTPISTNAVRSFYEISFMSRVTSSPITLTPSGSCRYDSSLGLLTKKFVNLIKQAKDGMLDLNKAAETLEVQKRRIYDITNVLEGIDLIEKPFKNRILWKGVDACPGDEDADVSVLQLQAEIENLALEEQALDNQIRWLFVTEEDIKSLPGFQNQTLIAVKAPHGTTLEVPDPDEAADHPQRRYRIILRSTMGPIDVYLVSEFEGKFEDTNGSGAAPPACLPIASSSGSTGHHDIEALTVDNPETAIVSHDHPHPQPGDTSDLNYLQEQVGGMLKITPSDVENDESDYWLLSNAEISMTDIWKTDYINTQSLTLAKAGIDWDYGIADVSTPPPGMGEIAPTAVDSTPR

SEQ ID NO: 16191 - protein, 1132 aa, Mycoplasma gallisepticum R
MLRILRLTLYLLTFLGYNFKYYYFLCWDWMLNKILEYYFQDSELIRGKNLVNRKTVKLTYHQDNKLLVLSARINDEANVVNTKVTVNGSNEKLLNISCNCPSRLKYCRYVAATIYCAYVQLKTLFNKEQEANKKQEIILNNNKIQQTKISPKEKAYFSIEKIKKSFNTTKLSVFLNVDSYKFKLVNENHFLLKQEWMNGDEISFYVCYEKAKTPVKILKLKIDSDALNYQDYFMFWYLVYLANINNLDEETFLSEGSYLHSEFKLSNHGLYALNDLETFKKFLGKYDQSYQQAQLDDDLINEINTCFNECSFIVNSKKTENRILLTSERNDVYNFKIESFVDKKWSSYLSHYLTKDNKLVINSFNKILNQNNLNHELLNKVSIASKEFLDFYIYLTKMGFDNIYLDDQKKITKLVDYLPKAGLVLGFNEKKNGLTTSLVFNYKRDNENNIVYFEDQKLLKNKRLHLYEENTYDFFFKKVINKRLLTRLKKNTVDLNDLEELHELTNYFNNNDQFQIKVLEPYTKELKLKFEITDFKKIESHNDLIKITLSNFYYNFDFIKDIVANYLLAKELYITNDGYYCLNDPENSAFLEFWSKFDFYGVKKVNSKTIVVNKYRLLDLYNSFKPYLNYFKKIASKDILELIDALFNNTFKDELTIQEPFDQLLWPYQKEGHKWLRILQKFGFGGIMADDMGLGKTIQMISVISQFYKDHAHEIKQSLIVAPASLLLNWASEFKKFDPDLVVATISGNVDNRRAIINSRNHLVEITTYSAFKKDRAYHAKKDYAYIVLDEAQSIKNASSILSKDIKSLNGAHKVALTGTVVENRLAELWSIFDFVLPGFFGSITDFNLNYASQIERDEKINEVTLERLKKKIAPFILRRTKDKVLKDLPPKTQTDLLVGLSSDHMSFYRKREQEVKEEILKIIQNKEQSRKGLGIMLAKLLNELRQICCSPKLLNPSFEGENAKFVAAMDIINNAIKSNKKTLLFSQYLGVISLFKKELEQRNIKYFILTGDTPKEVRLQYVNDFNNAKEPAVFIASLKAGGVGLNLTGAEIVIHYDLWWNLALQNQATDRAHRIGQRNHLQVYRIIAADTIEERIVAIQERKKELAAKLIQETDNSLSWLNIKDILSLFN

SEQ ID NO: 16192 - protein, 386 aa, Aspergillus nidulans FGSC A4
MGKAIHFGGGNIGRGFVGEFLHEAGYEVVFVDVVDDLITSIQNTPSYEITEISEDGEKTKKITNYRALNSKSHEADVVQEIATADIVTCAVGPRVLQFIAPVIAKGLESRNVSTPLTVIACENAINATDTLRGHIEKKTKPEIISERAVFANCAIDRIVPNQPPNNGLNVRIEKYWEWVVEQTPFKEKGVAHPNVSAIHWVDKLDPYIERKLFTVNTGHATTAYYGHLAGKKTIADALHDPKIRENVHKVLDETASLIINKHGISEQEQKEYVDKIISRISNPYLEDGVERVGRAPLRKLSRNERFIGPASQLAERGLKFDALLGAIEQALRFQNVEGDEESKELAKILKEKTAEEATSELTELEKDHPLYSHVLERVRTVQQESK

SEQ ID NO: 16193 - protein, 184 aa, Blastopirellula marina DSM 3645
MMRVLFSGGVFAAVFALASFASAADTLLEGEVNSLSGEKVDLSKYKGKVVLVVNVASKCGKTPQYKPLQALYEKYHDEGLEVVGFPCNQFGGQEPGTALEIQEFCTDKYNVSFDMMEKINVNGPETAAVYKKLKSFQQDPGDVKWNFEKFLIDRDGKVVARFRTKIEPDSPEVVQAIESQLKKD

SEQ ID NO: 16194 - protein, 517 aa, Anabaena variabilis ATCC 29413
MNVTELIKISIILLLVATGVALLSRRLRVPYVTGLVLAGLPITELLSRPIGLDPALVLNLFLPILIFEAGINTDVSRLRSTFKPIALLAGPGAILSSAIIAILLKFGLGLSWIPAFLVGVILANTDTVSMIAVFKEIPVPSRLSTIVEGETLFNDAAALVSFNLILQVYSTGSLTLIEGIQQLLFISVGGCLVGLVLGYLSIPVFNRLDDPLSSLLLTVAVALGTFQVGQFLGVSGAVAVVVAGLIFGNFGLSGNTSASSRITLLSFWEYASFTANTFIFLLIGVEINLVTLWQTLPAILLAVLAYQVGRVLTIYPLLAGVRWFDRPIPLRWQHLLFLGNIKGSLSMALALSLPTTLPGRESLITIVFGCVLVSLVGQGLSLPLLVKRLKLSKFSHSQQQVEELQAQLITAKAAQDELDTLLKTGVLPKAVYEEMRSAYQVQVAGAEKTLREFYNRRSDDFDHKGGALGKLDAIRRRLLLAEKGALTEAMRKRILSQDIGQNRIQTIDEKLLQLDDD

SEQ ID NO: 16195 - protein, 230 aa, Torenia fournieri
MGRGKIEIKRIENSSNRQVTYSKRRNGIMKKAKEISVLCDARVSVIIFASSGKMQEYCSQSTTLVDMLDQYQKLSGKRIWDPKHEQLDNEINSVKKQNDNMQIELRHLKGEDITTLNYKDLMVIEEALENGMSALKAKQMEFVQMMRKHNEMMEEENQTLHFKLRQLHLDPMDDHNVMETQHNHHQQHQAGMYSNHHHEAAAAAGVSSYEAQMPFAFRVQPMQPNLQERF

SEQ ID NO: 16196 - protein, 171 aa, Arabidopsis thaliana
MADGPASPGGGSHESGEHSPRSNVREQDRYLPIANISRIMKKALPANGKIAKDAKETVQECVSEFISFITSEASDKCQREKRKTINGDDLLWAMATLGFEDYIDPLKIYLTRYREMEGDTKGSAKGGDSSSKKDVQPSPNAQLAHQGSFSQGVSYTISQGQHMMVPMQGPE

SEQ ID NO: 16197 - protein, 161 aa, Acidovorax sp. JS42
MTTAYDFDATCIDGAPQPLSDFRGQVLLIVNTASACGFTPQFTGLQALHERYGPRGLAVLGFPCNQFGHQDPGSNDAIAGFCQRNYGVQFPMMSKIDVNGSDAHPLYRWLTGEAPGVLGTKAIKWNFTKFLVGRDGQVIRRYAPQEAPEKLTVDIEAALAA

SEQ ID NO: 16198 - protein, 130 aa, Physcomitrella patens subsp. patens
MAEAGSPGSQDSPHSDEYGGNHGGGDRDNSSVREQDRFLPIANISRIMKKALPANAKIAKDAKETVQECVSEFISFITSEASDKCQREKRKTINGDDLLWAMSTLGFEDYVEPLKVYLHKYREVFSFLSI

SEQ ID NO: 16199 - protein, 1103 aa, Thauera sp. MZ1T
MNVVDLLLQQASSRPEALAVRHGDEVLGYGALGRRVCSVAAGLANAGVARGDVLALCLDDPLDHLVASLAVAHRGATVVSVPRTLPDALRGRLLALTRAGRALADDGRRTGADLGGLPVLAWSMLERSPPSMTPEPAREVADRPWIYVTGSGSTGRPKIMPVTHRQQCLRSRLGPSWLPYGAQDVLCSMVSMHFYSAKQRCLEAMAIGAGIFLDTPGRVDLRREVAEGEVTVIHAMVCHIETLLRRLPAEATGAFARLQALMVGGSTVSMALRDEIRRRLTPRIHVFYGTNESHTATLTRLDEVHRTSGGVGRPFPGIRIEVVDERGQPVPAGVDGRVRIASPMVIDGYLGDEEANRKAFAEGWFYPGDIGHLTADGQLVHRGRMDDMMIVGGVNLHPAEIEQCLRRHPGVADALATPLRHRVLQDVPVALVVPEAGTHPSAHELVAHVRAALGRHALHDVIWVDRIPRSEQGKVQREALEAVLERHDWAHEGGRAQGARRHWSRPRQLQTRFEIEFAPPIAPATNRLDAWMALLGEDAPLGTRPSEGCEDADTARYWLQQVLRLARLFLQLVRVPVFDVFELIDCAPVDEHRRRWRAAFLCPGPEFVSATACMEVVGIAFRIAQLAQGADPGSPQDRERVFVAIGDELLQPHGKLMPAGKSTLEVLRAAYRLDIPFRPLGRGVYQLGWGSRARRIERSTTDGDSVFGMRWTHDKWMASELLRAAGLPAPVNRLVMTAEEARAAARSLGYPVVVKPVDRDRGEGVSVDVGDDEGVARAYTTARECSPGKRVLVERQAPGVCHRIFVAAGRLLYAVRRLPAGVYGNGRTSIGGLVDAECARRMGLPPWKRAPLCALDDSALEMLARQGLGPEDVPGAGRFVALRRIETTASGGVDEEVTHALHPENVRAAIAAARLFGLEVAGVDMISPDITAPWHANGAILNEVNFAPLLGGGEISRRYVEEYLFRLVDGRGRIPVEVFVGGAAAWEAAAARWRTLLQAGMAAVLSSDVRTLGGDGQPFGLAVDGLHARVRALTLRAEVGALVLVVQTLELLRTGIPLDRVDRVVVIDGDIRTAGSPARQAADAEVAGLIALCRAWDASGTAS

SEQ ID NO: 16200 - protein, 594 aa, Thauera sp. MZ1T
MVELVRVGTRFTWLRGAAFGLQQGALAGELVLTDEGRAGIVEEMLAAFADEASTGGERAAGASGVECLIDCILRCVGALQRRAGVPVSWRSHRALIRTVADVRVFRVALPSDQPAATERALRWVVAEVNRRATGGQAGSKDGRSSQESLEELDRMLGAHAIPGINPINIALAAYRAGIPVGRLLHDVLVLGQGRKARWMRSTITDRTSGIGLGIARNKVHTAEVLRAAGLPVPQQVVVRSPEGAVEAARALGYPVVVKPADQEQGAGVQAGLSDDAMVRIAYDAASALSRTILVERHVEGYTHRLTVFQGRVVRVMRRVAGGVVGDGVSAVATLVERRLEDEIHRRRAQRAGAPLLSLDAEALDLLARRGMGPASVPAAGEYIRLRRRDNINAGGENRPCALGDVHPANLQLAVDAAMALRLDLAGVDLIIEDVSRSWLEAGGAICEVNGQPQMGGNSHAGVLDAVVRELVGGDGRIPVHLVVCPDREDWHAGLSARLLQHGEVDGVSSRHGLVLRGARVSMPFEDALAAAQALLCRADVGSAACLMSAPDILRLGLPSDVLDSLRVADETAMSAAERGALAAIRPMIEPHLRR

SEQ ID NO: 16201 - protein, 613 aa, Listeria monocytogenes
MSKIIGIDLGTTNSAVAVLEGGEAKIIPNPEGARTTPSVVGFKNGERQVGEVAKRAAITNPNTISSIKRHMGTNYKETIEGKDYSPQEISAIILQYLKSYAEDYLGETVDKAVITVPAYFNDAQRQATKDAGKIAGLEVERIINEPTAAALAYGMDKTETDQTILVFDLGGGTFDVSILELGDGVFEVHSTAGDNELGGDDFDKKIIDYLVAEFKKDNGIDLSQDKMALQRLKDAAEKAKKDLFGVTSTQISLPFITAGEAGPLHLEVTLTRAKFDELTHDLVERTIAPTRQALKDANLSASDIDQVILVGGSTRIPAVQETIKKELGKEPHKGVNPDEVVAMGAAIQGGVITGDVKDVVLLDVTPLSLGIETMGGVMTTLIERNTTIPTSKSQTFSTAADNQPAVDIHVLQGERPMAKDNKTLGRFQLADIPPAPRGIPQIEVSFDIDKNGIVTVRAKDLGTGKEQNIVIKSSSGLTDEEIEKMVQDAEANAEEDKKNKENAELRNNADQLVFTVDKTLKELEGKVEEEEVKKAEAARDELQEALKGEDFDAIKEKTESLNEIVQNLSVKLYEQAAAEQQAAGGAEGQEAPQNDDVVDAEFEEVNEDDKENK

SEQ ID NO: 16202 - protein, 519 aa, Mycobacterium avium subsp. paratuberculosis K-10
MIELTVAQIADIVGGTLADITAPDAARRRVTGTVEFDSRAVGPGGLFLALPGARTDGHDHAEAAVAAGAVAVLAARPVGVPAIVAPPVDAADALAGVLEHDADGSGAAVLAALAKLARAVAAELVAGGLTIVGITGSSGKTSTKDLVAAVLAPLGEVVAPPGSFNNELGHPWTVLRATADTDYLVLEMSARHPGNIAALAEIAPPAVGVVLNVGTAHLGEFGSREAIARTKSELPQAVPASGVVVLNVDDPTVAAMAEVTAARVVRVGRAEHTEAGPSDVWAGPVSLDELARPGFTLYHRHAGGTRQARVQLGVSGDHQVGNALCAAAVALECGATVEQVVAALAGAGPVSRHRMQVSTRGDGVTVIDDAYNANPDSMRAGLQALAWIARGGAEPGAPARRSWAVLGEMAELGDDAIAEHDRIGRLAVRLDVSRLVVVGTGRSVSAMHHGAVMEGSWGSADKGAVNVPDAEAALELLRAELQPGDVVLVKASNAAGLGALADALARDDREGDSAGGTRR

SEQ ID NO: 16203 - protein, 139 aa, Adiantum capillus-veneris; identical to SEQ ID NO: 939

SEQ ID NO: 16204 - protein, 178 aa, Isoetes sinensis
MQHDPGMDDFADRDRDHRDRGDRGRENCNVREQDRFMPIANVIRIMRKVLPMHAKISDDGKETIQECVSEFISFVTSEANDRCQREQRKTITAEDLLWAMSKLGFDDYVDPLTFYLHRYREVEGDHRGSVRGDSLPKKEMNLHGLQPMMVQPNMFGGLSYYKDESNAPFTHDSYTVHK

SEQ ID NO: 16205 - protein, 178 aa, Isoetes yunguiensis; identical to SEQ ID NO: 944

SEQ ID NO: 16206 - protein, 620 aa, Mycobacterium leprae TN
MARAVGIDLGTTNSVVSVLEGGDPVVVANSEGSRTTPSTVAFARNGEVLVGQPAKNQAVTNVDRTIRSVKRHMGSDWSIEIDGKKYTAQEISARVLMKLKRDAEAYLGEDITDAVITTPAYFNDAQRQATKEAGQIAGLNVLRIVNEPTAAALAYGLDKGEREQTILVFDLGGGTFDVSLLEIGEGVVEVRATSGDNHLGGDDWDDRIVNWLVDKFKGTSGIDLTKDKMAMQRLREAAEKAKIELSSSQSTSVNLPYITVDSDKNPLFLDEQLIRAEFQRITQDLLDRTRQPFQSVVKDAGISVSEIDHVVLVGGSTRMPAVTDLVKELTGGKEPNKGVNPDEVVAVGAALQAGVLKGEVKDVLLLDVTPLSLGIETKGGVMTKLIERNTTIPTKRSETFTTADDNQPSVQIQVYQGEREIASHNKLLGSFELTGIPPAPRGVPQIEVTFDIDANGIVHVTAKDKGTGKENTIKIQEGSGLSKEEIDRMVKDAEAHAEEDRKRREEADVRNQAETLVYQTEKFVKEQRETENGSRVPEDTLNKVEAAVAEAKTALGGTDISAIKSAMEKLGQDSQALGQAIYEATQAASKVGGEASAPGGSNSTDDVVDAEVVDDERESK

SEQ ID NO: 16207 - protein, 380 aa, Zea mays
MYGSPVSKDLNLPTQPPPMASSGLLRYRSAPSAVLGGLCEDQLQLPAAAPSAADNVFSRFLPDHHIRDDKPSPAHFPSAADMASHHQQEQMMFHSQSQSQHQQETGRSGGGLYRTVSSGMEAGGTGVGAASSLIRQSSSPAGFLDHFGMDNGYGAMLRASMGMGFQDGGASDSLAGGGGGSGRLGGQLSFSSRQGSLMSQISEMDSQEDVVGASSPDAGGGGDAAYMPGYPMSSGGWDDSSSALLPDSLPATNKRPRDSLEHGGGLAHQFSLPKTSSSEVAAIEKFLQFQDAVPCKVRAKRGCATHPRSIAERVRRTKISERIRKLQELVPDMDKQTNTSDMLDLAVDYIKDLQKQVKALNESRASCTCPASKHQQRFSG

SEQ ID NO: 16208 - protein, 162 aa, Leifsonia xyli subsp. xyli str. CTCB07
MSLMDIPFRTIDGEPTSLAAFAGKVILVVNVASRCGLAPQYEKLEGLQKTYGDRGFTVIGFPSNQFLQELNSTDAIKEYCSTTWGVTFPMMEKVKLNGRSAHPLYAELTTYPDAAGKAGKVKWNFEKFMITPGGAVHRFRPTTEPDAPEIIGLIEQALPTAV

SEQ ID NO: 16209 - protein, 286 aa, Pseudomonas aeruginosa PAO1
MSDYQETLYQGYGQRFSIDNMLHEVRTEHQHLVIFENARMGRVMALDGVIQTTEADEFIYHEMLTHVPILAHGAARRVLIIGGGDGGMLREVAKHKSVERITMVEIDGTVVDMCKEFLPNHSQGAFDDPRLNLVIDDGMRFVATTEERFDVIISDSTDPIGPGEVLFSENFYQACRRCLNEGGILVTQNGTPFMQLEEVRTTAARTDGLFADWHFYQAAVPTYIGGAMTFAWGSTHEGLRRLPLETLRQRFRDSGIATRYYNADIHLGAFALPQYVLQAIGKQDND

SEQ ID NO: 16210 - protein, 445 aa, Legionella pneumophila subsp. pneumophila str. Philadelphia 1
MVIKKLFSSTLALVYALTLMLPLTAFSAEETNSNYSNTKRIPLEDVQRFSNAIGEIKKYYVKPVDDKELFDNAIRGMLTGLDPHSSYLNEEEFKELQTSTSGEFGGLGIEVTMEEGVVKVITPLVDTPAFKAGIKSGDYIIKLGKESVQGLSLKDAVNLMRGKPGTTIELTILRKGVNKPLTFDLIREVIQIKSVKSKMLSEGYGYIRLTQFQALTGKDMIKAIEQLKQQAGGKLKGLVLDLRNNPGGLLDSAIQVSDAFLGNDKAGKQEMIVYTEGRLPGSKFTALANPGDVLDNAPIVVLINNGSASASEIVAGALKDNKRAIILGTKSFGKGSVQTVLPLDGKTGIKLTTALYYTPSGVSIQAKGIIPDIIVEEVDVPKNAVKKDTLAGFTEADLNGHLINKDNSENTESKNNQIQTGDLIHEDYQLYAALTVLEGMALANR

SEQ ID NO: 16211 - protein, 688 aa, Ustilago maydis 521
MVASTRVLPEGAGWAVVCGLGFFFAAFMIVLSFIQQRYTNRSIKDTDEFASASRSVKPGLVAAGICSAWTWSSTLLQSTAVTYRLGVSGGYWYAGGATIQILLCSIMACMIKLNAPFCSTFLEVLRVRWGKTLHCVFLFFALATNLLVSSQLVVGGSAVAGTLTGIPVLAAIWLIPLGVACYVLVGGMRATLLADYTHTVGLLIIIFFFFFKVWVTSPEIGSVSKMVTLLQASNDIPHNASSSPLTFLSQSGLVFGIINVIGNLGTVFCDQSYHQRSIASNPATAARAFLLGGSAWFAIPFLFSMTMGLSARALMYSGNPLMPLLTEADVTAGLAAPASGVALAGKGGAVAVLIILFLAVTSASSAQQVAVASVLTFDVYKPYIRPEATKREIFLMSHAGVIIWALVMSLFGTIFHYAGISLGWLYLAQGIIIAPAVVPIFCGLVWKRTNKTACLVGMIVGVISGVITWIVTAATLEGEVTVASTGKDYPTLAGNVVSLFMSAIITLIGSLMRPETEDHFVLTRAINAPEDVVERMNANSKRSSSGSPASPSTPFEEKTAFDSEKTAPSVGAVPYTTETIDYVKAAGLDANELRKTLRLTSWISVIASFVLCVLIPACLASRRVWNATGLAAYIWIGFIWLVWTTLAVGVLPIWESRHELAAILRGIGKDLSGKNGKYEETSEKAALS

SEQ ID NO: 16212 - protein, 127 aa, Glycine max
  misc_feature (111)..(111): Xaa can be any naturally occurring amino acid
PTGKIPKKAKDPMQECVSEFTSFPTSEASEKAPKEKRKPTNGADLLWAMAPLGFEGYIEPLKVDPARYRKAEGDPKGSARSGDGSATPDQVGPAGQNFQLVHQGSLNQNGXQGQPQHLVMPSMQSHE

SEQ ID NO: 16213 - protein, 268 aa, Ashbya gossypii ATCC 10895; identical to SEQ ID NO: 953

SEQ ID NO: 16214 - protein, 183 aa, Alteromonadales bacterium TW-7
MDSIYQFNAPLYNSENFSLSELKGKTVLIVNTASKCSFSMQLNALEKLYQEYKDRGLTVLAFPCNQFGQNEPLDNLAIRDFYQMQFGVSFKVFGKVMVNGPDAHPLFSYLKCHTRGISQNRAVKWNFTKFLINSQGQLVARYAPRTKPETLKQVIETHLQKAVESSEIKATPIMSALNRRTAL

SEQ ID NO: 16215 - protein, 638 aa, Pseudomonas fluorescens PfO-1
MGKIIGIDLGTTNSCVSVLENGKAKVIENAEGARTTPSIIAYANDGEILVGQSAKRQAVTNPHNTLFAVKRLIGRRFEEEVVQKDIKLVPYKIVKANNGDAWVEASGKQMAPPQISAEVLKKMKKTAEDYLGEAVTEAVITVPAYFNDSQRQATKDAGRIAGLDVKRIINEPTAAALAYGMDKAKGDHTVIVYDLGGGTFDVSVIEIAEVDGEHQFEVLATNGDTFLGGEDFDMRLIDYLVDEFKKESGMDLKNDPLALQRLKEAAEKAKIELSSSQSTDVNLPYITADATGPKHLNVKISRAKLESLVEDLVTRTIEPCRIALKDAGIDASKIDDVILVGGQTRMPMVQKAVSDFFGKEARKDVNPDEAVAMGAAIQGAVLAGDVKDVLLLDVSPLTLGIETMGGVMTALIEKNTTIPTKKSQVFSTADDNQGAVTIHVLQGERKQAAQNKSLGKFDLADIPPAPRGVPQIEVTFDIDANGILHVGAKDKATGKEQKITIKANSGLSDEEIQKMVRDAELNAEEDRKFEELAAARNQGDALVHSTRKMIADAGDKVTAEEKTAIEAAVVALEAAVKGDDKAAIDAKVEELSKVSAPVAQKMYAEQAQPAEGAAPHDEKAEKADDVVDAEFEEVKDHK

SEQ ID NO: 16216 - protein, 621 aa, Mycobacterium leprae
MARAVGIDLGTTNSVVSVLEGGDPVVVANSEGSRTTPSTVAFARNGEVLVGQPAKNQAVTNVDRTIRSVKRHMGSDWSIEIDGKKYTAQEISARVLMKLKRDAEAYLGEDITDAVITTPAYFNDAQRQATKEAGQIAGLNVLRIVNEPTAAALAYGLDKGEREQTILVFDLGGGTFDVSLLEIGEGVVEVRATSGDNHLGGDDWDDRIVNWLVDKFKGTSGIDLTKDKMAMQRLREAAEKAKIELSSSQSTSVNLPYITVDSDKNPLFLDEQLIRAEFQRITQDLLDRTRQPFQSVVKDAGISVSEIDHVVLVGGSTRMPAVTDLVKELTGGKEPNKGVNPDEVVAVGAALQAGVLKGEVKDVLLLDVTPPLSLGIETKGGVMTKLIERNTTIPTKRSETFTTADDNQPSVQIQVYQGEREIASHNKLLGSFELTGIPPAPRGVPQIEVTFDIDANGIVHVTAKDKGTGKENTIKIQEGSGLSKEEIDRMVKDAEAHAEEDRKRREEADVRNQAETLVYQTEKFVKEQRETENGSRVPEDTLNKVEAAVAEAKTALGGTDISAIKSAMEKLGQDSQALGQAIYEATQAASKVGGEASAPGGSNSTDDVLTRRWSTTNGSPK

SEQ ID NO: 16217 - protein, 607 aa, Lactococcus lactis subsp. lactis Il1403
MSKIIGIDLGTTNSAVAVLEGTESKIIPNPEGNRTTPSVVAFKNGEIIVGDAAKRQAVTNPETIISIKSKMGTSEKVSANGKEYTPQEISAMILQNLKATAEAYLGEKVEKAVITVPAYFNDAQRQATKDAGKIAGLEVERIVNEPTAAALAYGLDKTDKDEKILVFDLGGGTFDVSILELGDGVFDVLATAGNNKLGGDDFDQKIIDWMVAEFKKENGIDLAQDKMALQRLKDAAEKAKKDLSGVTTTQISLPFITAGAAGPLHLEMALTRAKFDELTHDLVEATRQPVRQALSDAGLSTSDIDEVLLVGGSTRIPAVVELVRHETNKEPNKSVNPDEVVAMGAAIQGGVITGDVKDVVLLDVTPLSLGIETMGGVFTKLIDRNTTIPTSKSQVFSTAADNQPAVDIHVLQGERPMAADNKTLGRFQLTDIPAAPRGIPQIEVTFDIDKNGIVSVKAKDLGTQKEQTIVIKSNSGLSDEEIDKMMKDAEANADADAKRKEEVDTRNEADALVFQTEKTLKDLEGKVEEAEVKKAEEAKEELKKALEGEDIDDIKAKSEALSEIAQNLAVKLYEQANAAQGEAGQATDAQEAPKDDNTFDGDFEESK

SEQ ID NO: 16218 - protein, 161 aa, Cichorium intybus x Cichorium endivia
MGFSEKQEALVKESWEVMKQDIPALSLYLYAMILEIAPEARGLFSFLKDTNVIPQNNPKLKSHAVKVFKMVCESAIQLREKGEVVVSGSTLKYLGSVHLEKGIVDPQFEVVKEALIRTVAKAMGEKCSEEMKSAWSEAYDELADAIKTEMKKEAAETQTHI

SEQ ID NO: 16219 - protein, 447 aa, Lactobacillus reuteri
MGKHVFTKDEVRQMVKDEDIHFLRVMFTDLLGTIKSVDLPVSQLDKLMDNKIMFDGSSIDGFVRIEESDMYLYPDMSTWLAFPWGAEHGKVARVICSVYKTDGTPFEGDPRNNLKRVLEGMRKMGFKDFNIGPEPEFFLFKTDEKGNPTTNLNDKENYFDMEPADPGEDCRRDIVLALEKMGFDVEAAHHEVAPGQHEVDFKYSDALEAADNIQTFKFVVKTIAKKYGFHATFMPKPLSGINGSGMHLNMSLFSQDGTNAFFDENDKDKLSATAYHFLGGLMKHARSYTAICNPIVNSYKRLVPGYEAPVYVAWSTSNRSPLVRIPSDRGMGTRLELRSADPSANPYLAIAAVLEAGLDGLRNNLPPIHNVDENIYTMTKAERAEKDIHDLPDTLHNALKSLANDEVIKSSMGEHLYNSFMEAKTREYASYRQHVSDWERQHYMEQY

SEQ ID NO: 16220 - protein, 444 aa, uncultured archaeon GZfos23H7
MEKEAKTKEGVFEAVEKQEVKFVRLWFTDILGQLKSFAITPKELEGAFDEGMGFDGSSIKGFARIDESDMVAKPDPATFQIVPWRPKEHAVARMFCDILQPDGSPYEGDPRYVLKRNLEQLEEEGYTFYIGPELEFFYLEDDKDPEVLDEGGYFDLTTLDAASDLRRDTILTLEEMGIEVEYSHHEVAPSQHEIDLRYKDALTMADQVMTHRIVVKEIAHQYGCYATFMPKPIFGVNGSGMHVHQSLFKGDRNAFFDLNNEYHLSEKGRGYIAGLLRHAPEITSVANQWVNSYKRLVPGYEAPVYISWARRNRSTLVRVPMYKPGKEKATRVEFRSPDPACNPYLAFSVMLAAGLAGIKNKYELPPPTEKDVYTMSKEEKEKEGITSLPGSLIEAISLTENSELMREALGDHVFNNFITSKKVEWDRYRVNVTEWELKEYLGVL

SEQ ID NO: 16221 - protein, 597 aa, Yarrowia lipolytica CLIB122
MTQIIHNATIPNIPVDQLYDGKITDFIRSGGHSNETKPSVIDAKTGQTLSQAEMWQLSDKYAALLSSQYGLCRHRDNELDPSMGDVLITFFGNVILAPVVHWAALDLGATISPGSTGYSAQDLAHQFRVTTPKVVVYAKAFKDVVDEATKLYNSPNPPALVELEALDKQARMVGNHKVEHTRKIKLAPHESRTRIAYLGMSSGTSGGVSKAVRLTHSNLTSCSEISNKASESLATDQQIAAAIIPVSHLFGLSKFLIGNPHAGATTVYHNGFDLIEVLEAQKKYKVNSWTLVPPIIVLLTKHPIVEKYIPSLRAHMRAILSGAAPLGANVTEALLTRVTGNKFGESPEGGLRIVQGYGLTETSPVATLFDPEDKERHIRSCGKLVPNSQVRIVNEDGVDQPAYDVDPNELDEAIKQGTLPVGELWIRGPQVMDGYHNNPEANEACFVKADDAEADTAYYNRHWFRTGDVALVDKQGRYMIVDRTKEMIKSQGKQVAPAELEDMLLGHAQVADTAVIGIQDVEKGNEAPRAFVVLKDPKYDAVEIKTWLDKQLPKYKQLHAGIVVIDAIPKNASGKILRRLLRARKDDVVLGLNKAKL

SEQ ID NO: 16222 - protein, 495 aa, Salmonella enterica subsp. enterica serovar Typhi str. CT18
MADRNLRDLLAPWVAGLPARELREMTLDSRVAAAGDLFVAVVGHQADGRRYIPQAIAQGVAAIIAEAKDEASDGEIREMHGVPVVYLSQLNERLSALAGRFYHEPSENMRLVAVTGTNGKTTTTQLLAQWSQLLGETSAVMGTVGNGLLGKVIPTENTTGSAVDVQHVLASLVAQGATFGAMEVSSHGLVQHRVAALKFAASVFTNLSRDHLDYHGDMAHYEAAKWMLYSTHHHGQAIVNADDEVGRRWLASLPDAVAVSMEGHINPNCHGRWLKAEAVEYHDRGVTIRFASSWGEGEIESCLMGAFNVSNLLLALATLLALGYPLTDLLKTAARLQPVCGRMEVFTAPGKPTVVVDYAHTPDALEKALQAARLHCAGKLWCVFGCGGDRDKGKRPLMGAIAEEFADIVVVTDDNPRTEEPRAIINDILAGMLDAGQVRVMEGRAEAVTNAIMQAKDNDVVLIAGKGHEDYQIVGTQRLDYSDRVTAARLLGVIA

SEQ ID NO: 16223 - protein, 678 aa, Physcomitrella patens subsp. patens
MAPCNFAAITAGAEYYFNDPLTGECTRQSSYFGGKAFLSQGVGYAVVLGFGALFAVVTSFLVWLEQRFVYSKHNSEWFNTAGRNIKTGLIASVIVSQWTWAATILQSSNVAWQYGVSGPFWYASGATVQVLLFGVLAIEIKRKAPAAHTICEIVRARWGKTAHIVFLCFCFATNIIVTAMLLLGGSAVVNALTGMNLYAASFLIPLGVVVYTLHGGLKATFLASYLHSVVVHVVLVVFVFLVYVKSDKLGTPKEVYNRLYSVSHDRDCTPPLNFDSQACGPVAGNNGGSYLTMLSTGGLVFGIINIVGNFGTVFVDNGYWMSAIAARPTSTHKGYLLGGLVWFAVPFSLATSLGLGSLALGLPLTADEANHGLVPPATATALMGKSGAVLLLTMLFMAVTSAGSSELIAFSSLCTYDIYRTYINPKANGKQILWVSRLLVLLFGCFMGVLAIVLNKAGVSLGWMYLAMGVFIGSAVIPVAFLLLWRKANAKGAIAGSVIGMLAGVITWLTVTEVMYKRVNLDTTGRNAPMLAGNLVSILTGGAVHAIFSVISPQNYDWSTTKHITMVEQDASDVPEEEYNEEKLKKARSWIIRWGIGFTILIVIIWPLMALPAKVFSEGYFTFWAAIAIIWGTVGSAVIIIMPIVESWETIYLIILGMICRSPAKVPKHISDEKTTAG

SEQ ID NO: 16224 - protein, 862 aa, Arabidopsis thaliana; identical to SEQ ID NO: 10659

SEQ ID NO: 16225 - protein, 860 aa, Arabidopsis thaliana
MEAKPLASSSSEPNMISPSSNIKPKLKDEDYMELVCENGQILAKIRRPKNNGSFQKQRRQSLLDLYETEYSEGFKKNIKILGDTQVVPVSQSKPQQDKETNEQMNNNKKKLKSSKIEFERNVSKSNKCVESSTLIDVSAKGPKNVEVTTAPPDEQSAAVGRSTELYFASSSKFSRGTSRDLSCCSLKRKYGDIEEEESTYLSNNSDDESDDAKTQVHARTRKPVTKRKRSTEVHKLYERKRRDEFNKKMRALQDLLPNCYKDDKASLLDEAIKYMRTLQLQVQMMSMGNGLIRPPTMLPMGHYSPMGLGMHMGAAATPTSIPQFLPMNVQATGFPGMNNAPPQMLSFLNHPSGLIPNTPIFSPLENCSQPFVVPSCVSQTQATSFTQFPKSASASNLEDAMQYRGSNGETFLYWNGTEPRICISDPELAKTMLSNKLGFFVKSKARPEAVKLVGSKGLVFIEGADWVRHRRILNPAFSIDRLKIMTTVMVDCTLKMLEEWRKESTKEETEHPKIKKEMNEEFQRLTADIIATSAFGSSYVEGIEVFRSQMELKRCYTTSLNQVSIPGTQYLPTPSNIRVWKLERKMDNSIKRIISSRLQSKSDYGDDLLGILLKAYNTEGKERKMSIEEIIHECRTFFFGGHETTSNLLAWTTMLLSLHQDWQEKLREEIFKECGKEKTPDSETFSKLKLVMFIFFKGSLVRQCFLRLKKPVYFLQMNMVIMESLRLYGPVSALAREASVNIKLGDLEIPKGTTVVIPLLKMHSDKTLWGSDADKFNPMRFANGVSRAANHPNALLAFSVGPRACIGQNFVMIEAKTVLTMILQRFRFISLCDEYKHTPVDNVTIQPQYGLPVMLQPLED

SEQ ID NO: 16226 - protein, 285 aa, Glycine max
LFTLLMFLGGEVFTSMLDLLFAGYKLQNKVSINPFPPTNHANQIELGLVLSIPHSDSENNNPCDSNIINVASCDRLKYNCLSYLTYAVLGYLVMVQFVGFSFVSLYMTLVPSARQVLKNKGIKIVTFSLFTVVSTFASCGFVPTNENMLVFKKNSGLLLLILPHVFLGNALYPPCLRLLIMVLKKVTKKEEFSYLLKNSIDVGYEHLLSDLRCCFLVATVLGFNLIQFVMLCSLEWKTKIMEGLNVYEKVVASLFQVTNARHAGESVFDLSSISSAILVLFVVMM

SEQ ID NO: 16227 - protein, 748 aa, Filobasidiella neoformans
VSQSHPNIVDGWFREINTQWPGQAMTLKVKQILHQEKSLFQDVLVFESETYGNVLVLDGVIQATERDEFSYQEMITHLPMASHPNPENVLVIGGGDGGVIREVLKHKSVKKVTLCDIDEAVIRVSKQWLPLMSDCYKDSRVEVHIGDGFKFLPEHKNEYDVIITDSSDPVGPAEALFQPPYFQLLKEALKEGGSVSTQAECLWVHLPLIKTLKETCSKLFPVVKYGFTTIPTYPAGQIGIMVCSKDSTRDLTVPLRAVPTPRYYNSEVHRAAFTIPEFGRAMLEDGVNVLPKFSGARPTPTTTKKKVLLLGSGLVAGPAADYIARHNHELTIACRTLASAQDLASGLPNATPMSVDVSSADALRQAIKGHDVVVSLIPYTYHAQVMEAALEEKVHVVTTSYVNPQMRALEQKFKDAGLICFNEIGVDPGVDHLWAIKVFDEVKKAGGKIKSFYSFCGGLVEPAAADNALGYKFSWSPVGVLMALNNDGKYLKDGKVVEVAGKDLMSTAKPYYFTPAYNLVAYPNRDSTVFREFYGLEGVQNLCRGTMRYAGFCEVITAWKEIGLMSDAQVDYLAQGAAPITWIKVVSQLLGVEAKEAAVIEKLKTLKSFETESRVLITKFRDLGLFSEEQVAQRGSVMRALSALLEEKCAFKEGEVDLVLLQHTFEIINADGSEQTITSSLEAYGDRNGGPSAMAKLVGVPCGMAVQFILEGVLNKPGVFAPYDEETCKLFRERLEKEEGITMVEKLV

SEQ ID NO: 16228 - protein, 704 aa, Pseudomonas putida KT2440
MRDQLPPRRISMKHFLPSTALAVMIGLGSLTLGGNAAAANKWDSLQPDRDEIVASLNVVELLKRHHYSKPPLDDARSVIIYDSYIKLLDPARSYFTAADIAEFDKWKTQFDDFLKSGNLDPGFTIYKRYLDRVKQRLDFALAELNKGVDKIDFTTKETLLIDRKDAPWMKNQAELDDLWRKRVKDEVLRQKIAGKEPKQIQETLIKRYKNQLTRLDQTRAEDIFQAYINTFAQSYDPHTNYLSPDNAENFDINMSLSLEGIGAVLQSDNDQVKIVRLVPAGPAAKTKQVAPADKIIGVAQGNKEMVDVVGWRLDEVVKLIRGPKGSVVRLEIIPASNAPSDQTSKIVSITREAVKLEEQAAKKSVLKLKQDGRDYKLGIIEIPAFYLDFKAYRAGDPEYKSTTRDVKKLLTELQKEKVDGVVIDLRNNGGGSLQEATELTSLFIEKGPTVLVRNSDGRVDVLEDENPGAFYKGPLALLVNRLSASASEIFAGAMQDYHRALIIGGQTFGKGTVQTIQPLNHGELKLTLAKFYRVSGQSTQHQGVLPDIDYPSIIDTKEIGESALPEAMPWDTIRPVVKPAADPFRPFLAQLKAQHEARSDKDAEFTYIRDRLALTQKLMNEKTVSLNEQERRARHDSIESKQLALENTRRKAKGEEPLKELKKEDEDALPVEDENTKPEDDAYLAETGRILIDYLSASTKVAKK

SEQ ID NO: 16229 - protein, 1437 aa, Physcomitrella patens subsp. patens
EDGDAEESSSADEGKDAEYEDGDDSSLSDDDSSLNVEVTYTDEDIQNLLDDFFQAEHEAIEAQEKLEDESLEAMRKEVSSELAETKSGPELEAAIEEEMETYIEICKDQLAELEDQIALLQEKLEDAGQDLPQLYKLLEKQLPELCTTETWRKRTHWVGLAPTPEAFEVVQKAELDLKEKRPVRRHHGRIQDEGASGFLVKKVESKTESDVAPEDAWSLYDVLDKEEDNPGPGSLMGTAKWASVYLASTPEQAALMGLALPGADTVEEIGDLDENKSKLFREALANEGQQSSAGPQKIIVKKVREADDVKKTKKLQRKQPPRRPRKRLIQQQKKVEGVIPAGVLSRGQNGSLPEELIPGVTEKSHQGLNSEFEVGLQGEENYSESGLLKPNTRRRQSTGKYYSDAEPRNFSCTACGMLLRNRDVMKHPTLDVGICRKCKNFLFSGPFNKDQDGHEDECRWCGQGGDVLCCESCDKVFCCPCIKRNLGEEGLDQIVNSSDWKCFFCNKQPLHNLRQQYQAVKDALKTQLLLQDSEDGLWNDKITSNKKRRRNIRSVPDDRELDEKTKHLLALEKERQDLLESWRAKAKVNGKGPPVKSNRQNRHMHISDELLDMDIDDIAEEGFILNKARADNEEPVRISPHISAVLRPHQLAGMRFMWENCIESVSKVKSGVDGLGCILAHSMGLGKTLQVIGFVHTVLKKVDLGLKTVLIVVPVNVLHNWRSEFHKWQPGNEAPVPVYMLEDVARDNVNRARLLGKWQRCGGVMLIGYTAFRNLSIGKTVKDKIVRDNLCTSLQDPGPDILVCDEAHMIKNRKADITQALRQVRTHRRIALTGSPLQNNLLEYYCMVDFVREGFLGPALEFKRRFQNPIENGQRADSTSKDVKLMKHRAHVLHKQLMGFVQRKTMSVLKDELPSKCVYVISVRLSPLQRALYLKYLQINGFLNSGLNEKQGRRSILFEAYHTLAKIWNHPDLLILAQEEKNLRKEDNLENFIVDIDDDVPEVPEVPEVVDAGHSVYDGVIVINDDNGDDETAKGWWKDLIDGQQREVLELSGKMVILMKILSLSSVKSDKALVFSQSLHTLDLIEVFLANMPCLNGWKGNWVKNRDWYRLDGQTSAKSRQELVERFNDPDNTSVQCVLISTRAGSLGINLPAANRVIIFDGSWNPTHDLQALFRAWRFGQKKNVYAYRLLASGTMEEKIYNRQVAKEGLAARVLDEHQVGRYFVEDDLDFFFVLDQDDYPEMEDSAYTDPKQQDIQVVQSMDQPSTSTALVPAEKMASAPPPGKPRRAAFSVPDDAPPRDDIMGKLLLEYRPQYHEHEPLLEDLEDEKLSKEEQTMAWESFQHEESVPRSLASSTPSVTSMPFQPTNVASTYSFSSVQSNPLSQPHLVAQNYVPAHVGSVPCTNKTHAIQLRDEKISLGNSTVCKNCHEKIDWESI

SEQ ID NO: 16230 - protein, 664 aa, Thauera sp. MZ1T
MTGQERQGRLFGSGPCRLVPGHVRGRRQPCMLVSVLADADAMGALDSADPGPVWQVVGQAWRKALGEDLPWPTEPPTPAAWRVWAALLGACAVALLQRAGLAVFEAAEVLQLPRRETGPAARTTLLLPVMPGRADATRQAWSLVLELFEGAFEVADPMRLERMEERLRAGLASLGRQAPRGGNTPRFLRAAHELGIPVMALAFEGFQYGHGRRAQWLESTLTLQTPGLAVALARDKLAAAARLRQAGLPVPVHQAVLDADEAVRVARRLGFPVVVKPVDRDGGVGVSTGLETEEEVRAAYARASAVSPRVLIEKHVFGRDYRLTVLDGRLLWAIERIPAGVTGDGVSTVEELVARENRDPRRGEGPHAALKRLSLDDEARRLLAAQTLAADAVPARGREVRLRRIANVNGGGRPVAVNERVHPYNAALAVRAVEALRLDLAGVDVLMPDIARSWLETGAAICEINAQPQLGATTAPHLYGEILRRRLGGDGRIPIVVVLGDAGSPPLSEVLVMQLRQRGWAVGWCDRRGAGIDDEWLVRGGGMFASGQMLLTHPRVDALVLAIHDDEILQTGLPMDRFQWLVLAGTAVSPRVACGPGAGTPGRGSEALLDELLASLVPACSNRVLVVAGSGYSGVGPAQGGKGAGAFEEIGRAELSVALEQFPA

SEQ ID NO: 16231 - protein, 200 aa, Selaginella sinensis
MMMMMADAGSPNSQDSSRNSDSEMPGSERDSVMSSCSVREQDRFMPIANVIRIMRKVLPAHAKISDDAKETIQECVSEFISFITSEANDKCQREQRKTITAEDVLWAMSKLGFDDYVDPLTLFLHKYREVEGDHRGSIRGEPLLPKKPPSSSSSGTTSTPITTTTTSDHQHSIHPYGAYYKDSLTGATLPFVPDPYAAYK

SEQ ID NO: 16232 - protein, 1087 aa, Oryza sativa Japonica Group
MAASVEAAAAAVVAPPASVGGDEVVVGGGGGGASEQARTLIGALNLLSRNLPLPPAVLHAVSSIYHGGDAWEGEGEEGGEEEVAAAAAAFGDGCGESGEGEEDRADASPGADEGCSFKAPYCHCDDWGVTLIQELEDAVLKNQGPYMSYSELTALKEDRFNTSIQHRLTELEGLPSTRGEDLQMKCLLELYGLKLLDLQKKVRTDISAEYWLHKKCAHPDRQLFDWGMMRIRYPFTMYGIGDSFSMDADDINRKKRFSEDSLFGIWEQQRISRLEEEEKNQAEIRKRKFFSEILNAAREYQLQVPASYKRKKQRNDGVLAWHVRARQRINRMEKSRLQVLKAGDQEAYLRMVEESKNERLKLLLGKTNELLEGIGKAVQRQKDAEHVSRPDGSELPKGSESDDCSQISGLKVESPDEESPSDVDADHHSSADHSKFNAGHRLDSTVHSIEEKVTEQPSALEGGELRPYQLEGLQWMLSLFNNNLNGILADEMGLGKTIQTIALIAYLLEKKEVTGPHLIIAPKAVLPNWSNEFKTWAPSIGTILYDGRPDDRKALREKNFGQRQFNVLLTHYDLILKDLKFLKKNFEEWFNAPFACEVSLNDEEQLLIIHRLHQVLRPFLLRRKKDEVEKYLPVKTQVILKCDMSAWQKAYYEQVTSNGRVSLGSGLKSKALQNLSMQLRKCCNHPYLFVEHYNMYQRQEIVRSSGKFELLDRLLPKLQRAGHRVLLFSQMTKLLDILEVYLQMYQFKYMRLDGSTKTEERGRLLADFNKKDSEYFLFLLSTRAGGLGLNLQTADTVIIFDSDWNPQMDQQAEDRAHRIGQKNEVRVFVLVSVGSIEEEILDRAKQKMGIDAKVIQAGLFNTTSTAQDRRALLQEILRRGTSSLGTDIPSEREINRLAARNDEEFWLFEKMDEERRQRENYKPRLMEGIEVPDWVFANDTLTEKIPADEPQNVLLTTKRRRKEVVYSDSFGDQWMKADDVVEETPRMAPRAKRSAYSSDVQEVDFSERRKRHKSLVNIADDASIPMWTPEKVRAGVSSYSKDENEDDAEDESTTSVLQGGSFTWKTLRRKRSSHFSNSSDSKGRSAF

SEQ ID NO: 16233 - protein, 607 aa, Streptococcus thermophilus CNRZ1066
MSKIIGIDLGTTNSAVAVLEGTEPKIIANPEGNRTTPSVVSFKNGEIIVGDAAKRQAVTNPDTVISIKSKMGTSEKVSANGKEYTPQEISAMILQYLKGYAEEYLGEKVTKAVITVPAYFNDAQRQATKDAGKIAGLEVERIVNEPTAAALAYGLDKTDKEEKILVFDLGGGTFDVSILELGDGVFDVLATAGDNKLGGDDFDQKIIDYMVEEFKKENGIDLSTDKMALQRLKDAAEKAKKDLSGVTSTQISLPFITAGEAGPLHLEMTLTRAKFDDLTRDLVERTKTPVRQALSDAGLSLSDIDEVILVGGSTRIPAVVEAVKAETGKEPNKSVNPDEVVAMGAAIQGGVISGDVKDVVLLDVTPLSLGIETMGGVFTKLIERNTTIPTSKSQVFSTAADNQPAVDIHVLQGERPMAADNKTLGRFQLTDIPAAPRGVPQIEVTFDIDKNGIVSVKAKDLGTQKEQTIVIQSNSGLTDEEIERMMKDAEANAEADAKRKAEVELRNEVDQAIFATEKTIKETEGKGFDTERDAAQSALDELKKAQESGNLDDMKAKLEALNEKAQALAVKLYEQAAAAQQAQAGAEGAQATDNSGDDVVDGEFTEK

SEQ ID NO: 16234 - protein, 1085 aa, Saccharomyces cerevisiae YJM789
MEDKEQQDNAKLENNESLKDLGVNVLSQSSLEEKIANDVTNFSNLQSLQQEETRLERSKTALQRYVNKKNHLTRKLNNTTRISVKQNLRDQIKNLQSDDIERVLKDIDDIQSRIKELKEQVDQGAENKGSKEGLQRPGETEKEFLIRTGKITAFGHKAGFSLDTANREYAKNDEQKDEDFEMATEQMVENLTDEDDNLSDQDYQMSGKESEDDEEEENDDKILKELEDLRFRGQPGEAKDDGDELYYQERLKKWVKQRSCGSQRSSDLPEWRRPHPNIPDAKLNSQFKIPGEIYSLLFNYQKTCVQWLYELYQQNCGGIIGDEMGLGKTIQVIAFIAALHHSGLLTGPVLIVCPATVMKQWCNEFHHWWPPLRTVILHSMGSGMASDQKFKMDENDLENLIMNSKPSDFSYEDWKNSTRTKKALESSYHLDKLIDKVVTDGHILITTYVGLRIHSDKLLKVKWQYAVLDEGHKIRNPDSEISLTCKKLKTHNRIILSGTPIQNNLTELWSLFDFIFPGKLGTLPVFQQQFVIPINIGGYANATNIQVQTGYKCAVALRDLISPYLLRRVKADVAKDLPQKKEMVLFCKLTKYQRSKYLEFLHSSDLNQIQNGKRNVLFGIDILRKICNHPDLLDRDTKRHNPDYGDPKRSGKMQVVKQLLLLWHKQGYKALLFTQSRQMLDILEEFISTKDPDLSHLNYLRMDGTTNIKGRQSLVDRFNNESFDVFLLTTRVGGLGVNLTGANRIIIFDPDWNPSTDMQARERAWRIGQKREVSIYRLMVGGSIEEKIYHRQIFKQFLTNRILTDPKQKRFFKIHELHDLFSLGGENGYSTEELNEEVQKHTENLKNSKSEESDDFEQLVNLSGVSKLESFYNGKEKKENSKTEDDRLIEGLLGGESNLETVMSHDSVVNSHAGSSSSNIITKEASRVAIEAVNALRKSRKKITKQYEIGTPTWTGRFGKAGKIRKRDPLKNKLTGSAAILGNITKSQKEASKEARQESYDDDITFARSKEINSNTKTLENIRAYLQKQNNFFSSSVSILNSIGVSLSDKEDVIKVRALLKTIAQFDKERKGWVLDEEFRNNNAS

SEQ ID NO: 16235 - protein, 533 aa, Chlamydomonas reinhardtii
MLTRFLRPHQREGVQFMFDCVTGQRLEGKHGAGCILADDMGLGKTLQGITLLWTLLGGGHPLLGGVPLARRAIIVCPTSLVSNWDNECSKWLKGRLTTLAMCESSREDVCSSIALFLDSSNTGLHRVLIISYETFRMHADKFQVPHACDLLMCDEAHRLKNDATLTNRALDNMPCKRRVLLSGTPMQNHLDEFFAMVDFCNPGVLGSAAEFRRRYEAPILAGREPDATPEQVALGEERSAELSGLTNRFILRRTNKLLSQHLPPKVIEVVCCRLTELQRALYIHFLQSKAARRVLNAGKTTSGVLSAITSLKKLCNHPKLIYDAAAAAAAGEDGEGKIEGFEVGPAEGAVGGKMAVLARMLHVLYTETTDRIVLVSNYTSTLDLFVALCRERGYPFVRLDGTTTINKRQKLVKVFNDPVEKQFAFLLSSKAGGCGLNLIGANRLVLFDPDWNPANDAQAAARVWRDGQRKRVFVYRFLSTGSIEEKVFQRQMSKEGLKQLVGKTGKAAANVMTSEDLRELFSLNADSPSDTYE

SEQ ID NO: 16236 - protein, 173 aa, Arabidopsis thaliana; identical to SEQ ID NO: 12969

SEQ ID NO: 16237 - protein, 152 aa, Triticum aestivum
GEEPFLQTIARALTPAGVLSNLAESMLLHTHLIQDMLSICREVLKGGVHYAWASVPTYPSGVIGFLLCAKDGPPVDFLTPVNPIEKIEGATKDGREMRFYNSEIHRAAFILPTFVKRELEAYSTSTEKEKPEKPTAKPVKMKVMRDSAITAS

SEQ ID NO: 16238 - protein, 204 aa, Oryza sativa Japonica Group; identical to SEQ ID NO: 12378

SEQ ID NO: 16239 - protein, 469 aa, Bacillus anthracis str. Ames
MVVAFLIGAGGMFAGMSLFGVNPAEVTQTISSGNASTAQGNLAKINEAYALIDSRYVEDVKDEKLVEGAIQGMLSTLKDPYSTYMDKETAKQFSESLDPELEGIGAEVNKTDGKLIIVSPIKGSPAEKIGIKPNDQILSVDGNSVKDLSREEAVLKIRGKKGTTVAIEIKRAGVADPIVFKIKREKIPIFTVFSSVKQESGKDIGYMQITSFAENTAKEFKDQLKELEKKNIKGLVIDVRGNPGGYLNSVEEILGEIMTDKKPMLQVEQRNGEKKKFSTELKERKPYPISVLIDNGSASASEILAGALKEGEGYDLIGEKTFGKGTVQQAVPFKDGSNIKLTMFKWLTPDGNWIHKKGIKPTVEVKQPDYYHATPIQIEKTLSYNANDVQVKHAQEMLKSLGYVPGREDGYFSKETESALKAFQNANKMEATGQLDKKTAEAIQTKIIEKIRSGENDLQLQSALKLMAK

SEQ ID NO: 16240 - protein, 528 aa, Streptomyces coelicolor A3(2)
MDQLALLFMLLLGALLSVPIGARLGLPAPVLMTLLGIVLALLDFVPNVDIPPELILPGLLPPLLYAAVRRTSWRQFAANKRPIFLLAVALVFVTMVCVASVAHAIVPGLPIAAAFALGALVAPPDPVAATAVAGQLGLPRRLVSILEGEGLFNDVTAIVLYHVAIAAAVGGSFSPWRAGFDLVLSAVVAVAIGLVLGWGSNKLMSVLGDPTLQIGLTLLVPFVSYVAADELHGSGVLAVLTTAMFLAEYASDADDVMTRLGGHTVWDVVDTLVTGVAFGLIGLELHNAVRTASGRWTELLGWAAAILVVVVLVRLLWLLPATWLTQRLHARRDQDEDIPTSWRETVVMWWAGMRGVASVALALAIPLETDDGAAFPHREEIVFIAFGVIMGTLLLQGLTLPWLVGRLGVRADTEREQEFERDLALRAAKAAKQRLKEIESVEELPEELSEQMLRRAFDIGIRISPDLGDEERREAQEQRARRIKRVRRIQGEMLSAARHEVLAARSEPGADPEIVDRVLRHLDVRSLR

SEQ ID NO: 16241 - protein, 1171 aa, Oryza sativa Japonica Group; identical to SEQ ID NO: 9315

SEQ ID NO: 16242 - protein, 1112 aa, Arabidopsis thaliana; identical to SEQ ID NO: 8833

SEQ ID NO: 16243 - protein, 387 aa, Agalinis fasciculata; identical to SEQ ID NO: 9319
  misc_feature (244)..(244): Xaa can be any naturally occurring amino acid

SEQ ID NO: 16244 - protein, 428 aa, Anabaena variabilis ATCC 29413
MVITKSRLVLGATAVTLSTIAVTSLGIHSRGQALFKASPKELVDEVWQIVQRQYVDGTFNQVDWQAVRKEYLNKSYSNQQEAYKSIREMLKRLNDPYTRFMDPQEFKNMQVDTSGELTGIGITISQDEKTKQLVVIAPIEDTPAFKAGILAKDVILKIDGKSTKGMDTNQAVNLIRGTAGSQVTLTIQRSNQEKQFKITRARIEIHPVRYSQKPTSVGKVGYIRLNQFSANAGKEMQEAIKNLEKQQVAGYILDLRGNPGGLLFSSVEIARMWMDKGTIVSTVDRQGEREREVANGRALTNKPLVILVDKGSASASEILSGALQDNKRAVIVGTQTFGKGLVQSVRPLDDGSGLAVTIAKYLTPNDRDINKHGIDPDVKVELTDAQRQDLWLREREKLGTLDDLQFAKAVEILGKQIAAKGTPTAEKK

SEQ ID NO: 16245 - protein, 183 aa, Shigella flexneri 2a str. 301
MQDSILTTVVKDIDGEVTTLEKYAGNVLLIVNVASKCGLTPQYEQLENIQKAWADRGFVVLGFPCNQFLEQEPGSDEEIKTYCTTTWGVTFPMFSKIEVNGEGRHPLYQKLIAAAPTTVAPEESGFYARMVSKGRAPLYPDDILWNFEKFLVGRDGKVIQRFSPDMTPEDPIVMESIKLALAK

SEQ ID NO: 16246 - protein, 471 aa, Burkholderia xenovorans LB400
MSKSVADVVQLVKDEDVKFVDFRFTDTRGKEQHVSVPVSAFDEDKFESGHAFDGSSIAGWKGIEASDMLLVPDANTAFIDPFYEESTLVLTCDVVEPADGKGYERDPRSLAKRAEAYLKSTGLGDTAFFGPEPEFFIFDSVKWGTDQSGTFVKIGSEEAPWSSALDFEGGNTGHRPGTKGGYFPVAPVDTFQDIRSEMCLLLEQIGIPVEVHHHEVAGQGQNEIGTKFSTLVQRADWLQQMKYIIHNVAHTYGKTATFMPKPVVGDNGSGMHVHQSIWKDGTNLFAGNGYAGLSEFALFYIGGIIKHARALNAITNPSTNSYKRLVPHFEAPVKLAYSARNRSASIRIPHVSNPKGRRIETRFPDPMANPYLCFSALMMAGLDGVQNKIHPGEAADKNLYDLPPEEDAKIPTVCAGLDQALDSLDADREFLTRGGVFTDSMLDAYIELKTGELQRYRQSVHPIEFEMYYSL

SEQ ID NO: 16247 - protein, 221 aa, Petalodiscus platyrachis; identical to SEQ ID NO: 9321

SEQ ID NO: 16248 - protein, 608 aa, Ajuga reptans; identical to SEQ ID NO: 9325

SEQ ID NO: 16249 - protein, 439 aa, Wolinella succinogenes DSM 1740
MSKTKYALTGFGATVLSLSLLFSSSFAQSPSESQSRLEAYNKLRKVIGTVENYYVDEVTINEIINKAIDGLLSNLDAHSSYLNEKKYEELKVQTDGEFGGVGITISMKDGALTIISPIEDTPGDKAGLKSGDIILKIDDKSTLNMTIDDAINLMRGKPKTKVKLTIVRKNEPKPFVVDIIRDVIKVESVYAKRIENSEMLYVRVTSFDKKVGKRVAEELKKASWAKGVVLDLRNNPGGLLNQAVELTDLFINEGVIVSQKGRISSEDAEFKASKNSPFAQIPLAVLINNGSASASEIVAGALQDHKRAILVGENTFGKGSVQVVLPLDKNEGLRLTIARYYLPSGRTIQALGITPDLIVHPGVAPREKKDDFSIKESELKQHLENELEKIGDKKEVKKEVKSDEDNKSVISEENLWNDIQLKSAMDALKTWSIINPAKK

SEQ ID NO: 16250 - protein, 439 aa, Pyrococcus furiosus DSM 3638
MNISVSMNKFDSKIKFVQLVFVDINGMPKGMEIPASRLEEAVTDGISFDGSSVPGFQGIEDSDLVFKADPDTYVEVPWDNVARVYGFIYKDNKPYGADPRGILKRALEELEKEGYKAYIGPEPEFYLFKKNGTWELEIPDVGGYFDILTLDKARDIRREIAEYMPSFGLIPEVLHHEVGKAQHEIDFRYDEALKTADNIVSFKYITKAVAEMHGLYATFMPKPLFGFPGNGMHLHISLWKDGENVFMGEEGLSEIALHFIGGILKHAKALTAVTNPTVNSYKRLVPSYEAPVYISWGYRNRSALIRVPAFWGKGARIEYRCPDPSANPYFAFAAVLKAGLDGIKHKIDPFAYVEENVYEMSEEKRKELGIETLPGSLGEALEELEKDKVVKEALGDAYKNFINYKWKEWESYLEYLEEKHMPKDTKKVTEWELERYFFL

SEQ ID NO: 16251 - protein, 584 aa, Triticum aestivum
METQEGDAHRSESDAHKVKGRGGFVALPFIIANEMLEKVAGFGLNTNMIMYLTKQYHLSNVTAGATLFVWAAAANFAPIPGALIADMYTGRFMAISLGSIACLTGVVFLWLSAMIPGARPPPCGVGLAGEQCAPPGPRHLAWLIAGFTFLSIGAGGIRPCSMAFGADQFSRHPKERRSRILQAYFNAYYASIGVAFTVAVTVIVYVQDNVGWKAGFAVPMGLMMLSAVSFLLGSRLYVKEKGSKQMFAGIGAALVAAIRNYRVQLPAKTEDGVYHHLKDCKLTVPTDRLRFLNKACIISNNGGVDLPGTGAAASERDGNVGGRRLCTVDQVEQLKSAVRILPIWSSTVFLAQAMSQNYAVLQANEMDRRIGVGQFRVPGCSLTMFNMVTMSLWSGSYDRWIAPALRRVTGDPRGLTMKQRVGVGLLLATAAMAVSGAVEGARRRLELAGGGGAGMSAFWLVPQFALMGLAEAFGVIGELEFFYTELPKSMASFSMALLYMAMGVGNLVNSLIVKVVDDASRRGGRTSWLSSDLNAGHYDYYYWLLAGLGAVNFVYFLWCAWKYGEEGKNVEWEEGEGERERPMA

SEQ ID NO: 16252 - protein, 224 aa, Petalodiscus leandrianus; identical to SEQ ID NO: 9326

SEQ ID NO: 16253 - protein, 619 aa, Alectra sessiliflora; identical to SEQ ID NO: 9329

SEQ ID NO: 16254 - protein, 218 aa, Phyllanthus cf. decipiens Hoffmann et al. 162; identical to SEQ ID NO: 9331

SEQ ID NO: 16255 - protein, 303 aa, Zea mays
  misc_feature (141)..(141): Xaa can be any naturally occurring amino acid
MDAQQQLDLVMRHQSMATVCESEDALGSSESDPARPARPRGKRSRAAEVHNLSEKRRRSRINEKMKALQTLIPNSSKTDKASMLDDAIEYLKHLQLQVQMLSMRNGLYLPPGNLSGAPETLAPLRNVRSTLTKVVPRHQNXPALVVLPGNKIPVARLLLDPPNHDQRHENPLVLQSVPSSSTAVEPRFLQQPAQPNLQSFQLAVPPEMIFDEADMMLKHRLASGRETTSLPVGHEAKPGRQEACMFGLFPCGYNNPIFLATGFFLPLWDRVFGSFLDLRQGLLIKGTVSVRAVLLQRFCQFDS

SEQ ID NO: 16256 - protein, 572 aa, Leuconostoc lactis
KIIGIDLGTTNSAVAVLEGGEPKIITNPDGGRTTPSVVSFKNGETQVGDVAKRQAITNPDTIISIKSHMGEAGYKVNVDGKDYTPQEISAIILQYIKGYAEDYLGEKVEKAVITVPAYFNDAQRQATKDAGKIAGLEVERIINEPTAAALAYGLDKLDKDEKILVYDLGGGTFDVSILELGDGVFEVLSTNGDTHLGGDDFDNKIIDYLAEQFKAENGIDLKEDKLALQRLKDAAESAKKTLSSATEAQIDLPFIASGDQGPLHLQTSLTRAKFNELTADLIKKAEQPVLNALKDAGLSFSDIDEVILNGGSTRIPAVQESVKKLTGKEPNHSINPDEAVALGAAVQGGVITGDVKDVVLLDVTPLSLGIETMGGVFTKLIDRNTTIPTSKSQVFSTAADNQPAVDIHVLQGERSMAADNKTLGRFQLSDIPAAKRGVPQIEVTFDIDRNGIVSVSAKDLGTQKEQKITIQAAGGLTDEEIEQMMNDAKANEEADAKKKAAVDTRNEADQLIFSTEATLEEVGDKLEEDAKKATKDALEALKEAKEKVGDDVEADLTELKEKSEALAKAAQE

SEQ ID NO: 16257 - protein, 428 aa, Bdellovibrio bacteriovorus HD100
MKALGRHILVEFSGCNAEVLNDVSIIERSMVEAAQIAGATVINSTFHHFSPWGVSGVVVIQESHLAIHTWPEYRYAAVDLFTCGDSVDPWVSFEHLKKAFQANYSALEMNRGSLHVIQKSDFQPKIMREKPSFDLSKGHQIDRNVWFTDKDENQALSLRYTGDVLFDETNPFQRVRVLDSYSHGKFLAINNMVMCTERDEYHYHEMITHPVMQTHGNAKNVLVIGGGDGGTIRELFKYNVDNVTMVEIDEAVVRASKEHLPKIACEFNNPKLNLIIGDGIQFVKDAPANSYDVIIVDGSDPVGPAKGLFTAEFYNNCKNALKDGGLVITQGESPMFHEGTFVELNHCLKGIFGKQSVHTMLFHATTYPSGMWSLQVAVKGSKHPAKDFNKDQAAKFAQDKGLKYYNEDLHTAAFSLPTFVKTMLGDNA

SEQ ID NO: 16258 - protein, 210 aa, Phyllanthus nummulariifolius; identical to SEQ ID NO: 9338

SEQ ID NO: 16259 - protein, 175 aa, Physcomitrella patens subsp. patens; identical to SEQ ID NO: 1002

SEQ ID NO: 16260 - protein, 548 aa, Pectobacterium atrosepticum SCRI1043
MEIFFTILILTLVVSLSGVVTRILPFQVPLPLMQIALGAILAWPQFGLHVDFNPELFMVLFIPPLLFADGWKTPTREFLRHGREIIGLALVLVLITVVGIGYFIYWMVPGMPLIAAFALAAVLSPTDAVALSGIVGEGRIPKKLMGILQGEALMNDASGLVSLKFAVAIAMGTMVFTVSGATLEFVQVALGGLLAGVGVTWIFGKSLRVISRWSGDDAATQIVLLLLLPFASYLIAEHIGVSGILAAVAAGMTIGQSGVIRSAPLTMRMRANGVWSMLEFVFNGMVFIMLGLQLPDILETSVTQAELDPTVETWMLFTDIAIIYGALLLLRFSWLWVMRTYSVHIQKKRPMVFAEFSTRELWIASFAGVRGAITLAGVLSIPLLLTDGTAFPSRYQLVFIATGVILFSLLCGVLALPFLLRGVVVADKAAHAKEIRMARMAVAEVAIKSMHKMEERLAADREENIDEQVLKEVSARVIGNLRRRLINKDDPENGLLIENLERRFRLTALNSERAELYHLRATQQISNETLQKMLRDLDLMEALLIENE

SEQ ID NO: 16261 - protein, 1383 aa, Candidatus Kuenenia stuttgartiensis
MSQKLPQNFSDIYGQLNSIEQSLLQILAINYAPMTQGNLYSVARRTKGLPIINKDLFNMRDFKYALDRLAKFDLIGPVGTGVVQCKSVLVDEILARISKNDYFRELVDAVQCCVPVPPYVYIDSQLIVREIRIGLYTGNADIVVENLNRSANYYGERFDAKKVVVDVCTNPLFHAEMFDSLHPAIKKIVFQNMVDHAIMSYRPLSEEQCASLAKYGTVDEREYVIIRNIYAMYLIFRGNLTEAENIVQKDFGYMDLMLAQGCVAFLKGENSKSLAIYDQALKAFQKKMIKKIGFFTQILGLFYLFALAKSGQPEDLRLAKELLAWGTRNEPENLTNMCKRCIYAAIIAQNNLIPEAKEILSGIFSHFHKNSVFALFYELAAYWIDEDLVKLHAKTNKSRFEIANKNGFFLPALVHGRLFLKSKKNALIQRTCDQLAESTGIQDITDSIHRKEDWEKMLNALIDLSLKEKTNASSRECRLVWMVSLDKKYIQITPKGQRLNKNGKWSAGKRVSHKNLLEGLDYMTSQDRKVVQVFIETPKSNMDYYGHFYSENHEKALLALVGHPLVFLEDSPHIAVDLVKGEPELIVGQTKRGYSLQFSETFKDTGIEVVKESPTRYKIVEIKDEHVRIAKFMGKRQISIPAKAKEDLIKAMSGISSLITVHSFIEGADETIPTIEASANTYIHLLPVGHGFKLEIFVKPFVTSPPYFNPGAGGKHVFTEINQQRVQSSRDLSLEKVNAENIINACPSLQQSGNTQWAWLFNNNEDCLQILSELYEVKDRVTVEWPEGEKLKILAVASFPQFSMNISHENDWFSASGELKIDDDLIIKMSDLLDLLDNGSTRFIQLKDGQFLALAEQFRKRLEEMNAFAERGKDEIRFHPLATVALEDTLEEIKQLKVDKAWNDNIARLKKVRERIPAVPTTLQADLRNYQVEGFQWLSRLSDWRVGACLSDDMGLGKTIQALTVILEHAKEGPSLVIAPASVCMNWISEASRFAPTLNVSIFGEEKDRKEAIKKQGPFDLLVCSYGLLQQEEKILADKKWTIIILDEAQAIKNSNTKRSKAAMALKGDFKIITTGTPIENHLGELWNLFQFINPGLLGSIKRFNEKYAIPIERDKSHQARLRLKKLIQPFILRRTKAQVLEELPPKTEITLSVEMTPEESAFYEALRQKAIDNIESFDFGKGEGYLRVLAEIMKLRRACCHSRLVVPGHSLESSKIRLFGEVVQELMENNHKALVFSQFVDYLAIIREYVEGLNISYQYLDGSTPMKERKRSVDAFQSGEGELFLISLKAGGLGLNLTAADYVIHMDPWWNPAVEDQASDRAHRIGQKRPVTIYRLVTKGTIEEKIVNLHQHKRELADSLLEGSDMSGKITTEQLLQLIHGQ

SEQ ID NO: 16262 - protein, 344 aa, Oryza sativa Indica Group
MEAEAAAKRVRESGDAAAAGAGEQAGISAVIPGWFSEISPMWPGEAHSLKVEKVLFQGKSDYQNVMVFQSSTYGKVLVLDGVIQVTERDECAYQEMITHLPLCSIKDPKKVLVIGGGDGGVLREVSRHSSVEQIDICEIDKMVVDVFSPYPLSVCLVTLISAFGVAAATGDLPRYPRKESEEISEPEGQAKGEGHAYLHCNHCVMAVCVVVIVPVSNAWQLEPDLGRSRRRWSPNNFFLIWLLDLKTPVCHYTLEMDRLKSFSRSLSSSQLPELCVLVVFGVIGFMLCSTEGPTVDFQHPIFNIEDNEFSTKSKGPLKFYNSEIHSASFCLPSFAKRVIGSKAN

SEQ ID NO: 16263 - protein, 519 aa, Arabidopsis thaliana
MFEKNGRTLLAKRKTQGTIKTRASKKIRKMEGTLERHSLLQFGQLSKISFENRPSSNVASSAFQGLLDSDSSELRNQLGSADSDANCGEKDFILSQDFFCTPDYITPDNQNLMSGLDISKDHSPCPRSPVKLNTVKSKRCRQESFTGNHSNSTWSSKHRVDEQENDDIDTDEVMGDKLQANQTERTGYVSQAAVALRCRAMPPPCLKNPYVLNQSETATDPFGHQRSKCASFLPVSTSGDGLSRYLTDFHEIRQIGAGHFSRVFKVLKRMDGCLYAVKHSTRKLYLDSERRKAMMEVQALAALGFHENIVGYYSSWFENEQLYIQLELCDHSLSALPKKSSLKVSEREILVIMHQIAKALHFVHEKGIAHLDVKPDNIYIKNGVCKLGDFGCATRLDKSLPVEEGDARYMPQEILNEDYEHLDKVDIFSLGVTVYELIKGSPLTESRNQSLNIKEGKLPLLPGHSLQLQQLLKTMMDRDPKRRPSARELLDHPMFDRIRGHTMVEWLKAKQNGEIFTVV

SEQ ID NO: 16264 - protein, 545 aa, Thellungiella halophila
MAMLASYFDSFISKMPSLSTSDHASVVSLNLFVALLCACIVLGHLLEENRWMNESITALLIGLATGVVILLISKGKSSHLLVFSEDLFFIYLLPPIIFNAGFQVKKKQFFRNFVTIMLFGAIGTVISCTVITLGVTQFFKKLDIGTFDLGDYLAIGAIFAATDSVCTLQVLNQDETPLLYSLVFGEGVVNDATSVVVFNAIQSFDLTHLNHEAAFHLLGNFLYLFLLSTLLGVATGLISAYVIKKLYFGRHSTDREVALMMLMAYLSYMLAELFDLSGILTVFFCGIVMSHYTWHNVTESSRITTKHTFATLSFLAETFIFLYVGMDALDIDKWRSVSDSPGTSVAVSSILIGLLMLGRAAFVFPLSFLSNLAKKNESEKINFKMQVVIWWAGLMRGAVSMALAYNKFTRAGHTDLRGNAIMITSTITVCPFSTVVFGMLTKPLIRHLLPHQKATTSMLSGDNNTPKSIQIPLLDQDSFIEFAGNHNVPRPDSIRGFLTRPTRTVHYYWRQFDDSFMRPVFGGRGFVPFVPGSPIERDPPDLSKA

SEQ ID NO: 16265 - protein, 620 aa, Mycobacterium abscessus
MARAVGIDLGTTNSVVAVLEGGDPVVVANSEGSRTTPSVVAFARNGEVLVGQPAKNQAVTNVDRTIRSVKRHMGTDWTVEIDGKNYTPQEISARTLQKLKRDAEAYLGEDITDAVITVPAYFNDAQRQATKEAGQIAGLNVLRIVNEPTAAALAYGLDKGEKEQTILVFDLGGGTFDVSLLEIGDGVVEVRATSGDNHLGGDDWDERIVTWLVDKFKASAGIDLTKDKMAMQRLREAAEKAKIELSSSQSTSINLPYITVDADKNPLFLDEQLTRAEFQKITQDLLDRTRKPFQSVIKDAGVSVSDIDHVVLVGGSTRMPAVTDLVKELTGGKEPNKGVNPDEVVAVGAALQAGVLKGEVKDVLLLDVTPLSLGIETKGGVMTKLIERNTTIPTKRSETFTTADDNQPSVQIQVYQGEREIASHNKLLGSFELTGIPPAPRGVPQIEVTFDIDANGIVHVTAKDKGTGKENTIKIQEGSGLSKEEIDRMIKDAEAHADEDKKRREEADVRNQAESLVYQTEKFVKEQREPAEGSEKVVSDETLSKVDEAISEAKKALEGTDIGAIKAAMEKLGEQSQALGQAIYEAAAAKAQADGAEGGAGSADSDVVDAEVVDEEKDSK

SEQ ID NO: 16266 - protein, 748 aa, Cryptococcus neoformans var. neoformans JEC21
MAVSQSHPNIVDGWFREINTQWPGQAMTLKVKQVLHQEKSLFQDVLVFESETYGNVLVLDGVIQATERDEFSYQEMITHLPMASHPNPENVLVIGGGDGGVIREVLKHKSVKKVTLCDIDEAVIRVSKQWLPLMSDCYKDPRVEVHIGDGFKFLPEHKNEYDVIITDSSDPVGPAEALFQPPYFQLLKEALKEGGSVSTQAECLWIHLPLIKTLKETCSKLFPVVKYGFTTIPTYPAGQIGIMVCTKDSTRDLTVPLRAVPDTRYYNSEVHRAAFTIPEFGRAMLEDGVNVLPKFSGARPTTTKKKVLLLGSGLVAGPAANYIARHNHELTIACRTLASAEELASGLPNATPMSVDVSSADALRQAIKGHDVVVSLIPYTHHAQVMEAALEEKVHVVTTSYVNPQMRALEQKFKDAGLICFNEIGVDPGVDHLWAVKVFDEVKKAGGKIKSFYSFCGGLVEPAAADNALGYKFSWSPVGVLMALNNDGKYLKDGKVVEVAGKDLMSTAKPYYFTPAYNLVAYPNRDSTVFREFYGLEGVQNLCRGTMRYAGFCEVITAWKEIGLMSDAQVDYLAQGAAPITWIKVISQLLGVEAKEAAIIEKLKTLKSFETESRVLISKFRDLGLFSEEQVAQRGSVMRALSALLEEKCAFKEGEVDLVLLQHTFEIINADGSEQTITSSLEAYGDRNGGPSAMAKLVGVPCGMAVQFILEGVLNKPGVFAPYDEETCKLFRERLEKEEGITMVEKLV

SEQ ID NO: 16267 - protein, 245 aa, Gymnosporia polyacantha; identical to SEQ ID NO: 9345

SEQ ID NO: 16268 - protein, 432 aa, Coprinopsis cinerea okayama7#130
MAKRRKNRTHLKGGQRDEGKSSAPKSFIIKHGHVGSSITQLVRDMRKVMEPNTASRLKERNRNKLKDYMTMGPALQVTHLLAFRLTPIAPSLRIVRLSDGPTLSFRVERYSLMKDVLNTARRAKSIGMEYLTPPLLVLASFPQPGPGTPPHLPLVMKAFQSLFPPLSPHTISLSSARRVVLISYNEERGTIDFRHYLIRVKAHGVSKRVRRVVESATSSSKPVINLGKEKDVADFLLRRRGDPGPDGGYESASSAESAVEDGDMVSLASDYVGRNNKKGTKRAVKLEEVGPRMELRLVKITEGVPGKEGNVIYHEFVKKTKKEIAEQKAAIAEKERLRKQRREEQERNVARKKKSANKKGDDDASSDDEGSVEDESGGEGDVEHEVDDIGEWDEEEEISEGEESEDEQDLSEEDSSDEDKPPAKKPRFHRKR

SEQ ID NO: 16269 - protein, 245 aa, Gymnosporia polyacantha; identical to SEQ ID NO: 9349

SEQ ID NO: 16270 - protein, 593 aa, Nicotiana tabacum
MGRAKLKLHKLDGSNRIGVYSRRKKGLLKKANELSVLCDIDIFLAMFSPGGKPSVYKSDNSSFEDMITTKFAEVNPEERAKRKMECLDTIKKACKKYDHDVDIGEQLCPGDLTTADINFLSQSLRIRLSDIEGRLRLWKNLDKIDSIQQLRKLENSISKSLNEIAKHKCGMGSLIFGAGQDFQPSSARHGMDSPLNFDARKELHPCSSVHACDSENIDVNEGMNSFDSSLLCDTGQDFQTTSLMQHGMNLGQELYECSSVHGGNSENMDVYEDLNSFPLEYLEESSFSFESYTNLVCNKEIEVSMPESVNFVPDEIFLDCEVNQEDIVTDFGFTFDVPQLEQTDDQGNAFDYNINKGSRLPHSDLVNIHDSSKSASGTCEKMILAKSLHFLYGMDSSSSDAGEEFSTASSIKHGINLSSTQLDAGLSVNGGDSENMDDYEDLNAFDSCLKFDDEHEFQSSSSIGHYSMNSPVSFDAGQELHRSSSVNGGDSESINGYGDLNLFVQGFLDDPSLSIESCTDLACNHEVENYKPGYENCSADKIFLDCQLNQENIEMAFKSNLDLPLVEQMDVQESTFDCLNKGFGFPLLTSILV

SEQ ID NO: 16271 - protein, 213 aa, Theobroma cacao; identical to SEQ ID NO: 1014

SEQ ID NO: 16272 - protein, 443 aa, Roseovarius nubinhibens ISM
MTRDLAKYAKEKGIKYYMISFTDLFGAQRAKLVPAQAIADMQEDGAGFAGFATWLDLTPAHPDMLAVPDPEAVIQLPWNPELAWVPGNCVMGGKDLAQAPRNVLRRLIKEAADEGLHIKTGIEAEYFIMTPDGHAISDEYDTAEKPCYDQQAIMRRLHVVQEICDYMLDLGWGPYQNDHEDANGQYEMNWEFDDALATADKHSFFKFMTKSVAEKHGLRATFMPKPVEGLTGNGCHAHISVWDAPGDKAKRNVFATDKGEGPTGELGLSEQGKYFLGGIMKHASALAAITNPTVNSYKRINAPRTTSGATWAPNTVTWTGNNRTHMVRVPGPGRFELRLPDGAVNPYLLQAVIIAAGLDGIRTKADPGKRHDIDMYAEGHKVRGAPKLPLNMLDALREYDKDKQLKSMMGEEFSAAFLKLKHQEWNAYCRHFSEWERANTLDI

SEQ ID NO: 16273 - protein, 170 aa, Glycine max
MGASQSISENSIHEFTVKDARGKDVNLNAYRGKVLLVINVASKCGFADANYSQLTQIYSTYKSRGLEILAFPCNQFLKKEPGTSQEAQEFACTRYKAEYPIFGKIRVNGSDTAPVFKFLKTQKSGVMGSRIKWNFTKFLVDEEGRVIQRYSPTTKPLAIESDIKKALQVA

SEQ ID NO: 16274 - protein, 717 aa, unidentified eubacterium SCB49
MKRPMRIVKKNFKVLFLAVFVAAASCSFTTKEFQDPDNDKLLIDLLTYVLERGHYSPLAIDDTFSEAIYTDFIEGLDPVKRFFLASDIKEFEQYKTEIDDQLKAKDLTFFNLVYERFMERQVSARKMYAEVLETPFDYSKKEVINVDYDNLAYAVDENELKKRWKAQLKFSTISSYYDLFEEDEKKLETEEDFKPRTEKEIEEKSRNTTLTSLDEYFEFTDDLERKDYFSIYLNTIVEEFDPHTTYFAPPDKERFDVRMSGKLEGIGARLQKKNDYITIVEVISGGPVWRGEHMDVGDAIVKVRQEDEEEPVSVVGMRLDDAIKLIKGPKGTKVVLTIKRVDGALEEEVITRDVVELEETYAKSTIIDKEDKTFGLINLPQFYFDLEDYNKRNAASDVKKEIERLKEEGMEGLVLDLRDNGGGSLRTAVEISGLFIKDGPVVQVASKGDGKEVLKDTDKSITWDGPLVILVNELSASASEILAAAMQDYKRAIIIGSEQSYGKGTVQNVVDLNQWLRNSDAGDIGALKLTTQKFYRVNGGSTQLEGVKSDVVMPDRYSYIDIGERDYDNPLPYDKIDPATYTVFDGYVGFDEAIAKSKARMAQSAQLALIDENAHWIKDRRDENEVTLNYEEYKSEIEARKVVGEKFEAIDEYDNKMNYRSLSNEIALMKQDTVLREKRKRWHKNLAKDIYVEEAVNVLQDLKLNNIKKNTVTEIKN

SEQ ID NO: 16275 - protein, 421 aa, Glycine max
MSVMYSPVLNYSDVEYQLWENQDMDSSIGHPQQHCHQSNSGLLRYCSAPSSMLASLIDNTIHGCVNEEPFTSENQQQQQHYLPSTSSEMETMLSKMPPSNIGWSNSEPLQEFGGKPVKQEIGQSVPQGPPKQNGYSYGGSQLIYQCEGIRGLPNGSSIASISAFDGSFGAVNSMASEDSIQSKMGVRNCSNLFRQKSSPAGFFSIENDLAALREVGSFKDNDVSNGQATASTSGLHSSLTFSSRSSSCLKQMPPQIAENGNESLEENYDQSRNLVNDNGSSKYEIMFSTSNGLESQETDFSYQNHGLTHHLSLPSSSTKMSSIEMFLQIQGSVPYKIRAKRGFATHPRSIAERERRTRISERIKKLQDLFPRSEKPTSTADMLDLAVEHIKDLQQQVQILSDRKAKCKCTRNEKHYTRTCA

SEQ ID NO: 16276 - protein, 445 aa, Sulfitobacter sp. EE-36
MKKFVMAAVGGTLAGVIATTQIAGPLLAQETEKNSNVYEQLDLFGDIFERIRAQYVEEVDTEELVEAAINGMLTSLDPHSSYLSPKDALKMRDQTRGEFGGLGIEVTQEEGFVKVVSPIDGTPASEAGIEAGDFITHVDGESLLGLTLDDAVELMRGPVGSEIEITVVREGETEPFDVSLVRDTIQLTAVRARTEGDAVVLRVTTFNEQTYPKLKEGLEEQVEAAGGIENVSGFVVDLRNNPGGLLNQAIAVSDAFLEEGEIVSTRGRDAADGDRTNATPGDLAEGKPIVVLINGGSASASEIVAGALQDHRRAIVVGTKSFGKGSVQTIMPLRGEGAMRLTTARYYTPSGRSIQALGVSPDIIVAQPPAQPTDSEEEDATARPLRSEADLRGSLNNDSLTDDQVDQIMEDRAKAEKAASLREEDYQLAYAIDILKGLSALGPKK

SEQ ID NO: 16277 - protein, 736 aa, Pinus sylvestris; identical to SEQ ID NO: 9355

SEQ ID NO: 16278 - protein, 562 aa, Aspergillus nidulans FGSC A4
MPVYSQYPPVDIPNIDLWAFLFERKDRQFPDNKVIYTDADTRRSYTYNDVKQSAITFGQGLKSLFDWRKGDVLALFTPNSIDTPIVMYGALWAGGVVSPSNPAYTVEELAFQLRNSGAKAVVTQLPVLSVARAAAKEVGIPDDRIILIGDQRDPEARFKHFTSIRNISGATRYRRTKINPEKDLSFLVYSSGTTGVPKGVMLSHRNIVANSLQLAAGEAGNLTWNGGADGKGDRLLAFLPFFHIYGLTCLVHQTIYKGYELFVMAKFDLEKWCQHVQNYRITFSYVVPPVVLLLGKHPIVEKYDLSSLRMMNSGAAPLTQELVEAVYNRLHIGIKQGYGLSETSPTTHTQPWGEWRESVGSVGKLLPNMEAKYMTMPEDGSEPTEVPTGEVGELYLRGPNVFQGYHNNPAATADSISPDGWFRTGDVGYQDSKGNFYITDRVKELIKYKGFQVAPAELEGILVDNPAVDDVAVVGVESAEHGTEVPVAFVVRSAKSKSSGVSAAEEAKNIAKWLDGKVAHHKRLRGGVRFVDEIPKSAAGKILRRLLKKQAQEEAASPKAKL

SEQ ID NO: 16279 - protein, 524 aa, Aureolaria pedicularia; identical to SEQ ID NO: 9356

SEQ ID NO: 16280 - protein, 471 aa, Streptomyces coelicolor A3(2)
MITLSLAEIAEVVGGRMHDIPDASAEVTGPVVRDSREAGPGSLFVAFVGERADGHDFAARVVEAGAVAVLGSRPVGVPAIVVDDVQAALGALARHVVRRLGTTLVALTGSAGKTSTKDLIAQVLRRKAPTVFTPGSMNNEVGLPLTALTATDETKFLVLEMGARGIGHIRYLTELTPPKIGAVLNVGSAHIGEFGGREQIAQAKGELVEALPPAEEGGAAILNADDPLVRAMASRTKAKVILFGESGEADVRAENVRLTDTGQPSFSLHTPSGASDVTMRLYGEHHVSNALAAAAVAHELGMSADEIATALSEAGSLSRWRMEVTERPDGVTVVNDAYNANPESTKAALRALVAMGKGRRTWAVLGKMAELGDEALAEHDAVGRLAVRLNVSKLVAVGGREARWLQLGAYNEGSWGEESVHVSDAQAAVDLLRSELRPGDVVLVKASRSVGLESVATALLETGAEGEVAAR

SEQ ID NO: 16281 - protein, 468 aa, Silicibacter pomeroyi DSS-3
MSKDAVLQLIKDEGAEYVDIRFTDPRGKLQHVTIVSDLVDEDFLEEGFMFDGSSIAGWKSIEASDMKLMPDTESAYVDPFYAEKTICIHCSVVEPDTGEAYDRDPRGTAVKAEAYLKASGIGDVAYMGPEAEFFLFDDVRFSNTINKVSYEVDATDASWNSDAEFETGNMGHRPGLKGGYFPVNPIDEAQDLRAEMLSTMKRMGMKVDKHHHEVASCQHELGLIFGTLTKQADEIQKYKYVIHNVAHAYGKSATFMPKPIYGDNGSGMHVNMSIWKDGKPLFAGDKYADLSQEALYFIGGILKHAKTLNAFTNPGTNSYKRLIPGFEAPVLRAYSARNRSGCVRIPWTESPKAKRVEARFPDPSANPYLCFAALLMAGLDGIKNKIDPGEAMDKNLYDLPAEELADIPTVCGSLREALECLASDHDFLLQGDVFTKDQIEGYIELKMEEVHKYEHTPHPVEFGMYYSC

SEQ ID NO: 16282 - protein, 389 aa, Bartsia alpina; identical to SEQ ID NO: 9357

SEQ ID NO: 16283 - protein, 210 aa, Phyllanthus nummulariifolius; identical to SEQ ID NO: 9358

SEQ ID NO: 16284 - protein, 276 aa, Bacillus pumilus SAFR-032
MSELWYTEKQTKNFGITLKVNKTLHTEQTDFQHLEMVETEEFGNMLFLDGMVMTSEKDEFVYHEMVAHVPLFTHPNPENVLVVGGGDGGVIREILKHPSVKKATLVDIDGKVIEYSKKFLPSIAGKLDDPRVDVKVGDGFMHIAEADNEYDVIMVDSTEPVGPAVNLFSKGFYAGISKALKEDGIFVAQTDNPWFTPELITNVQRDVKEIFPITKLYTANIPTYPSGLWTFTIGSKKYDPLAVEDSRFFDIETKYYTKELHKAAFVLPKFVSDLIK

SEQ ID NO: 16285 - protein, 223 aa, Phyllanthus cf. mantsakariva Hoffmann et al. 266; identical to SEQ ID NO: 9360

SEQ ID NO: 16286 - protein, 269 aa, Oryza sativa Indica Group
MGRVKLKIKKLENSSGRHITYSKRRSGILKKAKELSILCDIPLILLMFSPNDKPTICVGDHSSIEDVITKYAQQTPQERAERKLERLEFQNDMQLPLGLTGDPNTSSWFHGGGGAEAQQPMMLPEDPSLLHQRDIGCSASTSLQSYPGYFSMGKQSTDNAGGGEQHHHAAVQQQPEFSQADCLTSLQLGAQFPYPSAFDNAGLLSDRLFDNAAAAAAAMDFGGHYDLPRPGDEASFQNWASAACGATMYDHQQQQQQQQQPAQVSSKLD

SEQ ID NO: 16287 - protein, 3543 aa, Arabidopsis thaliana
MTSSSHNIELEAAKFLHKLIQDSKDEPAKLATKLYVILQHMKTSGKENTMPYQVISRAMDTVVNQHGLDIEALKSSCLPHPGGTQTEDSGSAHLAGSSQAVGVSNEGKATLVENEMTKYDAFTSGRQLGGSNSASQTFYQGSGTQSNRSFDRESPSNLDSTSGISQPHNRSETMNQRDVKSSGKRKRGESSLSWDQNMDNSQIFDSHKIDDQTGEVSKIEMPGNSGDIRNLHVGLSSDAFTTPQCGWQSSEATAIRPAIHKEPGNNVAGEGFLPSGSPFREQQLKQLRAQCLVFLALRNGLVPKKLHVEIALRNTFREEDGFRGELFDPKGRTHTSSDLGGIPDVSALLSRTDNPTGRLDEMDFSSKETERSRLGEKSFANTVFSDGQKLLASRIPSSQAQTQVAVSHSQLTFSPGLTKNTPSEMVGWTGVIKTNDLSTSAVQLDEFHSSDEEEGNLQPSPKYTMSQKWIMGRQNKRLLVDRSWSLKQQKADQAIGSRFNELKESVSLSDDISAKTKSVIELKKLQLLNLQRRLRSEFVYNFFKPIATDVEHLKSYKKHKHGRRIKQLEKYEQKMKEERQRRIRERQKEFFGGLEVHKEKLEDLFKVRRERLKGFNRYAKEFHKRKERLHREKIDKIQREKINLLKINDVEGYLRMVQDAKSDRVKQLLKETEKYLQKLGSKLKEAKLLTSRFENEADETRTSNATDDETLIENEDESDQAKHYLESNEKYYLMAHSIKENINEQPSSLVGGKLREYQMNGLRWLVSLYNNHLNGILADEMGLGKTVQVISLICYLMETKNDRGPFLVVVPSSVLPGWQSEINFWAPSIHKIVYCGTPDERRKLFKEQIVHQKFNVLLTTYEYLMNKHDRPKLSKIHWHYIIIDEGHRIKNASCKLNADLKHYVSSHRLLLTGTPLQNNLEELWALLNFLLPNIFNSSEDFSQWFNKPFQSNGESSAEEALLSEEENLLIINRLHQVLRPFVLRRLKHKVENELPEKIERLIRCEASAYQKLLMKRVEDNLGSIGNAKSRAVHNSVMELRNICNHPYLSQLHSEEVNNIIPKHFLPPIVRLCGKLEMLDRMLPKLKATDHRVLFFSTMTRLLDVMEDYLTLKGYKYLRLDGQTSGGDRGALIDGFNKSGSPFFIFLLSIRAGGVGVNLQAADTVILFDTDWNPQVDLQAQARAHRIGQKKDVLVLRFETVNSVEEQVRASAEHKLGVANQSITAGFFDNNTSAEDRKEYLESLLRESKKEEDAPVLDDDALNDLIARRESEIDIFESIDKQRKENEMETWNTLVHGPGSDSFAHIPSIPSRLVTEDDLKLLYETMKLNDVPMVAKESTVGMKRKDGSMGGLDTHQYGRGKRAREVRSYEEKLTEEEFEKLCQTESPDSPQGKGEGSERSLANDTSNIPVENSSDTLLPTSPTQAITVQPMEPVRPQSHTLKEETQPIKRGRGRPKRTDKALTPVSLSAVSRTQATGNAISSAATGLDFVSSDKRLEAASHPTSSLALTSPDLSGPPGFQSLPASPAPTPIRGRGRGRSRGRGAGRGRRVEGVLHGSNSSITQRTETATSLASDAEATKFALPRSASEIVSRVPKANEGSTSNPDQVSPVHSATTALRSDKAADKDLDAPPGFDSGSHVQTLNVLENSSERKAFAVKKRPLIQGVSSQHPGPNKQPLDLPVSTSSTLLGGGPVQNQNAVSSVCDGSKSPSEGRTYTALQGVTTAPSDATLPMSSQPSDATLPMSSQPVGSTVEAQEANVPSLPAALPAKRRVRNLPSRGETPKRQGKRRGQPLPATDASSARSTGLTPQIEVKVGNLSGTKAKFDAVAKEQPHFSQSVAPDIHSSGSLSQEIRRDTSGTGGSARKQTADVTDVARVMKEIFSETSLLKHKVGEPSATTRTNVPDAQSPGEMNLHTVETHKAEDSSGLKNQEALYNLSKADKLVSDIPHPVPGDLTTSGSVANKDVDIGSSKVAAENELVKIPGGDVDSSVIQLSLGNTLTAKSSLEKCTADQLLGEKLSQEGETTPASDGETCHLAEETASSLSYVRSEPTASASTTAEPLPTDKLEKNISFQDEVKTLNGDKREAILLSSEEQTNVNSKIETNSEELQASRTDEVPHVDGKSVDVANQTVKEDEAKHSVEIQSSMLEPDELPNAGQKGHSSIDLQPLVLVTSNENAMSLDDKDYDPISKSADIEQDPEESVFVQGVGRPKVGTADTQMEDTNDAKLLVGCSVESEEKEKTLQSLIPGDDADTEQDPEESVSDQRPKVGSAYTQMEDTDEAKLLMGCSVESEEKEKTLQSHIPGDDADTEKNPEESVSVQGVDRPKVGTTDTQMEDTNDAKLLVGCSVASEEKEKTLQSHIPGDDADTEQNPEESVSVQGVNRPKVGNANTQMEDTDEAKVLVGCSVESEEKEKTLQSHIPGDDADTEQNPEESVSNFDRPKDGTADTHMEDIDDAKLLVGCSVESEEKEKSLQSHMPSDDAVLHAPFENTKDSKGDDLHGESLVSCPTMEVMEQKGFESETHARTDSGGIDRGNEVSENMSDGVKMNISSVQVPDASHDLNVSQDQTDIPLVGGIDPEHVQENVDVPASPHGAAPNIVIFQSEGHLSPSILPDDVAGQLESMSNDEKTNISSEQVPDVSHDLKVSQDQTDIPPVGGIVPENLQEIVDVPASPHGVVPDVVVSQSEEIQSPSILPDDVPGQPDDGNCEKMDTMQNNTSIDIGITSGKTCQPSSSTQPEDENRNSLSHCEPSEVVEQRDSRDQVCIGSVESQVEISSAILENRSADIQPPQSILVDQKDIEESKEPGIESADVSLHQLADIQAEPSNLVDQMDIEESKEPGTESADVSLHQLADIQPGPSILVDQMDTEKSKEPGTESADVSLHQLADIQPGPSILVDQMDTEKSKEPGTESADVSLHQLADIQPGPSILVDQMDTEEFKNPDVSLHQLADIEPSLSISAVQKNIEDKDQSHVETAGSELVDVSAECSTEPQVQLPPSSEPVGDMHVHLGASKSEIVAEGTDFSSSLPKTEEENAKSQLADTEPSSSLTAVQKNIEDQVETAGCEFVVVSTGCSTEPQVQLPPSAEPVVAEGTEFPSSLLMTGVDNSSHLMTGVDNAKTHLADVVPSSSPTTMEKNIEAQDQDQVTTGGCGLVDVLTECSSEPQLQLPPSAEPVISEGTELATLPLTEEENADSQLANIEPSSSPSVVEKNIEAQDQDQVKTAGCELVSTGCSSEPQVHLPPSAEPDGDIHVHLKETEKSESMVVVGEGTAFPSSLPVTEEGNAESQLADTEPFTSPTVVEKNIKDQEQVETTGCGLVDDSTGCSSEPQVQLPPSAEPMEVVQTNIEDQDQIETGGCDLINVPSGCSTEPQIQLSSSAEPEEGMHIHLEAAMNSETVVTEGSELPSSLPMTEDENADGQLAEVEPSVSLTVEQTNIEEKDHIETAECELVDVSPGCSSQPEVKFPPSPDAVGGMDVHLETVVTEDTDSNSSLPKTEEKDAENPSDRLDGESDGTTVATVEGTCVESNSLVAEESNIEVPKDNEDV

SEQ ID NO: 16288 - protein, 223 aa, Phyllanthus calycinus; identical to SEQ ID NO: 9363

SEQ ID NO: 16289 - protein, 595 aa, Sinorhizobium meliloti 1021
MKKSREIALPRQRSKGTKAVTHRLNRLRTHTQPGRDAEGSRTAGGAKRDVVLDCGWGRLLFAQTFSDDEKLLSELREEAPSSRDIAFYVRDPHVLLSRAPQEIFLDPSHTYRLDLWTYRANTRRTRGITIRRLASEADGDGVNRVYAACGMVQIRSDFFSSERDDRSLTYFVAQDDATGEIVGTVTGIDHQRLFDDPDRGASLWCLAVHPQARQPGIGEHLVRKLAEHFQARGLSYVDLSVMHDNTLAIGLYEKLNFRRMPLFAIKRKNAINEKFFAMPHQSYDALNPYARLIVDEATRRGIHVEITDAEGGFFRLSHGGRSIHCRESLSELTSGVAMSICDDKAITRRMVSAAGLVVPDQIEVDENGKAIQDFLKKHGKLVVKPARGEQGRGISVGITTMEALEEAIASARQVCDRVLLEAFFEGEDLRLVIIDYTLVAAAVRLPPRVIGDGRSKIASLIGKQSRRREAATGGESRIPLDAETDRCLAEQGLDLETILEEGREITVRKAANLHAGGSIHDVTEIVHPDLVEAACRAARAINIPVVGIDLMVRDPAEPDYVFIEANERPGLANHEPQPTAASFIELLFPGSRTAV

SEQ ID NO: 16290 - protein, 471 aa, Burkholderia pseudomallei K96243
MSKTVADVMQLAKDEDVKFVDFRFTDTRGKEQHVSVPVSAFGEDKFESGHAFDGSSIAGWKGIEASDMLLMPDPNAAFIDPFYEESTLVLTCDVVEPADGKGYERDPRSLAKRAEAYLKSTGIGDTAYFGPEPEFFIFDSVQWNTDMSGCFVKINSEEAPWSSAKEFEGGNTGHRPGVKGGYFPVAPVDQFQDMRSEMCLLLEQIGIPVEVHHHEVAGQGQNEIGTKFSTLVERADWTQWAKYIIHNVAHSYGKTATFMPKPVVGDNGSGMHVHQSIWKDGQNLFAGNGYAGLSETALFYIGGIIKHARALNAITNPTTNSYKRLVPHFEAPVKLAYSARNRSASIRIPHVSNPKGRRIETRFPDPMANPYLCFSALMMAGLDGIQNKIHPGEAADKNLYDLPPEEDAKIPTVCAGLDQALEALDKDREFLTRGGVFTDAMIDAYLGLKEQELAKFRMTTHPIEFEMYYSL

SEQ ID NO: 16291 - protein, 1446 aa, Oryza sativa Japonica Group
MDENRKLSDDMSKKMEPIHSNGEAGEDKTIIIEPESDANKLEVETDARHGICEAHKAHEYGTMENDLHEEASTTDDDSENDSYEYLLRESDNEQTSESDAGEGDNEAPLTDEEVETLITEFLDAESKAAQAQESLEKESLEKIESEVRLELSESLQGNELESAVSTEMKQYKKEWESELDDLETHIAVLLEQLDAAGVELPSLYKSIESQVPNVCETEAWKNRAHWAGYQVPEEANKSIRKADEYLQSCRPVRRKHGRLLEEGASGFLAGKIPVGDDGSAQCHEKSWNAFNELTKSKEYAESSFGSSNWASVYLASTPQEAAALGLQFPGVDEVEEIAEVEGAVSDIKGVDEIELSEVQRRKYRKVPEEDDAKMTKRLQRHLKERRTRHLHKENIGLASSSNGCCELPPKKLKTYENGVSVELAKRTREDDVEFDNKRSKTVIIESDDDMQTDSKPDSAPSENADEIIDLDIFPSQSPKLGDKVRPKPFKCTICTEMLNVPEVHRHPVLDVIICGSCRFLVIEKNRLEDPVSGGYCTWCVKSEQLQSCSSCKLLFCRNCLSKNFGEEGLSEARVAGWQCCCCLPSQLEHLISDCDKALGGVESSDPENDFAELSVLESNGPFSKHKMKKRIRRIMDDEELGEETKLKIAMEKARQEHLKSMQEQSASKLKSNNIGISLEAPSEVSEYVGDGHIVNLAREEDEAPVRIPSSISAKLKPHQYRITITLVMISVQLYLYCYRKLKYIMIFQVSGIRFMWENVIQSVKKVKSGDKGFGCILAHNMGLGKTFQVITFLYTVMRCIQLGLRTALIVTPVNVLHNWKKEFIKWCPAELKPLRVYMLEDVPRCRANIQYLLKKWRIKGGVLLIGYSSFRNLSLGRSARDKTVANEITNALQMWVLIQSIYICHNQCGPDILVCDEAHIIKNRRADTTQALKQMVDFVREGYLGSSHEFRNRFQNPIENGQHTNSTSDDVKIMNQRSHILYEQLKGFVQRMDMNVVKNDLPEKKVFVVTVKLSQLQRKLYRRFLDVNGFSSSAASEKSFQRSGFFAKYQTLALIWNHPGLLQMAKQKGNLRQEDVESFLMDESSSDDNIENYLPNGEKLRSRNDQLSKKSSDVVNEESNWWENLLDENAYKEADYSGKMVLLLDILSSCSELGDKALVFSQSLSTLDLVEFYLSKLQVNGKEGKYWKQGKDWYRIDGSTPSSERQNLVERYGQTKPVYAYRLMAHATMEEKIYKRQVTKEGLAARVVDRQQVSRTISKEEMLHLFEFGDEELLEQSGSTMNGHSKVGTEKPPTPNSSETTEHLPLDRLMVNLLHDHSRWIASYHEHETLLQENEEERLTKEEQDMAWLSYNKLLEVAPRKATHDAERKPSTVPTESSLIQPPKATSRSRQPQQPKITSNNQKKCNNLSHLLTLRSQGTKPGCSTSCKECGQDISWETLNRDGRSR

SEQ ID NO: 16292 - protein, 448 aa, Lactobacillus plantarum WCFS1
MAKQSYSKDDIRRIVKEENVNFLRLMFTDLFGTIKNVEVPVSQLDKLLDNKLMFDGSSIDGFVRIEESDMYLYPDLSTWLIMPWNTEHGKIARIICEVYTSDRKPFEGDPRNNLIRVLNDMREAGYTSFNCGTEPEFFLFKMNEKGEPTTELNDKGSYFDLSPMDLGENCRRDIALELERLGFNVEASHHEVAPGQHEIDFKYADALSAADHIQTFKLVVKTIARKYNLWATFMPKPLNGVNGSGMHVNMSLFHDQGNAFYDANDKNGLELSSDAYHFLGGLMKHARSYTAVTNPTVNSYKRLVPGYEAPVYVAWSASNRSPMIRIPSARGLSTRLELRSVDASTNPYLAFAAVLEAGLDGIKNGIEPPKSVDRNIYVMDEDERAAAGIADLPSTLHNALKEFQTDPTMKKALGPHIYQSFLEAKRLEWASYRQQVSEWERDQYMELY

SEQ ID NO: 16293 - protein, 221 aa, Pseudolachnostylis maprouneifolia
LNLKIPLMKNKVRMICDCLAPPVKVIQDKRLPQPLSLCGSTLRSPHGCHSQYMANMGSIASLVMSVTINEDDNEMDSDQERGIKLWGLVVCHHTSPRFVPFPLRYACEFLIQVFGVQISKEVQLAAESREKHILQTQTVLCDMLLRDAPVAIITQSPNVMDLVKCDGAALYYRKKFWLLGITPTEAQIKYIADWLLEYHGESTGLSTDSLMEAGYPGATIL

SEQ ID NO: 16294 - protein, 71 aa, Glycine max
MQPLAPGGILTVFFCGILMSHYAWYNVTETSRITTRHVFATMSFIAETFIFLYVGMDALDIEKWKMTQLRS

SEQ ID NO: 16295 - protein, 214 aa, Zea mays
  misc_feature (96)..(96): Xaa can be any naturally occurring amino acid
  misc_feature (118)..(118): Xaa can be any naturally occurring amino acid
  misc_feature (138)..(138): Xaa can be any naturally occurring amino acid
MAYSMLSSAAVVTSPAQATMVAPFTGLKSSSAFPVTRKANNDITSIVSNGGRVSCMKVWPPVEKKKFETLSYLPDFTEVELGKEGDYLLPAQGIPXVKSKLSKDFVYREHGSTPRIQXGRYWKMGKSPLFGRPPLAQXVKEAQKGKKGNPKPFLQGSSGFKTTREGRGVIFFPQKKPKFPGGLKLLLKKKKLSLFFLPKKGGCFFFLRGIVEKK

SEQ ID NO: 16296 - protein, 162 aa, Medicago sativa
MQIQIAKQKQKNKKRNMGFTEKQEALVNSSFESFKQNPGYSVLFYTIILEKAPAAKGMFSFLKDSAGVQDSPKLQAHAGKVFGMVRDSAAQLRATGGVVLGDATLGAIHIQNGVVDPHFVVVKEALLKTIKESSGDKWSEELSTAWEVAYDALATAIKKAMS

SEQ ID NO: 16297 - protein, 1514 aa, Cryptococcus neoformans var. neoformans B-3501A
MGTYPQQHLPSSMLASDTQTGVGISASSSVISSQSPSSKPSSTHRITLRMPQQPESTADLDSESESLTPSPEEINIGQGIGEEVSDQERAGDDESEGEAEQDDFNYDEEEEEDYDEDELMEEGDDDDDDDDPNFGERKKKAKKARAKMDSDRPVKPKKSAGAFPMRKQVDESSDEDYGTKAHKKKYFSKTGVSRKATPGTPYSEDNAFRRGAAKRVVTYNEADVDYGLESEDDAADTGYHYTAGAPAEAEPADEIDQVMFHWRDENHKDDPKDIPQVNLRFHIKWKDYSHIHNTDETYAFLKNYKGFKKVENYITKVWTIDQRYHHPEPDAAWKPTQEEMEQYEIDKERIKELQESYKIVERVLDEKEEKRKEGRATLFFVKWTNLQYSDCTWETYEDVMECQGAKEGIEEFHQRQARTTIPARSISYGIDNRPTYQKIPENPPYLACGGALKPFQLTGLNWLAYVWSKGENGILADEMGLGKTVQSVSFLSYLFHVQHQYGPFLVVVPLSTISAWQAQFKRWAPELNVICYMGSARSRDVIRQFEFGPLKNLKFNVLLTTYEFILKDRQDLQQIKWQVLAVDEAHRLKNHESQLYEALKSFWSASKLLITGTPLQNNVKELLALMHFLMPEKFQLANDFDLNDASEDQGAKIKDLHDKLTTLMLRRLKKDVVKELPTKSERILRVEMSAMQTHYYKNILTKNFAVLSKGGTQQVSLMNVAMELKKASNHPYLFEGAEDRSKPANEILRGLVMNSGKMVCLDMLLSRLKSDGHRVLIFSQMVRLLDIISDYMTARGYVHQRLDGTVPSDVRKKSIEHFNAPGSPDFAFLLSTRAGGLGINLETADTVIIFDSDYNPQNDLQAMARAHRIGQQRHVSIFRLVSKGTIEEDILERAMRKMLLEYAIINKMDTTGAHINGSSTPKDKNVDLSKEELSAILKFGARNMFKTDDSTQNKKLDEMNLDDILNNADAFDTESAAAPGTTSLGGEGFLSQFAAIQDVKADVDNLSWDEIIPEDERGKAEEEENAAATAEIVAASSRKRAAAKAPGTYQDMDLDDHDGSSKPGSPNDKKPKAPGQLKKTPAQRALELKDRDLRVLIRGIQKWGDIRSRYEPIVKEAKLENKNRVVIIQTCEDIITHGEQTIAAHKAHIRDLQERGEPISSSLRQKAILFTYKGVASINAETVVARYYELKALVEHFKRVEDFPSYTIPHDSLKPTMNWTVEWTAREDSQLLVGIWKHGFGSWEAIAHDPELHLNDKIFLEDPKAAKLDPNAPKPGVPGPVHLQRRGDYLCGIIREYEENRRILVEQQAMIASLPAKEGFGFEHPPLPSIAGPSKKPSPSIASSSKDRDSGKGKRRKTPEYTDSEDESSYESMDEDAVKELLRPAKKHLKKLKSGTENLSREEKIVALKECLAGIGARIDEVVAEKAAEGQNATKWRKHCWVFASFFWPRQGVNYSKLMEIHGKMVNESGPTTSKSKAKPKRKTEDDPSKPNKKPRLSDSQKEIKVEGSSGEQL

SEQ ID NO: 16298 - protein, 159 aa, Synechococcus sp. RS9917
MSVNVSAVTVRAADGSEKSLGDYSGQVLLIVNVASRCGFTKQYAGLQALQDAYGSKGLQVLGFPCNDFGAQEPGTLDEIKSFCSTTYGASFELFDKVHATGSTTEPYTSLNQTNPAGDVAWNFEKFLVGKDGTVIGRFKSGVTPEDPELKAAIETALAA

SEQ ID NO: 16299 - protein, 1033 aa, Cyanobium sp. PCC 7001
MSLLHATWLFPPEGAGGRLFLWADTWRVATPTTPGRDAPEHPLALDEDSLAEWLDDNGLWAEALRPARATLTLPSRQQAARGRRSSGGSWSGLPLQAGEPIPKQLQWWPWQVTGWALDPASAAEWLSLLPLAGDHPEIGDDVRWWTHLQRWSLSLIARGRWLPQIEEGKARWLPLLNREDDRRRLEDLATGLPQVATCALAAGLQGDPSLACRRPGSGRLRVASLVGALLDGQLRQDFRPDTTGLDPLLTAWQKALGKGDGSLPLDEEELERLDIATHHWREGVAGRVAPARACLELFTPAEGDELWEVQLSLQAEADPSLRVPAALAWAAGDQGLQLGEVAVAQPSELLLEGLGRALTVFEPILHGLDSATPETMQLTPAEAFVLVRTAAAQLRDVGVGVVLPASLAGGLASRLGLAITAELPANSRGFTLGEGLDWSWEFMIGGVTLTLRDLETLAAKRSPLVQHKGAWIELRPNDQRNAERFCAADPALSLDDALRLTATEGDTFHRLPVHAFTAGPRLQAVLEQYHQQKAPDPLPAPPGFAGQLRPYQERGLGWLAFLHRFDQGACLADDMGLGKTIQLLAFLQHLKAEEELKRPVLLVAPTSVLTNWKREAAAFTPELGVREHYGPRRPSSEAALKKALKGVDLVLTSYGLLQRDSELLETVDWQGVVIDEAQAIKNPSAKQSMAARDLGRPGKGSRFRIALTGTPVENRVSELWALMDFLNPRVLGDEGFFHQRYRLPIERYGDMASLRDLKARVGPFLLRRLKTDKSIISDLPEKVELSEWVTLSPEQKKLYSRTVDDSLEAIARSPLGQKHGQVLALLTKLKQICNHPALALGESAEAASSAGPASFAARSAKVQRLEEILEEVIEAGDRALLFTQFAEWGLLLQAHLQKRWRQEVPFLYGSTSKTERQAMVDRFQEDPRGPQLFLLSLKAGGVGLNLTRASHVFHIDRWWNPAVENQATDRAYRIGQQNRVMVHKFITSGSVEEKVDRMIREKSKLAEEIVGSGEDWLGGLDVGQLKDLVALEE

SEQ ID NO: 16300 - protein, 476 aa, Synechococcus sp. CC9605
MSADSVPFLQPGIAWALVVLFSVLWVSLGIAWGRRGQGNADDYMLAGRNIGLALSTATLMASWVTGNTTLLAPEFGYKTGLWGMFSYALAGLGLILFAPLASRIKQLMPNGRTSGDFIRLRYGRLAWWVFMLITAIYTLGFLMTQAMGAGLLLQALSGFDYHVGMMVVIGVATFYTLFGGMRAVIGTDFIQSLLIMVLLAVVAVLAFRQFPMPEVHASLLARHPDRLDLLLPAGLLIAWNSALFSMGEVFHNNIWWSRVFASRRSVVMASFVLGGIAWMSVPMVTGSIGLVALARELPLEQVNMVFPVMAADLLGAGGAALVFVVVFASLTSTLDSLLASTADLLAEDVYFRLLRPQASDLQLKQAARLMVVGLAVVTLALSWPRLDSLASVLFFTGALVASTVWPVACGLYWRTANRTAAIAAMLAGSVVGLLAYVLIAPYCAAVFSAAVSAVVMLMGSRIWPERFDFTLLQEEG

SEQ ID NO: 16301 - protein, 212 aa, Akebia trifoliata
MGRGKIEIKRIENSTNRQVTYSKRRNGIMKKAKEITILCDAQVSLVIFSSTGKMSDYCSPSTTLTKVLDRYQKTSGKRLWDAKHEYLSTEVDRIKKENDCMQIELRHLKGEDITSLNPKELIPIEEALENGLVNVRAKQMEYLKMLKKNERYLEEENKHLRCILHHQQIEIEGNMRMEMENGYNTQKGRDYPSQMPFAFRAQPMQPNLQENK

SEQ ID NO: 16302 - protein, 441 aa, Pasteurella multocida subsp. multocida str. Pm70
MNIYTYICFLSAISIFIGFVTRKLSDKIQYTIAITATSIIVSVLFLIFGHLSWFKLDIIATQVMEQLDFKSFLLNGILGFLLFAGALGIKLPVLKNQKWEITVFALFSTLASTFIIGVLLYSVAYLIGLPIDLIYCILFGALISPTDPIAVLAIIKNLKAPKRLSMQVEGESLFNDGVGLVIFTTIFAVAFGGHAPTLAGITELFLQEAVGGILFGLVIGFVAHLLISSTDDGSLEILLTLTIPTAGFMLANMLHVSGALAMVVAGILIGNWTRHTGFSKQSQLYLDHFWEMIDHFLNSLLFLLIGLALLLVDFGAQGFILLILAIPICLIGRYISVWMPFKVMQRFRSYNPYTLRILTWGGLRGGLSLAMALSIPKGMLYLEHIGMDVRDLLLVMTYAVVTFSILVQGSTIETMIKKSKESILHQRGYVGLHPNKTSSED

SEQ ID NO: 16303 - protein, 374 aa, Loeseneriella africana; identical to SEQ ID NO: 9380

SEQ ID NO: 16304 - protein, 506 aa, Brassica oleracea
MEVLASSSLSPIFTKRNTINPNFSIQVKLFVSQPSKTLKASSFRYARPPRRIANPGLVFVCNRCWCLLERNDHRKFSGKIMMKSSVSFRKNLSVALVRLVSVLLVSSISVVTTDSPSWGLSEENLLFLEAWRTIDRAYIDKTFNGQSWFRYRESALRNEPMNNREETYMAIKKMIATLDDPFTRFLEPGKFQSLRSGTQGAVTGVGLSIGYPAASDGAAAGLVVISAAPGGPAYRAGVSQGDVILGIDNTTTETLTIYDAAQMLQGPEGSTVELAVRSGPETRVLSLTRERVSVNPVKARLCELPGSGSNSPKIGYIKLTTFNQNASVKEAIETLRGNNVNAFVLDLRDNSGGSFPEGIEIAKFWLDKGVIVYICDSRGVRDIYDTDGSNAIATSEPLAVLVNKGTASASEILAGALKDNKRALVYGEPTYGKGKIQSVFQLSDGSGLAVTVARYETPAHTDIDKVGVTPDHPLPKSFPKDEEAFCGCLKDPTAACYLNQGLLFSR

SEQ ID NO: 16305 - protein, 363 aa, Loeseneriella africana; identical to SEQ ID NO: 9382

SEQ ID NO: 16306 - protein, 365 aa, Loeseneriella africana; identical to SEQ ID NO: 9384

SEQ ID NO: 16307 - protein, 443 aa, Rubrobacter xylanophilus DSM 9941
MSEITRENVVREARERNVKFIRLWFTDILGTLKSFAITIDELEDALDGGMGFDGSSITGFNAIEESDMIAMPDISTFKIIPWSPKDAPTARMICDVRTPEGDPYVGDPRYVLRRALERAHEMGFDNFYCGPELEFFYFKDSSAPEPLDYGSYFDLTTLDAATALRRDTVLALQELGIDVEYSHHEVGVSQHEIDLRYDDALSMADAVMTYKTVVKEIATQHGVYATFMPKPIQNQNGSGMHTHQSLFSNGRNAFFDPDDEYFLSETAKQFIAGQLRHAREISIIFAQYVNSYKRLVPGYEAPVYIAWSRRNRSALVRVPLYHPGKEQATRVELRCPDPAANIYLCFAALLHAGLEGIEKGYELPEPMERNLYHLTHEEREKLGIQSLPEDLGEAIKEAENSELLHKTLGDHVYNRLLQLKREEFEEYRVQVTPYELQRYLPVL

SEQ ID NO: 16308 - protein, 260 aa, Vitis vinifera
MKGRVCELCNEEASLYCGSDSAFLCWSCDARVHGANFLVARHVRHTLCSECNGLAGDTFFGVGFQPHRLICRSCSSEVESETSTDHDSKSSSSPCVSTTESAPRKGGVSRRKAERTGFTSSVSAVSGVDSRFPSKLRARSSVDAKAEDILVNWCRKLGLNGSCTSVASHALGVCLVKLTVLPLRVSLVAAISCAAKLSGDRSAYTPQNLKRLVEISGVPAKLILAAESKLARVLKMERRRPRHVRDREEGWAECSGEEFR

SEQ ID NO: 16309 - protein, 916 aa, Verrucomicrobium spinosum DSM 4136
MSADLLPLFHLTPEGVLVLTPEGLAATEEVSAKLEKALRATHADEGSATAALLHLAGEMADGDLPADLAWWRHLVREFIMQFCQVPGLREGAWQNPVQLPAQPLLDQWIQEAPPVQGMEYLTPASLAVLWQDLHRTLAARIVAAGNDVEAVLRELHPVWRMVGRVTLHLAENKRDPQRPFAFIATYTHRVNARSEPQHQPLARALQDSAGRNDRSALQTLLEPLNAASKRSALVQQLIASKRVFQALAWEPAEAFAFLQEIPVFEESGLLVKVPDWWQGRRPPSPQVQVTLDAGDKQSTVGAQVLLSFNVNVALGGEPLTREEIDKILASDAPLISLRGKWIEPDRERLQQALNHWHRAEAANRDGVPFHEGLRWLAGWQGGAAAADGVTLDDTGGLVSFMAGDALRSLLAGMRAEAEGAGSRPPSGLKATLRHYQQRGLDWLDFMGRLGCGACLADDMGLGKTLQLIALVLRRREARSKAGQPLTPSLVVAPASLLANWEREFKKFAPAVPVVIAHRSSLSAGELAKVESGEHPAMRDGGVFLTTYTTLGKLTGFNEITWDLAVLDEAQAIKNAGSSQARTVKKLQGTLRIALTGTPVENRLGDLWSLFDFLNPGLLGSAGSFAARARQMSKAGSGYAPLRKLVRPFILRRVKTDPAIAPDLPRKTEMTAFCSLTKRQAQLYQRVVTALARELGDTEDQIQRQGVILAALMKLKQICNHPSQWSGDSRYLPADSGKFQRLEELCSGIADRQEKVIVFTQFKEMTLPVADYLATVFGRPGLVLHGGTAVGKRGQLVEEFQSPGGPPFFVISVKAGGTGLTLTAASHVIHFDRWWNPAVEDQATDRAYRIGQTKAVMVHKFVCQGTLEEKIDGIIREKRALANEILGGEGDGAVKLLTEMSDKDLVEFLQFRAIGAE

SEQ ID NO: 16310 - protein, 364 aa, Maytenus fournieri; identical to SEQ ID NO: 9385

SEQ ID NO: 16311 - protein, 167 aa, Synechococcus elongatus PCC 6301
MKIRNVSMAPQVTDIAVTTIDGAAKSLSDYAGQVLLIVNVASYCGYTSQYSGLEALYRQYRDRGLQVLAFPCNDFGAQEPGSNEEIKTFCSTRFDVSFELFDKVHAKGADQHPLYAALTQTDPAGDVAWNFEKFLVGKDGTVLARFKSGVAPNDASLIQAIEAALAA

SEQ ID NO: 16312 - protein, 834 aa, Oceanicola granulosus HTCC2516
MDIVLITAVIASLFLVIAAAEPLAARLRLPYSVILAVLGMMIGVAALFFLRTELTDALNPVAEAILGLPIRSNVFLYVFLPTLLFQATLGMNLRRMLDDWVPILVLAVVAVVVATLSVGYALAWVSPLPLVACLLIGAIVSTTDPSAVVSIFRSISAPRRLARIIEGESLLNDAAAIALFGLFMGFVMRGVPDPEIGPALARFPILIGGGAAAGWLAARVGLWVMALFGRHELAVISVSVALPYLAYIGAEQSIGASGVIAVVAAGLTLNLAGPGRLPPQAWLNLREVWDLLAHWAGALIFILAALLIPRLLEGTRPGDFLLIGVVILAAIAARAVILFGLLPLLTLLRASPVVERPYRTAILWGGLRGAVTLALALAVTESFRVPVEVKRLVGILATGFTLFTLLVQGTTLRMVIGWLGLDRLSSIDEAISRQVVAVALQTVREDVARTTEAYALSRDIVRSEAKAFGERLELAVKAAEDTTDILERDRITLGLIALAGFERETILDRVRERTISGAMAEPILSDADRLIEATRVGGRNGYQRAARRSVAYGGAFRLAVLLHNRLRLSAPLVRMTSDRFERLLSQRLILRDLGAFVDTRIRRIHGPRVADLLHELLARRIDIVETALEGLRLQYPGHAEELERRFIRRTALRMEEREYTAMREDGLIGAEVYTALMQDLAGRRALAEARPRLDLAVQRAVLVRQFPFFADLDEAALRRLSRSLRTRYVDAGRVIVRKDTPLRSVYFIASGAVELERAGQTWRLGRGEMFGQMAILSDRTRRTEVRTIAPSTLLVLDETRFRSLLKRSAPLRNAVRASAEKRGIELSSLEEMEL

SEQ ID NO: 16313 - protein, 363 aa, Maytenus fournieri; identical to SEQ ID NO: 9387

SEQ ID NO: 16314 - protein, 239 aa, Oryza sativa Japonica Group
MESRKPPPSALVDNHVVPGDVVLDLAEMTNQTIKLGAGLRQDCDTIQATSAGRLRLSKPSKYWVESSQKRYIPSVEDTVLGVVVDTKPDNFLVDIKGPNLAFLPVLAFEGGTRRNIPKFEIGTLIYARVVKANSIMNPELSCMDATGKAAEFGQLKDGYMFDTSTGLSRMLLSSPTCPILEALGKKLSFEIAVGLNGRVWVNAPSPSNVIVVSNAIIKSESLSGIGQRSMVESLLERLS

SEQ ID NO: 16315 - protein, 473 aa, Prochlorococcus marinus str. MIT 9313
MGKSPQDVLRQIKDEGIELIDLKFTDLHGKWQHLTVCSDLIDEEAFANGLAFDGSSIRGWKAINESDMDMVPDASTAWIDPFYRHKTLSLICSIREPRSGEPYARCPRALAQKALGYLAGTGLADTAFFGPEPEFFIFDDVRYNSGEGGCFYSVDTIEAPWNSGRIEEGGNLAYKIQLKEGYFPVPPNDTAQDIRSEMLLLMGQLGIPMEKHHHEVAGAGQHELGMKFAELIEAADNVMIYKYIVRNVARKYGKTATFMPKPVFNDNGTGMHVHQSLFKGGQPLFFGEGTYANLSQTARWYIGGILKHAPSFLAFTNPTTNSYKRLVPGFEAPVNLVYSQGNRSAAVRIPLTGPNPKAKRLEFRPGDALANPYLAFSAMMMAGVDGIKNQIDPGDGFDEDLFELPEERLASIPTVPASLNGALEALNADKNYLMEGGVFTEDFIDNWIDIKYEEVQQLRQRPHPHEFTMYYDA

SEQ ID NO: 16316 - protein, 143 aa, Zea mays
  misc_feature (66)..(66): Xaa can be any naturally occurring amino acid
  misc_feature (131)..(131): Xaa can be any naturally occurring amino acid
TQEATTTSPISTQQAWRSREANDGSVVFGEEQEALVLKSWALMKNDIRNLCLRFLLKVFEIAPTAXRCPCCCADSDVPLEKNPKLKTHAMYDFVMTCEATAQLRKACKVTMRETTLNRLCATHLRLSVSDXHFEDTDFALLDT

SEQ ID NO: 16317 - protein, 228 aa, uncultured cyanobacterium
HEVAGAGQHELGMKFAELIQAADNTMTYKYVVRNVAKKYGKTATFMPKPVFNDNGSGMHVHQSLWKGGQPLFFGEGTDANLSQTARWYIGGILKHAPSFLAFTNPTTNSYKRLVPGFEAPVNLVYSEGNRSAAVRIPLTGPNPKAKRLEFRSGDALANPYLAFSAMMMAGIDGIKNQIDPGAPTNEDLFELSAERLSAIDTVPASLNGALETLNADHHYLMEGGVFTQ

SEQ ID NO: 16318 - protein, 447 aa, Oenococcus oeni PSU-1
MTKLTKEAIKKSVKDEGVDFLRVMFTDVFGMIKNVEIPVSELDTVLDDNLLFDGSSIDGFVRIEESDMYLYPDLDTFRILPDSMTGEHDGKVAMIVANVYTSDRLPFEGDPRNNLIRVLAEMRKDGFSDFNVGTEPEFFLFKLGEDGKPTMKLNDNGGYFDLAPLDLGEHVRREIVLTLEKMGFEVEAAHHEVAPGQHEVDFRYADAVTAADHIQLFKLIVKTVARKYGYYATFMPKPIAGINGNGMHTNMSLSKDGKNAFDDPTDKLGLSKVAYHFLGGLLDHAQNFVAITNPTVNSFKRLTPGFEAPVYIAWSASNRSPMVRVPASRGASTRLELRMVDPTANPYLAFAVVLNSGLDGVEKETTPEHSVDRNIFLMDANERKKAGIKDLPDTLLTAVDNLSKDEVVISAISKRIADTFVEAKKLEYQSYRASVSKWEIKQYLQTF

SEQ ID NO: 16319 - protein, 615 aa, Boschniakia hookeri; identical to SEQ ID NO: 9392

SEQ ID NO: 16320 - protein, 228 aa, uncultured cyanobacterium
HHEVATAQHELGMKFAELIQAADNVMTYKYVVRNVAKKYGKTATFMPKPVFNDNGTGMHVHQSLWKGGQPLFFGEGTYANLSQTARWYIGGILKHAPSFLAFTNPTTNSYKRLVPGFEAPVNLVYSEGNRSAAVRIPLTGPSPKAKRLEFRSGDALANPYLAFSAMMMAGLDGIKNQIDPGDGVDVDLFELPADELAQIATVPASLNGALEALNADKHYLMEGGVFSE

SEQ ID NO: 16321 - protein, 480 aa, Bacillus cereus G9241
MAGMLYIGYWSYKKTSDLSDYMLGGRGLGPAVTALSAGASDMSGWMLMGLPGAMYATGLSSVWIAIGLLIGAYANYLILAPRLRTYTEVANDSITIPDFLENRFKDRTKILRFVSAIVILVFFTFYASAGLVSGGRLFENSFNLDYKIGLFVTVGVVVAYTLFGGFLAVSWTDFVQGCIMFIALVLVPIVAFTDVGGVTETFNTIKQVDASHLDMFKGTTILGIISFLAWGLGYFGQPHIIVRFMAITSIKDLKTSRRIGIGWMTISIIGAMLTGLVGIAYYAKNNATLQDPEMVFVTFSNILFHPYITGFLLSAILASIMSSISSQLLVISSAVTEDFYKTFFRRNASDKELVFIGRLSVLLVAMIAVVLAYHPSDTILTLVGYAWAGFGSAFGPAILLSLYWKRTNKWGVLAGMIVGAIVVITWVQIPGLKATMYEMVPGFFCSLLAVIVVSLLTKEPIKAIHREFNEMEAVLEEETK

SEQ ID NO: 16322 - protein, 592 aa, Boschniakia rossica; identical to SEQ ID NO: 9393

SEQ ID NO: 16323 - protein, 228 aa, uncultured cyanobacterium
HEVAGAGQHELGIKFAELIQAADNVMTYKYVVRNVAKKYGKTATFMPKPVFNDNGSGMHVHQSLWKGGQPLFFGEGTYANLSQTARWYIGGILKHAPSFLAFTNPTTNSYKRLVPGFEAPVNLVYSEGNRSAAVRIPLTGPSPKAKRLEFRSGDALANPYLAFSAMMMAGLDGIKNQIDPGDGVDVDLFELPADELAQIATVPASLNGALEALNADKHYLMEGGVFSE

SEQ ID NO: 16324 - protein, 608 aa, Boschniakia strobilacea; identical to SEQ ID NO: 9395

SEQ ID NO: 16325 - protein, 220 aa, Sauropus androgynus; identical to SEQ ID NO: 9396

SEQ ID NO: 16326 - protein, 188 aa, Pseudotsuga menziesii var. menziesii
DDVTVITMDGAPKEGCQHISVLTEADETQCPSVEIHPDDVVALPYSSGTTGLPKGVMLTHKGLVSSVAQQVDGENPNLYFHSEDVILCVLPLFHIYSLNSVLLCALRAGAATLIMQKFNLTTLLELIQRYKVTVAPIVPPIVLDITKNPVVSQYDVSSVRMIISGGAPLGKKLEDALRDRFPKAIFGQ

SEQ ID NO: 16327 - protein, 581 aa, Pseudomonas putida KT2440
MKAHEIAYGQRLLRGQAPSYERLQARLAGDGSQPHDQPRAVHCGWGRLLIGHTYPDPASLAEDLLDEHPGERDIALYVAAPQQVLAQAPQQLFLDPSDTLRLWFTDYRPAQRVFRGFRVRRAQNPADWQAINTLYQARGMLPVDAELLTPRHLGGPVYWLAEDEDSGAIIGSVMGLNHTKAFDDPEHGSSLWCLAVDPHCTRPGVGEVLVRHLIEHFMSRGLAYLDLSVLHDNRQAKRLYQKLGFRNLPTFAVKRKNGINEQLFLGPGPQADLNPYARIIVDEALRRGIEVQVDDAAGGLFTLSLGGRRIRCRESLSDLTSAVTMTLCQDKRLTQHALHNAGLQVPAQQLAGNADDNLAFLEEHGAVVVKPVDGEQGQGVAVNLTCIDDITRAVAHARQFDSRVLLESFHAGFDLRIVVIGYEVVAAAIRHPAQVLGDGKHSVRQLIEAQSRRRQAATGGESRIPLDDETERTLRAAGVGYDDVLPAGQRLAVRRTANLHTGGTLEDVTERLHPVLADAAVRAARALEIPVVGLDFMVRDAGQPEYVIIEANERAGLANHEPQPTAERFIDLLFPHSRPLA

SEQ ID NO: 16328 - protein, 228 aa, uncultured cyanobacterium
QHEVATAQHELGMKFAELIQAADNVMIYKYVVRNVAKKYGKTATFMPKPIFADNGSGMHVHQSLWKASQPLFFAPGTYANLSDTARWYIGGILKHAPSFLAFTNPTTNSYKRLVPGFEAPVNLVYSEGNRSAAVRIPLTGPSPKAKRLEFRSGDALANPYLAFSAMMMAGIDGIENQIDPGAGVDVDLFELPADELAKIATVPASLNGALEALRADHHYLLEGGVFTK

SEQ ID NO: 16329 - protein, 398 aa, Brandisia hancei; identical to SEQ ID NO: 9399

SEQ ID NO: 16330 - protein, 221 aa, Thecacoris madagascariensis; identical to SEQ ID NO: 9400
  misc_feature (220)..(220): Xaa can be any naturally occurring amino acid

SEQ ID NO: 16331 - protein, 188 aa, Pseudotsuga menziesii var. menziesii
DDVTVITMDGVPKEGCQHISVLTEADETQCPSVEIHPDDVVALPYSSGTTGLPKGVMLTHKGLVSSVAQQVDGENPNLYFHSEDVILCVLPLFHIYSLNSVLLCALRAGAATLIMQKFNLTTLLELIQRYKVTVAPIVPPIVLDITKNPVVSQYDVSSVRMIISGGAPLGKKPEDALRDRFPKAIFGQ

SEQ ID NO: 16332 - protein, 228 aa, uncultured cyanobacterium
HEVAGAGQHELGMKFAELIQAADNTMTYKYVVRNVAKKYGKTATFMPKPVFNDNGTGMHVHQSLWKGGQPLFFGEGTEANLSQTARWYIGGILKHAPSFLAFTNPTTNSYKRLVPGFEAPVNLVYSEGNRSAAVRIPLTGPNPKAKRLEFRSGDALANPYLAFSAMMMAGIDGIKNQVDPGAPTNVDLFELSAERLSEIDTVPASLNGALEALNADHHYLMEGGVFTK

SEQ ID NO: 16333 - protein, 666 aa, Glycine max
MAGSWARRSLIVLAIISFGCLFAISIAKEEATKLGTVIGIDLTTYSCVGVTDAVEIIANDQGNRITPSWVAFTDSERLIGEAAKIVAAVNPVRTIFDVKRLIGRKFEDKEVQRDMKLVPYKIVNKDGKPYIQVKIKDGETKVFSPEEISAMILTKMKETAEAFLGKKINDAVVTVPAYFNDAQRQATKDAGVIAGLNVARIINEPTAAAIAYGLDKKGGEKNILVFDLGGGTFDVSILTIDNGVFEVLDTNGDTHLGGEDFDQRIMEYFIKLIKKKHGKDISKDNRALGKLRREAERAKRALSSQHQVRVEIESLFDGVDFSEPLTRARFEELNNDLFRKTMGPVKKAMEDAGLQKSQIDEIVLVGGSTRIPKVQQLLKDYFDGKEPNKGVNPDEAVAYGAAVQGSILSGEGGEETKDILLLDVAPLTLGIETVGGVMTKLIPRNTVIQPKKSQVFTTYQDQQTTVSIQVFEGERSLTKDCRLLGKFDLSGIPPAPRGTPQIEVTFEVDAERGILNVKARRAKGTGKSERSPISNEKGRLSQEEIERMVREAEEFAEEDKKVKERIDARNSLETYVYNMKNQISDKDKLADKLESDEKEKIETAVKEALEWLDDNQSMEKEDYEEKLKEEAVCNPIISAVYQRSGGAPGGGGASGEEDEDDSHDEL

SEQ ID NO: 16334 - protein, 188 aa, Pseudotsuga menziesii var. menziesii
DDVTVITMDGAPKEGCQHISVLTEADETQCPSVEIHPDDVVALPYSSGTTGLPKGVMLTHKGLVSSVAQQVDGENPNLYFHSEDVILCVLPLFHIYSLNSVLLCALRAGAATLIMQKFNLTTLLELIQRYKVTVAPIVPPIVLDITKNPVVSQYDVSSVRMIISGGAPLGKKPEDALRDRFPKAIFGQ

SEQ ID NO: 16335 - protein, 664 aa, Glycine max; identical to SEQ ID NO: 14910

SEQ ID NO: 16336 - protein, 445 aa, Bradyrhizobium japonicum USDA 110
MRKTLLFPLGALTGACLTLLVASPHGGVWAARAAAGADDAYSQLNLFGEVFERVKASYVEKPDNAKLIEGAITGMVTSLDPHSRYMNDKAWTEMQETTSGEFGGLGIEVTMEEGLVKVVSPIDDTPASKAGIMSGDLISKIDGDAVQGMTLEQAVNKMKGPVDTKTKLTIVRKGADAPLDIAITREIIHVRPVRFHVENGDIGYIRVTSFNEQTTDGLKKAIAAISREIPQEKLAGYVMDLRNNPGGLLDQAVSVSSAFLQRGEVVSTRGRNPEETQRFTAHGGDLTKGKPLVVLVNGGSASASEIVAGALHDHKRATIIGTRSFGKGSVQTIIPLGAGNGALALTTARYYTPSGRSIQAQGIAPDIEILQDVPPELKGRMDTMAESQMRGHLQAADGTEQTGSQSYVPPKEEDDKALHAAYDFLHGVTANAVAAKPAPKAAVPN

SEQ ID NO: 16337 - protein, 160 aa, Arabidopsis thaliana; identical to SEQ ID NO: 14641

SEQ ID NO: 16338 - protein, 535 aa, Arabidopsis thaliana; identical to SEQ ID NO: 13261

SEQ ID NO: 16339 - protein, 676 aa, Coprinopsis cinerea okayama7#130
MAEYLLPQGAGYGVVIGMGLFFSAFMILLTAIQARYTGFSPKDSEEFTSASRSIKPGLIASGIVSAWTWAATLLQSSAVAYKYGLSGPWWYGAGATVQILLFAMLAAKLKLNAPYAHTWLEIVGARWGRTAHLVFMFFGLATCLIVSSMLILGGSATVTDLTGMHTIAACFLIPLGVAIYVVVGGMRSTLLCDYTHTAVLFAIILTFIFTVYATSEKIGSPAKMHELLTLSSLINPVEGNKEGSYITMRSENGLVFGIINIVGNFATVFQDQAYWQRAIASRPATTVKAYLLGGLAWFSIPFTFATTLGLAAVALRGDPQMKVLTPADVSAGLPASAAAAALLGKAGAAAILILLFLAVTSACSAELIAVSSLLTYDVYKAYINPNASEEQILRVGHAGVALYAIVCGIAGTIFYYIGVSMGWLYTFMGVLLGSAVVPIALAITWHKANKWGCIGGAVLGFIGGMVAWLVTTAKLNHGVITVVTSGGDYEMLAGNVTSIGFGGIIAVVSSLIWPDNFDWETTRSINRPAPPSPDAAEQDSKSDLENEKKNASEVVTKPASIADSFDANEEANELDPVALRKAFRFASWASISLFVVLILLIPLPLFFSQHIYTVAGFTGWVAVGISWTFFSIFAVVIYPLWESRVAMYQISKGVIKDIFMKGGGRYQAEPPKTSAA

SEQ ID NO: 16340 - protein, 674 aa, Aspergillus nidulans FGSC A4
MARPSSGRGVAKPFATWTTIFYLLLVFIAPLAFFGSAHAQEDDSVQENYGTVIGIDLGTTYSCVGVMQNGKVEILVNDQGNRITPSYVAFTDEERLVGDAAKNQYAANPKRTIFDIKRLIGRKYDEADVQRDIKNYPFKVVNKDGKPNVKVDVNQTPKTLSPEEVSAMVLGKMKEIAEGYLGKKVTHAVVTVPAYFNDAQRQATKDAGTIAGLNVLRVVNEPTAAAIAYGLDKGSEERQVIVYDLGGGTFDVSLLSIDDGVFEVLATAGDVHLGGEDFDHRVMDHFVKQYNKKNNVDVTKDLKAMGKLKREVEKAKRTLSSQMSTRIEIEAFHNGQDFSETLTRAKFEELNMDLFKKTLKPVEQVLKDAKVSKADIDDIVLVGGSTRIPKVQAMLEEFFDGKKASKGINPDEAVAFGAAVQGGVLSGVEGTESIVLMDVNPLTLGIETTGGVMTKLIPRNTVIPTRKSQIFSTAADNQPTVLIQVYEGERTLTKANNLLGKFELTGIPPAPRGVPQIEVSFDLDANGILKVGASDKGTGKAESITITNDKGRLTQEEIDRMVAEAEEFAEEDRAIKAKIEARNSLENYAFSLKNQVNDENGLGGQIDEDDKQTILDAVKEVNDWLEENGASATTEDFEEQKEQLSNVAYPITSKLYGSAPPTEEDDDEYGHDEL

SEQ ID NO: 16341 - protein, 223 aa, Zea mays
MADSDNDSGGPSNAGGELSSPREQDRFLPIANVSRIMKKALPANAKISKDAKETVQECVSEFISFITGEASDKCQREKRKTINGDDLLWAMTTLGFEDYVEPLKHYLHKFREIEGERAAASAGASGSQQQQQQGELPRGAANAAGYAGYGAPGSGGMMMMMMGQPMYGGSQPQQQPPQPQPPQQHQQQHQQHHMAMGGRGGFGQQGGGGGSSSSSGLGRQDRA

SEQ ID NO: 16342 - protein, 516 aa, Bacillus sp. SG-1
MENDGIRKTKAIYWASGIVSICGIIFEVLFGAAGSYILGDGVKQYTLTISIFLTGMGIGASVSEKVTKHLIVSFIWIELLIGLIGGLSIFTLFGITAFFSEGTDAFFLYAVTAIVGALTGVELPILIRKANEIGETLNRSTARVLFSDYAGGLIGGLLFVFLLRPQLGLVKTAFIVALVNVIVALWLMFYFRDEIKSVKKHGAAGIFVLIFLLSGVFWGEEMAFTFEQKLYRDPIVHSENTNYQQIILTKEQGDLRMFLDGQLQFSSSDEYRYHETLVHPALSAAERKENVLILGGGDGLAIRELRKYDEVKHITLVDLDPRVIELARTNPAIAELNGHAFEDERVEVINQDAFTFMEKSDEFYDVILVDLPDPNNESLNKLYTLEFYQLLRNHLPPGGTMMVQSTSPTFATEVYWTIDKTIKAAGLQTENLHVDVPSFGDWGFVLAARDELSLSELTLQVETKFLTDEVLKGLGAFGKDTDALITDQDGNEVELEVNTLINPILIQKYERAWSTY

SEQ ID NO: 16343 - protein, 1187 aa, Oryza sativa; identical to SEQ ID NO: 11908

SEQ ID NO: 16344 - protein, 689 aa, Arabidopsis thaliana
MDAKRKLSQEKDMYQNDDKRKKVVALENQEAGGSCIDGNVAHWFSKTKFNGLVNVPIVYLALEENIVKNDLTLRSSLKHVIFGGSSGGSNSGKGLAKDLYLDGNELVEVHVRSDREINMMKDKGKAIFDLNEAVWPRDEAVSNTFEKSGATLTNCEHSWIWKQDLGHTCWICGIINKDHPLPPGFGSNICKDIKMRVPKDGFSGTGIFPHPLHKMIMKPHHFEIFNFLCKNLVVENSNGCIIAQTPLSEKTFLMISFIYGYLEKHPNSKPLFVLPKWVLNFWKTKFGELKVNDLVLLDFYSAKASTRSQQLEVLNRWIKTRSIIFLGAKQFSNIISDNSGAEASDSCRDILLNIPSVVVFDRGTDPRNEMMSFLKVVARIKTPHKVLLTGSLYQNNIKEVFNILDVVFPEFLKHNRIGKNIRKFLNVEADGPSTNLKMPLFDKLEEALLSQDSDHGDKISYLTELRMLTNKFIYNHKEEFLLEVPGLMDFTVLCAFSDRAKGLPAPNEDEMDEIIKEIDVTDGVKTKFFMGLVKLCGYTNEKILVVSQCVIPLIFLQRLVAKIKGWKDGKETFMIKACNEQIALPGATRVLMLDIIANPCMARQAIELAYHPGQQNKVYSYRLVAADTSEEGEDIIAAKKEIISGIWFDGKTYPIDENFCMPTIDGNYGNDYFLGASYMREDIKTIYKR

SEQ ID NO: 16345 - protein, 358 aa, Maytenus undata; identical to SEQ ID NO: 9410

SEQ ID NO: 16346 - protein, 286 aa, Salmonella enterica subsp. arizonae serovar 62:z4,z23:--
MAENTMWHETLHDQFGQYFAVDNVLYHEKTDHQDLIIFENAAFGRVMALDGVVQTTERDEFIYHEMMTHVPLLAHGHAKHVLIIGGGDGAMLREVTRHKNVETITMVEIDAGVVSFCRQYLPNHNAGSYDDPRFTLVIDDGVNFVNQTHQTFDVIISDCTDPIGPGESLFTSAFYEGCKRCLNPGGIFVAQNGVCFLQQDEALDSHRKLSHYFSDVSFYQAAIPTYYGGIMTFAWATDNDAIRHLSSETIQARFHAAGLKCRYYNPAIHAAAFALPQYLHDALSAQ

SEQ ID NO: 16347 - protein, 621 aa, Gracilaria tenuistipitata var. liui
MAKVVGIDLGTTNSVIAVMEGGKPTVIPNKEGLRTTPSVVAYTKKQDKLVGQIAKRQAVMNPENTFYSVKRFIGRKKDELGDELKQSSYNVKTDINSNVKLECPALSKDFAPEEISAQVLRKLVEDASTYLGQQVTQAVITVPAYFNDSQRQATKDAGQIAGLDVLRIINEPTAASLSYGLDKKNNETILVFDLGGGTFDVSILEVGDGVFEVLSTSGDTHLGGDDFDRKIVEWLIHEFSHDEGINLGKDRQALQRLTEAAEKAKMELSSLAQTDINLPFITSTDTGPKHLEKNITRAKFEYLCQDLINRCEIPVNNALKDAQLSSGNIDEIVLVGGSTRIPAIQQLVKKMIGKDPNQSVNPDEVVAIGAAVQAGVLAGEVKDILLLDVTPLSLGVETLGGVMTKIIDRNTTVPTKKSEIFSTAVDNQPNVEIHVLQGEREFTKDNKSLGTFRLDGIMPAPRGVPQIEVIFDIDANGILSVKAKDKGTGKEQSITITGASTLPKEEVEKLVKEAEENSELDKHKREQIDLKNQADALCYQSQNQINELKDKISEDEKQNVQKLIDSLKLSIQEDDYEKIKDIQNQLQQVMMNIGKQVYSSTQQDNSKTEDGSVIDTNSKEA

SEQ ID NO: 16348 - protein, 337 aa, Brassica napus; identical to SEQ ID NO: 2433
  misc_feature (168)..(168): Xaa can be any naturally occurring amino acid
  misc_feature (314)..(314): Xaa can be any naturally occurring amino acid

SEQ ID NO: 16349 - protein, 225 aa, Oryza sativa Indica Group
MPDSDNDSGGPSNYAGGELSSPREQDRFLPIANVSRIMKKALPANAKISKDAKETVQECVSEFISFITGEASDKCQREKRKTINGDDLLWAMTTLGFEDYVDPLKHYLHKFREIEGERAAASTTGAGTSAASTTPPQQQHTANAAGGYAGYAAPGAGPGGMMMMMGQPMYGSPPPPPQQQQQQHHHMAMGGRGGFGHHPGGGGGGSSSSSGHDEDEDEDEDEDED

SEQ ID NO: 16350 - protein, 245 aa, Maytenus undata; identical to SEQ ID NO: 9415

SEQ ID NO: 16351 - protein, 422 aa, Microcoleus chthonoplastes PCC 7420
MVGATAVVLTTVAVTGAGLHLSQSQAFFQESPKELVDEVWQIIDRQYVDATFNQVDWRAVRNDYLNREYSDKEEAYEAIREMLETLDDPYTRFMDPEEFKNMQIDTSGELTGVGIQIAQDEDTKKLVVISPIEDTPAFQAGILAKDLIVKIDGQSTEGMDVNDAVQLIRGKPGTDVTLTIQRDEEEIDYTITRARIEIHPVRYSYRSTPTGEIGYIRLNQFSAIAAQEMREAIKELETQDVNGYILDLRSNPGGLLYSSIEIARMWLDKGKIVSTVNRQGSSNEEVARNRALTDKPLVVLVDGGSASASEILSGALQDNERATLVGTQTFGKGLVQSVRGLGDGSGLAVTIAKYLTPSGRDINKEGIPPDIVIELTEEQRKELQKDRTKIGTPDDPQYVKALDVLNQAIAEEPNDRASVQTP

SEQ ID NO: 16352 - protein, 360 aa, Bacillus anthracis str. Ames
MPKHRKQSKIKIYRITNYKKDKRSELDSNKFELEQQAVENKQDKQGKQDNQVQSENVVIVPTDSHNLDIWDEISLKEIQAGEHTNLFAEQSNYQNINLLQVSDIRLYLDKQLQFSSVDEQIYHEALVHPIMSKVIDPKRVLILGGGDGLALREVLKYETVLHVDLVDLDGSMIDMARNVPELVSLNKSAFFDNRVNTHVCDAKEFLSSPSSLYDVIIIDFPDPATELLSTLYTSELFARIATFLTEDGAFVCQSNSPADAPLVYWSIGNTIEHAGLTVKSYHTIVPSFGTDWGFHIAANSVYVLDQIEQLYVVPTPRTLPSLLFPLFQFKEEHLEQRNFALLNSESNLILHQCYKKEMEF

SEQ ID NO: 16353 - protein, 1256 aa, Arabidopsis thaliana; identical to SEQ ID NO: 15373

SEQ ID NO: 16354 - protein, 480 aa, Methanopyrus kandleri AV19
MKLTVRELAENVEGEIRSGDPDSMIAGWFSTLGRAKEGDVVIRWWLDDKGAEIASERGVACLVTEHPRGKLIERCDELGIPLILTEVDRANEYALRVAREKCAPDATAICVTGTNGKSTTNHLLHHILDTAGFDAYCNTDFRSEKNTLIDPVVAMELREERPEDYLCVEVSEVQGLPTGRIMEDHAYRMAKALKCELAVVTNVGVDHTNLVSSLEEMVDAVYGVVRALRKGGIAVLNRDDRYVRRMTREGVETVWYGWDEGYSHIEERDGEEWIVLDEEPLIPVREFPLPVDHFLYNALAAVAAAGALGIDREDIAEGLRTYQPLKRRFERLCDDPLIYDDFCHNPDGVLATVRALRRLGRSKVIVVFAIRGSRGVDINRQIARALAEGAKDLQDEGIHVHVIATSSEGLVDDANVVRPEERRAFLEELERSGIDYEHYDRLEDALERALDLADDDTVILLGGAQGMEPAREVLRDMGAI

SEQ ID NO: 16355 - protein, 129 aa, Salmonella enterica
FGDNGSGMHCHMSLAKNGTNLFSGDKYAGLSEQALYYIGGVIKHAKAINALANPTTNSYKRLVPGYEAPVMLAYSARNRSASIRIPVVASPKARRIEVRFPDPAANPYLCFAALLMAGLDGIKNKIHPG

SEQ ID NO: 16356 - protein, 245 aa, Mortonia greggii; identical to SEQ ID NO: 9417

SEQ ID NO: 16357 - protein, 530 aa, Ostreococcus tauri
MDISTHRDAGARLMAPSPRRKVPLVAYNDVKDSPALKMSETPAKQRFETSPLSVLLKPISPLSENSPDWSDERTREGDASAIGSPEEPTTPRGDALGVFAKEVDHAARWDVRAFPADAPASANSVEVRRRRGKTRSGDFDRENTFDREFDFDDGRGVGDHDGDGHPMFRVFGRDIGKPPRASSEREEGDGLGKTSGRGRTRGLFGSFGNRSGAFERVGSGSSSMGSKRSDEIGQLSRMNSLAETKVLTSTLLVRQTSVSGDAQFDFDDHFRFEQQIGASQNSEVWLVTSKVSGNAFVVKKCLHSFTTEAQRAKYKREVEAAALLPEHPNIVRYYRSWQQDQHFYIQMEHCACGSLTSVFARLPPQTLVAELDVWRLAEQTASGLAFMHLHRIIHLDVKPDNIYIDVSGTCKIGDFGLAYVMESGWDWEEGDGGYLAPELLNLFPGQYPSPSADVFSLGVTLYEVASGLKFPRGATPRMAIPPLPEGRSAELARLIAGCLDFDPAKRATAQEVANFARENVAALEMGATSM

SEQ ID NO: 16358 - protein, 527 aa, Synechocystis sp. PCC 6803
MDTAVNESLSISYNLEQFLIVLSVSLSIATLSKTVPILRKIPYTLLLVIVGMALAFVDVKLINLSPELIMEIFLPPLLFEAAWNLQWRNLKENWFPITLFATLGVVICVVGIAFPLSYWGGMELAIAFLAAAALSATDPVSVIALFKELGASKKLNTLMEGESLFNDGVAVVVFLILVGIPLGTSTFDLSVTLARFVTVIGIGVGCGLVIGFSLSLLTQRFDLPFVEQSLTLVSAYGAYILAENLGGSGVIGVVVVGMVLGNYGSRIGMNPRTRLIVSIFWEFVAFFVNSIIFLLIGDQIGLSSLSDHLNLILIAIAAVVVTRLVSVFGLSLISNKVSDQISSTHITLQEQTVLWWGGLRGSVAIAVALSVPQAIAERQAIIDIVFGVVLFTLLVQGLTTQFVLKGLDLIGDQPQRLEYAELVSRQIALRRVLAELEKTDEFPDINPERLRYKQELVQGQLQSVTDKLKLLLQEYPLLQEVANKKFDQTVLDIEAETYADLIRMGRLEENIMPLLVTLEGENVAEPS

SEQ ID NO: 16359 - protein, 245 aa, Mortonia greggii; identical to SEQ ID NO: 9419

SEQ ID NO: 16360 - protein, 132 aa, Salmonella enterica
GSGMHCHMSLAKNGTNLFSGDKYAGLSEQALYYIGGVIKHAKAINALANPTTNSYKRLVPGYEAPVMLAYSARNRSASIRIPVVASPKARRIEVRFPDPAANPYLCFAALLMAGLDGIKNKIHPGEAMDKNL

SEQ ID NO: 16361 - protein, 245 aa, Paxistima canbyi; identical to SEQ ID NO: 9422

SEQ ID NO: 16362 - protein, 466 aa, Buchnera floridana; identical to SEQ ID NO: 9425

SEQ ID NO: 16363 - protein, 830 aa, Hordeum vulgare; identical to SEQ ID NO: 9424

SEQ ID NO: 16364 - protein, 228 aa, uncultured cyanobacterium
HEVAGAGQHELGIKFAELIQAADNVMTYKYVVRNVAKKYGKTATFMPKPVFNDNGSGMRVHQSLWKGGQPLFFGEGTYANLSQTARWYIGGILKHAPSFLAFTNPTTNGYKRLVPGFEAPVNLVYSEGNRSAAVRIPLTGPSPKAKRLEFRSGDALANPYLAFSAMMMAGIDGIKNQIDPGEGVDVDLFELPANQLANIATVPASLNGALEALNADKHYLMEGGVFSE

SEQ ID NO: 16365 - protein, 704 aa, Rhodopirellula baltica SH 1
MTFWQAHCGRGSGTDLAISVDPTKRLTKWTAQGPRSARRNPNSYHLTPTIQFGHRSSRIMAQGEKIIGIDLGTTNSVVAIMEGSEPKVIPNPEGNRLTPSVVAFTDKQETIVGEPARRQAVTNPKRTVYSAKRFMGRRHNEVQSEEKMVPYGITGGPGDYVKIQVGDSEYTPQEISAKVLRKLKESAESYLGHKVNKAVITVPAYFNDAQRQATKDAGQIAGLEVARIINEPTAAALAYGLDKKKDESIIVFDLGGGTFDVSVLEVADSGDEEQESRVFQVVSTSGDTHLGGDDFDEALINYVASEFQKDNGIDLRNDAMALQRLQEACEKAKKELSTLPETDINLPFITMDASGPKHLTMKITRSKFEELIDALVERCRGPVLQALKDAGMDPKDIDEVVLVGGSTRVPKVREVVKSIFGKDPHQGVNPDEVVAVGAAIQGSVLAGDRNDVLLLDVTPLTLGIETEGGVMTALVERNTTIPAEKKNVFSTAADNQTAVTVRVFQGERKMANANRLLAEFNLEDIPAAPRGVPQIEVKFDIDQNGILSVSAKELKTGKEANVEIKDSGALSDSDIEQMQKDAEANAEEDKRQFELVEARNKVNQQVYQLEKLMGENDDKLSDDDKAPMNAAIEKVKKAAEGDDLAEIKAASDELEAASQAFSKVLYEKTDAAGEAGADAAGAAGATAGGGDDDDAIDAEFEVKE

SEQ ID NO: 16366 - protein, 228 aa, uncultured cyanobacterium
HHEVATAQHELGMKFAELISAADNVMIYKYVVRNIAKKYGKTATFMPKPVFADNGSGMHVHQSLWKAGQPLFWGEGTYANLSQTARWYIGGLLKHAPSFLAFTNPTTNSYKRLVPGFEAPVNLAYSQGNRSAAVRIPLTGTNPKAKRLEFRSGDALSNPYLGFAAMLMAGIDGIKNQIDPGDGTDVDLFELSAEELAKISTVPASLNGSLEALKADHEYLLAGDVFTA

SEQ ID NO: 16367 - protein, 536 aa, Bacillus sp. SG-1
MFKVKMKGSHIMHELDLHHIFQLGLILVMIAAGITAVAKKLKQPYPIALVIIGALIGLFDIPVLEPLKLFITEGEVFNFVIITLFLPALLGEAALKLPFAHLKDNKEPIFSLAFVGTFVSTIIIGFSTIYFFDFSIPAAFVFAALMSATDPVSVLSIFKSVGVNKRLAVVIEGESLFNDGLAVVLFNISAFYLLSYLDAGWAGLGSGAWEFVRVVSLGLIIGGSLGFGFSVLTKYFDDYPLEIIFSIILFYGSFLLAESVHASGVIAVVVAALIFGNYGGRIGMSPTTKLNINNFWDVAALLANSLVFLMVGLEITRIDLVDKWQLILAAIPLVLVARSIAVYSSLAFIKSFPLKWKHILNWGGLKGSLSVALVLSLPREFTGREDILVLAFSVVLFSLVVQGLSLKPLIGWMGVKPEKEGSVEFEKLIAQLHRYETAITEIHRVKQKLYITDPVSEELVAVYEKRLDILKAEINELFEKVPDLKQDQMNSLKKHTLYAEHEAIDNLLREEIISNETAEREHERLTDAIINIEGKH

SEQ ID NO: 16368 - protein, 228 aa, uncultured cyanobacterium
HEVAGAGQHELGMKFAELIQAADNTMTYKYVVRNVAKKYGKTATFMPKPVFNDNGSGMHVHQSLWKGGQPLFFGEGTEANLSQTARWYIGGILKHAPSFLAFSNPTTNSYKRLVPGFEAPVNLVYSEGNRSAAVRIPLTGPNPKAKRLEFRSGDALANPYLAFSATMMAGIDGIKNQIDPGAPTNVDLFELSAERLSEIDTVPASLNGALEALNADHHYLMEGGVFTK

SEQ ID NO: 16369 - protein, 415 aa, Physcomitrella patens subsp. patens
MGWVGDHGEADREASQPLTAAAVPKDDYNIAYIIFFILGAGFLLPWNSFISAVDYFDVLYPNSHVDRVFSLAYMVPCFTFLLILTFYGQKYSSRLRINTGLFVFLAVFILVPVMDEVWITGSKGTKTTHVMTVAAACVLGLCDALVQGSLVGAAGELPERYMQALFAGTAASGVLASLLRVITKASMSQTVRGLRLSADVYFIVTGIFLLICLFSYNLVYKLPIMLHYNSMKIGAMESTLSTDSELTNFAKPVSYWHVWSQIQWLAISVAMLYVITLTIFPGYISEDVHSAFFGDWYPVLLIATYNSGDLTGKILTSVYMLENQSFMVRACFGRIIFIPLFYAIIHGPAIFRTEAPVFLLTFLLGLSNGYLTSVVMIVAPKNVSILEAETAGIIMTLFLATGLCSGSLLGWVWII

SEQ ID NO: 16370 - protein, 228 aa, uncultured cyanobacterium
HEVAGAGQHELGMKFAELIQAADNVMTYKYVVRNVAKKYGKTATFMPKPVFNDNGTGMHVHQSLWKGGEPLFFGEGTYANLSQTARWYIGGILKHAPSFLAFTNPTTNSYKRLVPGFEAPVNLVYSEGNRSAAVRIPLTGPSPKAKRLEFRSGDALANPYLAFSAMMMAGLDGIKNQIDPGDGVDVDLFELPADQLAQIATVPASLNGALEALNADKHYLMEGGVFSE

SEQ ID NO: 16371 - protein, 713 aa, Oryza sativa Japonica Group
MASASVPAAGYGADGVYRSLRPPAPVASDPGLSLTDLLLRRADACPSAVALADAAAGGRALTFAELRSAVLSTAVALSSRAGVRPGDAVLLLAPNCVLYPVCFFAVTALGAVGTTVNPDYTPREIAKQVSDARAKLVITISALVPKIAGLRLPVILLDDDANAAAASLPPDATVTLYTNLVAGVKEADYRRPPIKQSDTAALLYSSGTTGDSKGVILTHRNFIAAARMVTSDQDERREGPNVFLCFLPMFHIFGLSVITYAQLHRGNAIIAMSRFDINSLMEAVQRHRVTHLFCVPPVIIALAKHGKAGKYDLSSLKFIGSGAAPLGKDVMEVVAKKFPDSEIVQWALNWFIRKLVLSDLFGSIWYIPTVLDSRGVQAFLGYGMTETCGIISLEYPEKGQAREFGSTGTLVSGVEAKIVDIKTLKHLPPNQVGEICVRGPNVMQGYFNNVQATEFTIKQGWLHTGDLGYFDGGGQLFVVDRLKELIKYKGFQIAPAELEGLLLSHPEILDAVVIPFPDAKAGEVPIAYVVRSPDSSLTEVDVQKFIEKQVAYYKRLKRVTFVGSVPKSASGKILRRQLIAQLGIGHYLSNECLIPARSIVQQAAKGRGSDVCYAGSLAARVIVEDVRVGRRLDRRAPRLFYGSGACDLGEIREGKPAGEKREEAACEQQGCMPLAGHERKCRARGADRIVDGPNTGTRGPWFSGPLMDRSLAF

SEQ ID NO: 16372 - protein, 228 aa, uncultured cyanobacterium
HHEVATGGQCELGIRFGKLVEAADWLMIYKYCIKNVAKQYGKTVTFMPKPLFNDNGSGMHTHQSIWNGGQPMFAGDRYAGLSQMALWYIGGILKHAPALLALTNPTTNSYKRLVPGFEAPVNLAYSQGNRSASVRIPLSGDNPKAKRLEFRCPDATSNPYLAFAAMLCAGIDGIKNQIDPGDPLDVDIYDLSPEELAKIPSTPGSLLDALKALEADYEFLTSTGVFTP

SEQ ID NO: 16373 - protein, 1161 aa, Glycine max; identical to SEQ ID NO: 9430
  misc_feature (527)..(527): Xaa can be any naturally occurring amino acid
  misc_feature (539)..(539): Xaa can be any naturally occurring amino acid
  misc_feature (567)..(567): Xaa can be any naturally occurring amino acid
  misc_feature (576)..(576): Xaa can be any naturally occurring amino acid

SEQ ID NO: 16374 - protein, 188 aa, Pseudotsuga menziesii var. menziesii
DDVTVITMDGVPKEGCQHISVLTEADETQCPSVEIHPDDVVALPYSSGTTGLPKGVMLTHKGLVSSVAQQVDGENPNLYFHSEDVILCVLPLFHIYSLNSVLLCALRAGAATLIMQKFNLTTLLELIQRYKVTVAPIVPPIVLDITKNPVVSQYDVSSVRMIISGGAPLGKKLEDALRDRFPKAIFGQ

SEQ ID NO: 16375 - protein, 545 aa, Populus euphratica
MEAHMSSIGLKLQMLSTSDHASVVSMNLFVALLCACIVIGHLLEETRWMNESITALIIGVGTGIVILLISGGKSSRLLVFSEDLFFIYLLPPIIFNAGFQVKKKQFFRNFMTIILFGAAGTLICCAIISIGAMQIFEKMDIGPLDIGDYLAIGAIFAATDSVCTLQVLSQDDTPLLYSLVFGEGVVNDATSVVLFNAIQSFDLTNINAVIAWEFVRNFLYLFLTSTMLGVLTGLVSAYIIKKLYFGRHSTDREVALMILMAYLSYMLAELFYLSGILTVFFCGIVMSHYTWHNVTESSRVTTKHAFATLSFVAEIFIFLYVGMDALDIEKWRFVSDSPGTSVAVSSILLGLVMVGRAAFVFPLSFVSNLSKKSPHEKIGFRQQFIIWWAGLMRGAVSMALAYNKFTSAGHTNLRANAIMITSTITVVLFSTVVFGLMTKPLISILLPHPKYQSRSLSFSSDPATPKSFTVPLLGEGQDSLDDLGGRDIPRPSSLRALLTTPTHTVHYYWRKFDNAFMRPMFGGRGFVPFVPGSPTERNPPQNQWH

SEQ ID NO: 16376 - protein, 451 aa, Parvularcula bermudensis HTCC2503
MATALLTAGFARSGFDANTFRQLDLFGEVFEQVHENYVSDPDDKDLIEGAIDGMLLSLDPHSSYLSGDDYERMQEQTRGSFAGLGIQVTQETEGAGRGLVKVISPIDDTPAARAGFEPGDLIYEIDGQSVFGMTLEEAIGLMKGPKGTSVEISLIREDVPEPLDFTIVRDIVTVSPVSSRLEENDIGYIRLTGFTSQTERKMREAIRELDREAGGLRGLVLDLRNNPGGLLDQAVGVSDAFLDGGEIVSTRGRRSKDSMREVGDPGQMIAGVPIVVLVNGGSASASEIVAGALQDRNRALLLGTKTFGKGSVQTVLPLQNGANGALRLTTARYYTPSGRSIQAQGIVPDIVMPITHPGEEEPEKRRREADLPGALDVPEGDEPTTAQQILLEGQESIEEQERDEENASALFVEPTECPAEKDCQLDRALELLRDRPSYAALLADAGAIERQ

SEQ ID NO: 16377 - protein, 476 aa, Bradyrhizobium japonicum USDA 110
MVAKCTTAEDLVKAITDEKVQMIDLRFTDLPGVWQHFSVPPSAVNADALNEGIGFDGSSIRGFQEIQESDMLVVADPTTAFVDPYSPAKTLVLICNIRDPVTGQSYSRDARYIAQKAEIHLKGTGRADTSYFGPEAEFFVFDEVRYAQGINYAMHAVDSSEGSWNTGSEEGPNLGHKPRPKEGYFPVPPTDSMQALRTEMVLTMESLGIQIEAHHHEVATGGQNEIDMRFTTLTRMADNLMIYKYVVKNTAHQHGKTATFMPKPLFEDNASGMHVHQSLWKGETNLFYDKGDYAELSQLGRYYIGGLLSHAWALCGLCAPTTNSYRRLVPGYEAPINLVYSQRNRSACCRIPMYSPNPRAKRVEFRSPDPSCNPYLAFAAMLMAGLDGIDKQIDPGSPIDKNLYDLPPTEAKEVKSTPGSLDQALDALERDHAFLLRGDVFTADVIETWLDYKRKKEVDPIRLRPHPYEFHLYYDI

SEQ ID NO: 16378 - protein, 312 aa, Ostreococcus tauri
MVEKHVLSSKRSLGRFERYARAHCLNSADTSCSSLGVLSAKFMKLLSETENGILDLNHAATSLSAQKRRVYDITNVLEGIGLVSKLSKSKVALRRVDEDFVETTSGQHKEHKSLSRTVNIESSQTLPLASEDDASLHIETIRSFIRSTGIFISQADIIEQHALSSDMLIAVRAPTGAALLLPSPFTQERSPPHYRLFLRSNENSSAGVEVFTLGRRSGTCDAHDVIQILNGFSSLCREAQRAVWLLNSCDVLYFDINKDHVPVSFATILEFDNVHHNVTLIRQLPTFFLGVLFCHFLQVGNVFGTYSQGEKF

SEQ ID NO: 16379 - protein, 245 aa, Paxistima canbyi; identical to SEQ ID NO: 9443

SEQ ID NO: 16380 - protein, 494 aa, Marinobacter sp. ELB17
MQITSLNTLLQGVVVVPSVFDVTIHGLQTDSRKVRTGDAFVALAGAHTGPEHYIDDAIRAGASVILLESEQAGECSERSGALIVPVPELKVRLGKLADRFFEYPSQRLQLVGVTGTNGKTSVTQYIAQLLQAAGTPCGVLGTLGYGMPETLQPATHTTPDVVQANRVLAGILASGGRAAAMEVSSHALDQGRIDRLTLTAAVFTNLTRDHLDYHGSMAAYGEAKAKLFSREELRFVVINVDDPFGRKLYHQLEGKCDRLRFSLHEPQAELWLKEFCALDNGFRAVLDGRWGEFTIEAPLMGRFNASNVLAAVATVMALGVDVTQVQHGVRRLVPPAGRLQVFTAGDGARAVVDYAHTPDALNNALAALRPHVSGRLICVFGCGGDRDSGKRPEMAQQAENGADLVIVTDDNPRTETPSAITADIMAGFIAPEKIQLIHSRAQAIAAALALAGPDDLVLVAGKGHEDYQDIAGCKYPFSDSEQVTQALKQREEVA

SEQ ID NO: 16381 - protein, 245 aa, Paxistima myrsinites; identical to SEQ ID NO: 9445

SEQ ID NO: 16382 - protein, 145 aa, Salmonella enterica
FMPKPMFGDNGSGMHCHMSLAKNGTNLFSGDKYAGLSEQALYYIGGVIKHAKAINALANPTTNSYKRLVPGYEAPVMLAYSARNRSASIRIPVVASPKARRIEVRFPDPAANPYLCFAALLMAGLDGIKNKIHPGEAMDKNLYDL

SEQ ID NO: 16383 - protein, 524 aa, Flavobacteria bacterium BBFL7
MKKSQVYVPLLLGIAVALGIGLGYMLHSGESSDGLLMAGNANKRKLNKLIDIIDQRYVDNVNTDSIVDLTVNGILSNLDPHSVYISNDEMEDVSDQMRGDFVGIGIRFFVNQDTISVLNVLDGGPSKKAGIKGGDKILYADGKPLFGLDAVSTDVLKGEDGSKVTLGVLRPGDRDVEQVAVVRGSVPINSVEATYMLDENMGYIKVNRFAESTEDEFNTAIDQLIDQGAKRLTVDLRDNPGGVLSAAIAMADEFLPRKKLILFQKDRNNERKDSYATSDGDFEDKPVYILINENSASASEVVAGALQDNDVGTIIGRRSFGKGLVQQEIKLGDGSAVRLTVSRYYTPTGRSIQRPYDNGNEDYFKEYIDRYNNGELEDAANIEVNDSLKRTTPAGKVVYGGGGIIPDVFVPSADGYVLQTLEYFARTGFADQFTNRYLQGDGINLRNMTEKDFMETYSVPELVMEDFIQYAQLYNTSISLPGYRDEISTIIKSSLAEQLYDTEAKIKILNQQDRMIQKVLELNK

SEQ ID NO: 16384 - protein, 286 aa, Salmonella enterica subsp. enterica serovar Typhi str. CT18
MAENTMWHETLHDQFGQYFAVDNVLYHEKTDHQDLIIFENAAFGRVMALDGVVQTTERDEFIYHEMMTHVPLLAHGHAKHVLIIGGGDGAMLREVTRHKNVETITMVEIDAGVVSFCRQYLPNHNAGSYDDPRFTLVIDDGVNFVNQTHQTFDVIISDCTDPIGPGESLFTSAFYEGCKRCLNPGGIFVAQNGVCFLQQDEALDSHRKLSHYFSDVGFYQAAIPTYYGGIMTFAWATDNDALRHLSSEIIQARFHAAGLKCRYYNSAIHAAAFALPQYLHDALSAQ

SEQ ID NO: 16385 - protein, 146 aa, Salmonella enterica
FMPKPMFGDNGSGMHCHMSLAKNGTNLFSGDKYAGLSEQALYYIGGVIKHAKAINALANPTTNSYKRLVPGYEAPVMLAYSARNRSASIRIPVVASPKARRIEVRFPDPAANPYLCFAALLMAGLDGIKNKIHPGEAMDKNLYDLP

SEQ ID NO: 16386 - protein, 623 aa, Mycobacterium avium subsp. paratuberculosis K-10
MARAVGIDLGTTNSVVAVLEGGDPVVVANSEGSRTTPSIVAFARNGEVLVGQPAKNQAVTNVDRTIRSVKRHMGTDWSIEIDGKKYTAQEISARVLMKLKRDAEAYLGEDITDAVITVPAYFNDAQRQATKEAGQIAGLNVLRIVNEPTAAALAYGLDKGEKEQTILVFDLGGGTFDVSLLEIGEGVVEVRATSGDNQLGGDDWDDRIVNWLVDKFKGTSGIDLTKDKMAMQRLREAAEKAKIELSSSQSTSINLPYITVDADKNPLFLDEQLTRAEFQRITQDLLDRTRQPFKSVIADAGISVSDIDHVVLVGGSTRMPAVTDLVKELTGGKEPNKGVNPDEVVAVGAALQAGVLKGEVKDVLLLDVTPLSLGIETKGGVMTKLIERNTTIPTKRSETFTTADDNQPSVQIQVYQGEREIAAHNKLLGSFELTGIPPAPRGVPQIEVTFDIDANGIVHVTAKDKGTGKENTIKIQEGSGLSKEEIDRMIKDAEAHAEEDRKRREEADVRNQAESLVYQTEKFVKDQREAEGGSKVPEETLSKVDAAIADAKTALGGTDITAIKSAMEKLGQESQALGQAIYEATQAESAQAGGPDGAAAGGGSGSADDVVDAEVVDDDRESK

SEQ ID NO: 16387 - protein, 148 aa, Salmonella enterica
ATFMPKPMFGDNGSGMHCHMSLAKNGTNLFSGDKYAGLSEQALYYIGGVIKHAKAINALANPTTNSYKRLVPGYEAPVMLAYSARNRSASIRIPVVASPKARRIEVRFPDPAANPYLCFAALLMAGLDGIKNKIHPGEAMDKNLYDLP

SEQ ID NO: 16388 - protein, 361 aa, Peripterygia marginata; identical to SEQ ID NO: 9451

SEQ ID NO: 16389 - protein, 374 aa, Mortonia greggii; identical to SEQ ID NO: 9454

SEQ ID NO: 16390 - protein, 373 aa, Glycine max
  misc_feature (249)..(249): Xaa can be any naturally occurring amino acid
TRPEQSESERDFYEALFERSKVQFDQYVAQGKVLHHYANILDLLMQLRRCCNHPFLVMCGSDTQKRADLSRLARKFFQTNTEFPDESNQNDPRQQAELNKLASRLLLKSASSLHSVQPHAYIAEVLENIQKGDIIECSICMESPEDPVFTPCAHKFCRECLFSCWGTSVGGKCPICRQLLQKDDLITYSSESPFKVDIKNNVTESSKVSKLFEFLQRILNTSSEKSIVFSQWTSFFDLLENPLRRRGIXFLRYDGKLTQKQREKVLDEFNETREKRVLLMSLKAGGVGLNLTAASNVFIMDPWWNPAVEEQAIMRIHRIGQNRRVVVRRFIVKDTVEDRLQQVQARKQRMISGTLTDDEVRTARIQDLKMLFT

SEQ ID NO: 16391 - protein, 680 aa, Oceanobacter sp. RED65
MFQNKKIHGLAIVLFSGLLSSNLFAANLEPKPEHALTNRAVVHHLYQHHYSRKYLNDEFSQKVFDRYLKILDNTRSYFTQADINEFLKYKTKLDDSIKTNDLKPGFEIYNRYQDRAIERLNYAINLLKGGMKQFNFDKDESLDLDRENAPWAASTAELDDLWRKRIKNTILNLKLAGKEDKDIIDLLERRYTSQLSRIEQINSEDAFQSYMNAVTHTFDPHTQYMSPRNSENFNINMSLSLQGIGAVLRSENENTIVERLVTGGPADKAGELKPSDKIIGVAQDEGPMEDVIGWRLDEVVDRIRGPKDSIVRLEIITGSGQTEKHKIISITRDEVKLEDRAAQKEIIKVERDGKKHNIGVIDIPAFYSDFEAKNANDPNYRSTTRDTANLIKELKKEGIEGLVIDLRNNGGGSLSEVRDLVGLFIPQGPTVQIRNTRGMTHVLSDQDPDVLYDGPLVVLTNRLSASASEIFAGAIQDYGRGLVLGSQTFGKGTVQTLIPLFRGQMKVTNAKFYRISGESTQHRGVIPDINFPEIYDVDKIGESALEEALPWDKIKPSKYKTFTAINPLLDELKSKHSKRIANNPDFIYLNKQTEFLEELRNDTVVSLNLKTRDQEREATKEKRLKLENERRVAKGMEPLKDISDDEEDVTEEDEEEGNTTADALLEEGGQILLDYVKLTS

SEQ ID NO: 16392 - protein, 145 aa, Salmonella enterica
TFMPKPMFGDNGSGMHCHMSLAKNGTNLFSGDKYAGLSEQALYYIGGVIKHAKAINALANPTTNSYKRLVPGYEAPVMLAYSARNRSASIRIPVVASPKARRIEVRFPDPAANPYLCFAALLMAGLDGIKNKIHPGEAMDKNLYD

SEQ ID NO: 16393 - protein, 228 aa, uncultured cyanobacterium
HEVATGGQCELGFRFGKLIEAADWLMTYKYVIKNVARKYGKAVTFMPKPIFGDNGSGMHCHQSIWKDGQPLFAGDKYAGMSEMGLYYIGGILKHAPALLAITNPTTNSYKRLVPGYEAPVNLAYSQGNRSASVRIPLSGGNPKAKRLEFRCPDATSNPYLAFAAMLCAGIDGIKNKIHPGEPLDKNIYELSPEELSKIPSTPGSLELALEALENDHAFLTESGVFSED

SEQ ID NO: 16394 - protein, 609 aa, Castilleja miniata; identical to SEQ ID NO: 9457

SEQ ID NO: 16395 - protein, 228 aa, uncultured cyanobacterium
HHEVATGGQNELGIRFATLVSAADYLMTYKYVIKNVAKKYGRTVTFMPKPLFNDNGSGMHTHMSIWKEGQPQFWGEGYANLSPMALHAIGGILKHAPALLALTNPTTNSYKRLVPGFEAPVNLAYSQGNRSASVRIPLSGGNPKAKRFEFRCPDATCNPYLAFAAMLCAAVDGIKNEIAPGDPLDVDIYDLSPEELSKIPSTPGSLEAALEALEKDRTFLTDTGVFTQ

SEQ ID NO: 16396 - protein, 228 aa, uncultured cyanobacterium
HHEVATGGQNELGIRFATLVSAADYLMTYKYVIKNVAKKYGRTVTFMPKPLFNDNGSGMHTHMSIWKEGQPQFWGEGYANLSPMALHAIGGILKHAPALLALTNPTTNSYKRLVPGFEAPVNLAYSQGNRSASVRIPLSGGNPKAKRFEFRCPDATCNPYLAFAAMLCAAVDGIKNEIAPGDPLDVDIYDLSPEELSKIPSTPGSLEAALEAVGEGSHFPDGYGVFTQ

SEQ ID NO: 16397 - protein, 228 aa, uncultured cyanobacterium
HEVAGAGQHELGMKYAELIEAADNVMIYKYIVRNVARKYGKTATFMPKPVFNDNGTGMHVHQSLFKGGQPLFFGEGTYANLSQTARWYIGGILKHAPSFLAFANPTTNSYKRLVPGFEAPVNLVYSKGNRSAAVRIPLTGPNPKAKRLEFRPGDALANPYLAFSAMMMAGVDGIKNQIDPGDGFDEDLFELSAERLASIPTVPASLNGALEALNADKNYLMEGGVFTE

SEQ ID NO: 16398 - protein, 432 aa, Francisella tularensis subsp. tularensis SCHU S4
MSEYFLFSLLTVVAALMSYINTKFLKLPKAIGLTILSITFSALCASFLSPSNFLVVALSSFDFKKTVLDGMLSFLLFANALHFNMIDLKKELKAIFGLASIGLLLSALTTAILIYGFCLLVGFEISLGYCLVFGALISPTDPIAVISTLAGNKSIPKHIKTRVVGESLFNDATGIVLFVVLSNIVFFGSGGEFGQAINGHGIEYIWIIAKQIGSEAGGGILLGYIFARVALIFLKTNQDSETSIFVTLAVASMGYVIAHSLNVSGPIAMVVAGLFIGNNLSDRKKTSPDQVEKLDNFWMVIDNMLNSFLFILIGLELTSIPFNHGAFWVGAAGIFIVTFARLVSISIPITVIDKKLTRASAKDNLLVAWSGVRGGISLALALSLPDEGNVIVSITYTVVILSILAQGSTLKIVLNIIYPHNITKKAANTVDN

SEQ ID NO: 16399 - protein, 509 aa, Burkholderia sp. 383
MMPPTRVVLRLAVCAAVTAALLPCASSVRAQQPASAPPASAPAAQPPSPCPPDWEPQICELKAAVEVLKKQHLTDIDIGALLDATTHAGIKTLPYARFFDAKEEQERRDDERRARDGTPGIGIVFETRPDGLHIVDVIPDAPAEKAGVRPDDLVVAMNDTSVVGIDPADLAKLSKGDAGVPLKLTVQRGPSHTVLNFAPVRTILKPHPATAKRLDGDILYTRLSSFPEPAVGDYIDAVQAARRAGPPVKGLILDLRINGGGALNAAIGITALFTGRDRTAMVTVERGDANRRRYTTNWPDYELPVMHGQDPLATLQTDVWWRTVPLVVLVDGQSASAAEATAAALKDLGRAKLLGMPTYGKGLAQTGVDLIDGTRLNFTYARNLRPNGCPMDGYGVVPDWLVPPRRDSDVDGVLLWYREADLPRAPYADRLAPDPFAKVRKERQKLREQRALAKIDTAKSAALPQREFGTATDWQLRQALAALAGRPVRTIEAKPQLMPARPVCERAGN

SEQ ID NO: 16400 - protein, 228 aa, uncultured cyanobacterium
HEVAGAGQHELGMKFAELIQAADNVMTYKYVVRNVAKKYGKTATFMPKPVFNDNGSGMHVHQSLWKGGQPLFFGEGTYANLSQTARWYIGGILKHAPAFLAFTNPTTNSYKRLVPGFEAPVNLVYSEGNRSASVRIPLTGPSPKAKRLEFRSGDALANPYLAFSAMVMAGLDGIKNQIDPGDGEDRDLFELPAEELAKIATVPPSLNGALEALNADRGFLTAGGVFSD

SEQ ID NO: 16401 - protein, 589 aa, Brassica napus
MSLPETKTQTLLDAWDFQGRPADRSKTGGWASAAMILCIEAVERLTTLGIGVNLVTYLTGTMHLGNATAANTVTNFLGTSFMLCLLGGFIADTFLGRYLTIAIFAAIQATGVSILTLSTIIPGLRPPRCDPTTSSHCVQANGIQLTVLYLALYLTALGTGGVKASVSGFGSDQFDDTEPKERSQMTYFFNRFFFCINVGSLMAVTVLVYIQDDVGRKWGYGICALAIVLSLSIFLAGTNRYRFKKLIGSPMTQVGTVLVAAWRNRRLELPSDPSFLYDLDDVIAAEGSMKSKQKLPHTNQFRSLDKAAIKDQEMAMTQNVYNKWTLSTVTDIEEVKQIVRMLPIWATCILFWTVHAQLTTLSVAQSETMDRHIGSFEIPPAAMAVFYIGGLLLTTAVYDRLAIPLCKKLFNYPHGLRPLQRIGLGLLLAAMGMAVAALVEIKRLRTAHAHGPTVKTLPLGFSLLIPQYLIVGIGEALIYTGQLDFFLRECPKGMKTMSTGLLLSTLALGFFFSSVLVTIVEKVTDKAHPWIADDLNKGRLYNFYWLVAVIVALNFLVFLVFSKWYVYKEKRLADLGIELEDEPDIPMGH

SEQ ID NO: 16402 - protein, 468 aa, Pseudomonas putida KT2440
MSKSVQLIKDHDVKWIDLRFTDTKGIQHHVTMPSRDALDEDFFEVGKMFDGSSIAGWKGIEASDMILMPVDETAVLDPFTEEPTLIITCDIVDPSSMQGYDRDPRAIAKRAEEYLKSTGIGDTVFAGPEPEFFIFDEVKFHSDISGSMFKIFSEQGSWMTGADVEGGNKGHRPGVKGGYFPVPPFDHDHEIRTAMCNALEEMGQTVEVHHHEVATAGQNEIGVKFNTLVKKADEVQALKYVVHNVADAYGRTATFMPKPLYGDNGSGMHVHMSIWKDGKNTFSGEGYAGLSDTALYFIGGIIKHGKALNGFTNPSTNSYKRLVPGFEAPVMLAYSARNRSASIRIPYVGSPKARRIEARFPDPSANPYLAFAALLMAGLDGIQNKIHPGDAADKNLYDLPPEEAKNIPQVCGSLKEALEELDKGRAFLTKGGVFSDDFIDAFIELKSEEEIKVRTFVHPLEYELYYSC

SEQ ID NO: 16403 - protein, 141 aa, Arabidopsis thaliana
  misc_feature (96)..(96): Xaa can be any naturally occurring amino acid
  misc_feature (103)..(103): Xaa can be any naturally occurring amino acid
  misc_feature (124)..(124): Xaa can be any naturally occurring amino acid
MASSMLSSAAVVTSPAQATMVAPFTGLKSSAAFPVTRKTNKDITSIASNGGRVSCMKVWPPIGKKKFETLSYLPDLSDVELAKEVDYLLRNKWIPXCVEFELXTDLCTREARETLPDTTMDGTXGQCGSFHCSDAPTPLKC

SEQ ID NO: 16404 - protein, 1040 aa, Schizosaccharomyces pombe
MRNNTAFEQFTLNPCEQIPLDDKHNIGFNKNNTPDYSSSASSDQLLKNDINRHEMERRIAFLNRKQALFNAFMHDSSSSLNTMESNIEKVNGLFPNDNSVIALKPNEEKLNSSLSVENNDSTYTDATLIAPKIGLDRPNINAITIDVDGHSLQNEISSSTDKLSPSQSDALFEQKQDSLFWNDNAVIVVSDSESDDNNVRTKSSLNDHDKVNMKEKRNLELAFMNSKRKKLELPSLPVLSTAGPSYTNSLALPPFHHHNNYKMFNTTHTLEDDKFLQGKGTSNNPISLSDEEDNEINFQNKRYGSDSVILPGGLLHDSKLPEPGKHLFHLQWYHDRFHNIEGFNLSDSNNQKVQDDQQQQLEELFKDLDEQLVNDPTIREGTPAGLIPTLMEHQKEGLMWLKRLEESSKKGGILADDMGLGKTVQALALLVTRPPESKSVKTTLIITPVSLLQQWHNEILTKIAPSHRPTVYIHHGSSKKHKIAEQLMSYDIVLTTYNVIAYEFKNKMAYDKSIEDNAPIKKFEHLPFFEAEWYRVILDEAQTIKNRNTLAARGCCLLESTYRWCLSGTPMQNGVEEFYSLIKFLRIKPYSDWSSFSKDFTIPLSSNINTSAPMKRFRGLLKAVLLRRTKNTKIDGKPILTLPPKTAVKSETDLSSSEMEFYNTLQSGAQIQMRKYLQEGTITTHYGSLLVLLLRLRQACCHPWLIVAREAAVDDNDSFQAKNRAIYNQIYPEAVNRLKLIETLQCSLCMDVVAELLIIVPCGHFLCRECLTHVITSSEDMAKQTSNENISPKCSVCEEYIDTERLLSYALFRRYSGMAPIVDADNKLRTENISELLPKQYSNILENRQMGMKIFTDPKHWTTSTKIEKALNAVKEIIKKQPTDKILIFSQFVSFLELFTVPFRQEGIKYLMYTGGLSTAERNQALINFEVDPNVRVLLISLKAGNVGLNLTCANHVIILDPFWNPYIEEQAVDRAHRIGQDKPVNILRIVTNNTIEERVLALQDRKRELIDSALGEKGLREISRLNTKELSFLFGMSSR

SEQ ID NO: 16405 - protein, 451 aa, Vitis vinifera
MALTASKFSSSPVATDRTSISKSQGTISSFSKSIKHCGLHSKNQGVELRRQSSGHLLTARYRFSNKGFWHICGKTGHYFSSRGSSVLCWLTGTHKTEAKQCVEHYSDRSDIPSVQLEDEEDENLVMPERIIHSNQGLAEACKFVYNDAKFVNERARNDMVLLSRGIMRLDARARQDVAILGSEFLKLDARAREDTEKIDHGVKKKAERLHHIATILKDKAQSRLKSAADKHWSDGALEADLRRADFCAKQRAMEDALMALEFVKNIHDMMVSKMYKLKKGTPSSNDTMGHIMLEKNGKTLDFFPGEVSTDRITAIQEVYLSMASALSEADGIDYTDPEELELLVTTLIDLDAMDGKSSVSLLAECSSSPDVNTRQALANALAAAPSMWTLGNAGMGALQRLAEDSNPAIAVAASKAIYELKKQWEIEEGDSWRFTMNQKPMKEADDVEDTD

SEQ ID NO: 16406 - protein, 433 aa, Crocosphaera watsonii WH 8501
MVNYKKGLVLGATAAVLTAIAVTGAGLRLPRSVAYLQDNPKKLVDEVWQVINDTYVDATFNQVDWLAVRQKYVGKSKTYNSKEEAYKAIREMLEQLDDPYTRFMDPQEFQNMQIDTSGELTGVGIQITKDEETKELTVVAPIEDTPAFEAGILAKDVITKINGKTTEGMEVEDAVKLIRGKPGSKVTLTIRRSNEEFNYPIIRARIELHPVKARIEETPSGKVGYIRLTQFSAQASKEMRDAIRDAEAANVNGYILDLRSNPGGLLYSSIEIARMWLDQGRIVSTVSRNGEVEAQRATNRALTDKPLVIMVDGGSASASEILSGALQDNNRATLVGTKTFGKGLVQSVRRLGDGTSGLAVTIAKYLTPSGRDINKQGIEPDIVVELTEAQRKDLQQERDKIGDFGDPQFDRAYEELEKEIAKSNGTNARGTMR

SEQ ID NO: 16407 - protein, 458 aa, Myxococcus xanthus
MTGSSQPWRAALTAFFLLSAPWAHAAEPLRKDAGTAGRAEQAERDDATYRQLEVFARVLSYVENNYVESPDRQRLMYGAIQGMLETLDPHTVFLPPDVYREMKIDTSGEWGGLGIEIARKGERIVVVAPIDDTPAARAGIKAGDELVGIDGERTEGMDVGRALQKMRGPAGGRVLLTIMREGFSAPREIAIIRDHIRIVSVEGALHGGIGHVKVKNFQDRTDLYLRKELDRLRALNGGKELRGLVLDLRNNPGGLLDQAVAVSDRFLPGNLPIVSTRGRDGRSATVERSKDRDTEKDYPVVVLVNAGSASASEIVAGALQDHGRATILGAPTFGKGSVQTVIELEDGSGLKLTIARYYTPKGRSIQERGITPDFLVPDEPGGKVPRDVVREKDLRRHFRAEPTAATEPAAPEPRGLPENLKPWDVTAKLEDYALRVALDYLHGMASAPARTPSRAAGR

SEQ ID NO: 16408 - protein, 514 aa, Arabidopsis thaliana; identical to SEQ ID NO: 13806

SEQ ID NO: 16409 - protein, 473 aa, Candidatus Blochmannia floridanus
MNVDYFISFINKNKVKFIDLRFTDIMGKEQHFTIPQSQIDNHFFENGKVFDGSSMVGWKNVHESDMILIPDLTNDHIIVDPFYQDTTVILRCDVLDPHSMQNYDKDPRYISKKSEKFLQDSGIADFAMFGPELEFFVFDDVRFKTSMSGCHVMIDDPEASWNSDKVYFYGNKGHRPKIKGGYSPVPPIDSSQNLRSMMSIMMEKMGLIVETHHHEVATAGQNEIITRFNSLTRKADEVQIYKYIVHNVSNKFGKTATFMPKPIIKDNGSGMHCHISLYKNKVNLFSGDQYGNLSEIALFYIGGILKHTKALNAITNPTTNSYKRLIPGYEAPTFLTYSLSNRSSAIRIPAIINNNPNLCRIEVRFPDPSANPYLAFPALLMAGIDGIINEIHPGNPVNKNLYTLSDLEKEHTLYTSQSLNESLQYLSEDYEFLIRNNVFSKNFIDSYILIHKKMDSLVRSVPHPMEFELYYSI

SEQ ID NO: 16410 - protein, 148 aa, Triticum aestivum
GIRTRVPSPPRPKQWASSLQSDAPIHENPRATIRSCRPRMSLPDVVYRSTSDVGSSYQKSLKKGLISFTSIDLSRFTQVDEISCFPFLTWRSYRPKTKLLCRKCGSSIGYGYGEPPVLCSFDPASSSSGTSQNYLIKIQSLRLSDGTQ

SEQ ID NO: 16411 - protein, 1178 aa, Neurospora crassa
MAENAIVLSDDDPTLSFDEDFRPQSSASATTTSLGKRKLSVSFEEKVDWSDDSDDGEKLKARRNAKRRATSGSVRGRGSKGKGRGGKKTAAATNRSRHDEIIELNQPTVRKEEETDYAEAFIPDYLLERRRKFNKDRELLRNAGLKLPPDYHDIYFSDDEKGTRYEQRPKFEESSGIKPCRPYKDVELEYSAGIIPACIAQYLRDYQVEGVKFLHQKFVYQRGCILGDDMGLGKTVQVAAFLTAAFGKTGDERDAKRMRKMRRAGDLWYPRVIIVCPGSLIQNWKNELDRWGWWHVDVFHGSNREDVLQAAKSGRIEVMITTYDTYRNCHEAVNTVEWDCVVADECHILKNTVSETTRAMDKINAMCRIGLTGTAIQNRYEELWTLLNWTNPGYFGTRAEWNESITKPLTAGQSHDATLKQLSIARTTAKKLVQNLLPEFFLRRMKSLIAHQLPKKSDKVVFCPLTDVQRDAYENFLEGEHVTFILNAYQPCKCHSGRAGGFCCYKTLSDGRTWKSYVFPSIITLQKIANHLTLLIPSSSDPKEKQRSELNVLQTCAPDTWKELYNNRESMLSLANPEFCGKWKILRKLLRFWHESGDKVLVFSHSVRLLRILQHLFHNTSYNVSFLDGALSYEERQRVVDEFNTDPRQFVFLISTKAGGVGLNITSANKVVIFDPHWNPSYDLQAQDRAYRIGQIRDVDVFRLVSAGTIEEIVYARQIYKQQQANIGYNASNERRYFKGVQRDKNRKGELFGLENLFTFHADQVVLRDIVNKTNIAEAKAGVNLTDIDMEKAVKDEDEELDFIKKESEDKDDDTGMSSLAKLVTAEEPDKLLEASKSKKPKSDAIAAILASAGVEYTHENSEVIGTSKVEAQLSRRAELAANAADSQLFPGANNALFADSTESSDGGDDDDDDEDQEDLNGPARKKMLRMHYKFNPPEDVKRRQFCSMAREFGFQNATDFALVVESWTQEQRRNCLDTFYRRREVKLLEQEMAKMEAEKETEDDDDENDESTMVKTDDDDDDETVDLEKAVANEEILVLGESKPNAGVEVTRGEIAEKRAVAGAAERGEEGDPLRGTGALGYGVRSLPNARAGASASPVPKAEAGERRTDETATIVSEAGKPVDSGASSVAVKTEGVEEPRTVTVGAGTSFDNTAAAGQKKVTTIFLYDDEDEDDEL

SEQ ID NO: 16412 - protein, 469 aa, Pantoea agglomerans
MSAEHVLSMMNEHEVKFVDLRFTDTKGKEQHVTIPAHQVNADFFEEGKMFDGSSIGGWKGINESDMVLMPDATTAVMDPFFEDSTLIIRCDILEPGTMQGYDRDPRSIAKRAEDFLRSSGIADTVLFGPEPEFFLFDDIRFGSSTSGSHVAIDDIEAAWNTGKEYEGGNKGHRPGLKGGYFPVPPVDSSQDIRSAMCLTMEQMGLVVEAHHHEVATAGQNEVATRFNTMTKKADEIQIYKYVVHNVAHAYGKTATFMPKPMFGDNGSGMHCHMSLSKGGQNLFAGDKYGGLSEMALFYIGGIIKHAKAINALANPTTNSYKRLVPGYEAPVMLAYSARNRSASIRIPVVASPKARRIEARFPDPAANPYLAFTALLMAGLDGIINKIHPGDAMDKNLYDLPPEEEAEIPKVAGSLEEALNALNEDREFLTRGGVFTDESIDAYIELRKAEMDRVRMTPHPVEFELYYSV

SEQ ID NO: 16413 - protein, 532 aa, Ralstonia eutropha JMP134
MRKTLKNISLVSVGLVAGVLATLQISATAQNSAGPLPLDQLRLMADIFGQIKREYVEPVDDKKLLTEAIKGMVASLDPHSAYLDEKDFKELQEGTRGRFAGLGIEISQEEGLVKVINPIEDTPAFRAGIQPGDLITRIDDKPVRGLPLEQAVKRMRGEPGTKVTLTIYRKSEERTFPISITRAEIRVQSVKTKMLDNNTIGWVRLTSFQERTVGDLGRRLNEMAQKNPGLKGIVLDLRNNGGGVLQGAVGVAAAFLPDDSTVVSTNGQVPDAKRVYKATFNNYRLSSLEDDPLKDLPALYKKIPMVVLTNAYSASASEIVAGALQDHHRALIMGKTTFGKGSVQTVRPLTNDTGIKLTIAYYYTPTGKSIQAKGIRPDIPVDQNPEGDPDDALITREIDTERHLHNKQESEEPEMNEREQRRVEELRRLEEENAKKTPEEREKERRKKPIEFGSADDFMLQQAIAQLDGRPVKRSKSKLETNPPADKPAKAAPAKKGASAPAAKPAAPAPGKQPPASAPIGEPLGTPTGKAP

SEQ ID NO: 16414 - protein, 575 aa, Vitis vinifera
MAGSQGEFLAIESSDLSYSVNRDNIEKLGEEDEELIVSSGKKSRKGRVSRKAISKTTLIVCPPSVFSTWVTQLLEHTTPKRLKVYMYYGNRTQEAEELQKYDIVLTTYSTLATEEAWSGSPVKKIEWWRVILDEAHMIKNVNAQQSQAVTNLRAKRRWVVTGTPIQNGTFDLFSLMAFLRFEPFSIKSYWQSLVQRPLGQGKEKGLSRLQVLMATISLRRTKDKGLIGLPPKSVETCFVELSAEERELYDQMEAEGKCVIRDYIDAGSVMRNYSTVLGIILRLRQICTDVALCPSDLRSLLLSNNIEDVSNNPELLKKMVLVLQDGEDFDCPICISPPTNIVITCCAHIFCRVCILKTLKRTKPCCPLCRHPLSQSDLFSAPPESTETDNSEIPSSECTSSKVLTLLKFLSASRDQNPSTKSVVFSQFRKMLLLLEQPLKAAGFKTLRLDGSMNAKRRAQVIEEFGAPGPNGPTVLLASLKASGAGINLTAASRVYLLEPWWNPAVEEQAMDRVHRIGQKEDVKIVRLIARNSIEERILELQERKKKLAKEAFGRRGLKDRREVGVEDLRMLMSL

SEQ ID NO: 16415 - protein, 374 aa, Mortonia greggii; identical to SEQ ID NO: 9478

SEQ ID NO: 16416 - protein, 452 aa, Synechococcus sp. PCC 7335
MKNTACALGSLQRCSLGVLSLLLPAMATGVLPQTTQTAVASSFQNSPKTVLDEAWQLIYEEYVDGDFNRVDWLGVRQTLLSGEYTSADAAYRELRRVLSSLNDPYTRFLNPAQYSALTEQTSGEVSGVGIRLQKQGQELTITSVLDQSPADKAGIRPGDKVLIIDGRSSRNLTVEGASQLIRGDSGSQLSLTLRRLDDSEETLILTRELVFVSTVDSALYTDEDISVGYIHLDEFSGHAAEQMHEAINTLTEQGAEAFVLDLRGNPGGLLQASIEISRMWLPRGSIVRTVDRDGHDDEITANRTAVTDLPMAVLVDGRSASSSEIVTGALGDNDRAVIVGSPTFGKALVQSLHGLSDGSGIAVTVAHYYTPDGTDISTRGITPDINVSLTAQQQRELETNPALRGTAEDLQFTRAVAAIRPEVLARRQVNAPVLAAPGTKPQLPSQLGRIEP

SEQ ID NO: 16417 - protein, 374 aa, Plagiopteron suaveolens; identical to SEQ ID NO: 9480

SEQ ID NO: 16418 - protein, 522 aa, Burkholderia vietnamiensis G4
MIPVKPAIRRVAASRTGAITAAVFIAFAFELAPAALAQTVPASATTATTAMPAPAAAPLPSPCPPDWEAQLCELKAAIEVLKKQHLTDVDIGALLDATVHAGIKTLPYARFFNAAERRQQLDDEGRARDGTPGIGIVFETRPDGLHIIDVIPDAPAEKAGVRPDDLVVAMNDQSVVGLDSADVVKLAKGDAGVPLKLTIRRGPGQATLVVAPVRAIVRPHPASAKRLAGDILYTRLSSFPEPAVGNYIDAVEAARRNGPPVKGVILDLRINGGGALNAAIGITALFAGRERTAMVTLERDGRNRRRITTNWPDYELPVMHGQDPLAPLQADDWWRTVPLVVLVDGQSASAAEATAAALRDLGRARLLGMPTYGKGLAQTGVDLIDGTRLNLTFARNLRPNGCPMDGYGVVPDWLVPPRRDSDVDGVLLWYREVDLARAPYADRLAPDPFATVRDARRKLRDARVRAKVEMSKSAALPQREFGTAADWQLRQALAALAGQPVQTVAAPAQLMPAQPVCERRDD

SEQ ID NO: 16419 - protein, 203 aa, Glycine max
  misc_feature (98)..(98): Xaa can be any naturally occurring amino acid
MADGPASPGGGSHESGDHSPRSNVREQDRYLPIANISRIMKKALPANGKIAKDAKETVQECVSEFISFITSELVCFFFSSDSFLLRFSYLSSPAFNLXFLEFCRASDKCQREKRKTINGDDLLWAMATLGFEDYMDPLKIYLTRYREMEGDTKGSAKGGDSSAKRDVQPSPNAQLAHQGSFSQNVTYPNSQGRHMMVPMQGPE

SEQ ID NO: 16420 - protein, 540 aa, Gibberella zeae PH-1
MTFNPPSWAPQLPSQSRSATEVAQRVDFLARGLSKAVGFDAHDGTAWERVVAIYALNTIDYIPVTHAIHRVDGIVTPASSAHSVSELEHQLRSSRAKALFTCAPLLDTAVKAAKTVGIPDKNIFLLPLPDVPSDGSYKSIEDLISEGQNLPPLSIPAWIPGQGKRQTAYLCYSSGTSGLPKAVMISHYNVIACTIMIHTYETMTRQQDGIDTQVALGLLPFSHIYGLVVIAHIAQYRGDETVVMQRFQLDQLLACIQKFRIEQLSVVPPIIVQLLSSQDKCRKYDLSSVRLVFSGAAPLGGETIQKLLEHYPKWRISQGYGLTEASPSVFHTSEADAFLGSSGSLLPGVKVKIIDQHGNEVTEHETPGELYVQGPNVVLGYLHNEKANAETFVWREDGRWLRTGDEVLVRKSERGFEHFFVVDRIKELIKVKGHQVAPAELEAHLLDHPYVADSAVIGIVDERAGEVPLAFIVKSREASGISDEDVVKAVHQHVEEHKARHKWLKGGVRVLDVIPKSPSGKILRRVLKAKVAAEKPVAKL

SEQ ID NO: 16421 - protein, 498 aa, Leptospira interrogans serovar Copenhageni str. Fiocruz L1-130
MQTALYISVLIISSCGLVYELLAGTIASYLLGETVTQFSLIIGTYLFSMGVGSWLSKYLEKDLIPKFLEIELAIGLVGGFSSAILYLSFGQIRYFQIPLFLLVILIGILVGLEIPVLLRILKKELQFKELVSRVLSLDYVGALLASILFPIFFAPKLGLMRTGFIFGILNVGVALWGTWVLPLRQSKIIILRAQSVVVLTLLILGFSYSDLITYYSEESLYTDEIILSKQTQYQRIIVTRWKNEIRLFLNGHLQFSSRDEYRYHETLVHPALLAHPTPKKVLVLGGGDGLAVREILKHKNVESVTLVDLDSAITNLFSEHGILKKLNEESLKNSKVTVINTDAFLWLEESDQIFDVVLIDFPDPSNFSLGKLYTTAFFHTLKRRMNETSVLEIQSTSPLFARSSYWCIERTIASLGFYTLPLHVYVPSFGEWGFVLAGQRPIQFKKDFPKDLKFLNIQELESIQTFPQDMSRVPVEINRLDNQALVRYYDREWNRILD

SEQ ID NO: 16422 - protein, 374 aa, Plagiopteron suaveolens; identical to SEQ ID NO: 9481

SEQ ID NO: 16423 - protein, 180 aa, Physcomitrella patens subsp. patens
MASAVVNQSEAAAVRAPSKPVKTYSKENEQLVKQSWEILKKDAQRNGINFFRKVFEIAPGAKAMYSFLRDSTIPFEENPKVKNHARYVFMMTGDAAVQLGEKGAYQVLESKLQKLAATHVNAGVTDDQFEIVKEAILYAIEMGVPDLWSPELKSAWGDAYDMLAEQVKAEMHAQRSAATS

SEQ ID NO: 16424 - protein, 365 aa, Pleurostylia opposita; identical to SEQ ID NO: 9483

SEQ ID NO: 16425 - protein, 382 aa, Klebsiella pneumoniae
MKALHFGAGNIGRGFIGKLLADAGIELTFADVNQTVLDALNARHSYQVHVVGENEQVDTVSGVNAVSSIGDEVVDLIAEVDVVTTAVGPVALERIAPAIAKGLAQRKAQGTERPLNIIACENMVRGTTQLKGHVFNALAEEDKAWVEAHIGFVDSAVDRIVPPSASATHDPLEVTVETFSEWIVDKTQFKGALPTIPGMELTDNLMAFVERKLFTLNTGHAITAYLGKLAGHQTIRDAILDKKIRAVVQGAMEESGAVLIKRYAFDPQKHAAYIQKILGRFENPYLKDDVERVGRQPLRKLSAGDRLIKPLLGTLEYGLPHRNLVKGIAAAMHFRSEDDPQAQELAALIADKGPQAALAQISGLDAASDVVAEAVNDYNAEK

SEQ ID NO: 16426 - protein, 127 aa, Salmonella enterica
MPKPMFGDNGSGMHCHMSLAKNGTNLFSGDKYAGLSEQALYYIGGVIKHAKAINALANPTTNSYKRLVPGYEAPVMLAYSARNRSASIRIPVVASPKARRIEVRFPDPAANPYLCFAALLMAGLDGI

SEQ ID NO: 16427 - protein, 374 aa, Pristimera andina; identical to SEQ ID NO: 9486

SEQ ID NO: 16428 - protein, 585 aa, Castilleja sulphurea; identical to SEQ ID NO: 9487

SEQ ID NO: 16429 - protein, 228 aa, uncultured cyanobacterium
HEVAGAGQHELGMKFAELIQAADNVMTYKYVVRNVAKKYGKTATFMPKPVFNDNGTGMHVHQSLWKGGQPLFFGEGTYANLSQTARWYIGGILKHAPAFLAFTNPTTNSYKRLVPGFEAPVNLVYSEGNRSAAVRIPLTGPSPKAKRLEFRSGDALANPYLAFSAMMMAGLDGIKNQIDPGDGEDRDLFELPAEELSKIATVPASLNGALEALNADRGFLTAGGVFSD

SEQ ID NO: 16430 - protein, 434 aa, Mycobacterium smegmatis str. MC2 155
MTSDLATLAEQSGTKFILALFVDLRGKPCAKLVPVEAIDMLATEGVGFAGYAVGAMGQEPKDPDLMALPDPASFTPIPFIKEGLALVHCDPYVEGKPWPYAPRVILKNLIQQAADAGFEPWVGAEVEYFLLRRNADGSLVTADAADTAAQPCYDARGLTRMYDHLTAISTAMNSLGWSNYANDHEDGNGQFEQNFEFADALTTADRVITLRYLLSMIAAERGMVATFMPKPFADRTGSGLHFHLSLTSGGNPVFPSETDERGLGLSDTAYAFLAGILDHACALQSVVAPTVNSYKRTGATSTASGASWAPRLPSYGGNDRTHYIRVPDNQRIEMRGGDGSANPYLAVAAALGAGLDGIKRSIDPGPVGSGGTTALPPTLLHAVDALEADPVVTGVLDAAGEGVATYFANLKREEFFTYHGTVTPWEVDTYLTAF

SEQ ID NO: 16431 - protein, 457 aa, Castilleja sulphurea; identical to SEQ ID NO: 9492

SEQ ID NO: 16432 - protein, 473 aa, Microcystis aeruginosa PCC 7806
MPETPQEVLKMIQDNNIKIIDLKFIDMPGIWQHCSFYYDQIDESSFSDGVAFDGSSIRGWKAINESDMAMVPDPTTAWIDPFYKEPTLSMICSIKEPRTGEWYSRDPRSIAQKAIDYLSSTGLGDTVFFGPEAEFFLFDSARFDQTANSGYYYMDSVEGRWNSGKDEKDGNLAYKPAYKQGYFPVSPTDTSQDIRTEMLLTMADCGVPIEKHHHEVATGGQNELGIKFSTLVRAADYLMTYKYCIKNVAKKYGKTVTFMPKPIFGDNGSGMHVHQSIWKDGQPLFAGDKYAGLSQMALYYIGGLLRHAPALLALTNPTTNSYKRLVPGFEAPVNLAYSQGNRSASIRIPLSGSNPKAKRLEFRCPDATSNPYLAFAAMLCAGIDGIKNQIEPGEPLDVDIYELSPEELSKIPSTPGSLEAALESLEKDHAFLTDSGVFTEDFIQNWITYKLDNEVNPMRLRPHPYEFSLYYDV

SEQ ID NO: 16433 - protein, 736 aa, Pinus sylvestris; identical to SEQ ID NO: 9495

SEQ ID NO: 16434 - protein, 228 aa, uncultured cyanobacterium
HEVAGAGQHELGMKFAELIQAADNVMTYKYVVRNVAKKYGKTATFMPKPVFNDNGTGMHVHQSLWKGGQPLFFGEGTYANLSQTARWYIGGILKHAPAFLAFTNPTTNSYKRLVPGFEVPVNLVYSEGNRSAAVRIPLTGPSPKAKRLEFRSGDALANPYLAFSAMMMAGLDGIKNQIDPGDGEDRDLFELPSEELSKIATVPASLNGALEALNTDRGFLTAGGVFSD

SEQ ID NO: 16435 - protein, 375 aa, Nicotiana tabacum
MEVISTNTNGSTIFKNGAIPMNGHQNGTSEHLNGYQNGTSKHQNGHQNGTFEHRNGHQNGTSEQQNGTISHDNGNELLGSSDSIKPGWFSEFSALWPGEAFSLKVEKLLFQGKSDYQDVMLFESATYGKVLTLDGAIQHTENGGFPYTEMIVHLPLGSIPNPKKVLIIGGGIGFTLFEMLRYPSIEKIDIVEIDDVVVDVSRKFFPYLAANFNDPRVTLVLGDGAAFVKAAQAGYYDAIIVDSSDPIGPAKDLFERPFFEAVAKALRPGGVVCTQAESIWLHMHIIKQIIANCRQVFKGSVNYAWTTAPTYPTGVIGYMLCSTEGPEVDFKNPVNPIDKETTQVKSKLGPLKFYNSDIHKAAFILPSFARSMIES

SEQ ID NO: 16436 - protein, 228 aa, uncultured cyanobacterium
HEVAGAGQHELGMKFAELIQAADNVMTYKYVVRNVAKKYGKTATFMPRPVFNDNGTGMHVHQSLWKGGQPLFFGEGTYANLSQTARWYIGGILKHAPAFLAFTNPTTNSYKRLVPGFEAPVNLVYSEGNRSAAVRIPLTGPSPKAKRLEFRSGDALANPYLAFSAMMMAGLDGIKNQIDPGDGEDRDLFELPAEELSKIATVPASLNGALEALNADRGFLTAAAFSAT

SEQ ID NO: 16437 - protein, 161 aa, Mycobacterium smegmatis str. MC2 155
MSLKNINLTTLDGKQTTLGELAPGAALVVNVASKCGLTPQYSALEKLAQEYGDRGLTVIGVPCNQFMGQEPGTAEEIQTFCSTTYGVTFPLLAKTDVNGAERHPLYAALTETPDAGGEAGDIQWNFEKFLLAADGTVVNRFRPRTEPDAPEVIEAIEKVVS

SEQ ID NO: 16438 - protein, 615 aa, Chelone obliqua; identical to SEQ ID NO: 9500

SEQ ID NO: 16439 - protein, 188 aa, Pseudotsuga menziesii var. menziesii
DDVTVITMDGAPKEGCQHISVLTEADETQCPSVEIHPEDVVALPYSSGTTGLPKGVMLTHKGLVSSVAQQVDGENPNLYFHSEDVILCVLPLFHIYSLNSVLLCALRAGAATLIMQKFNLTTLLELIQRYKVTVAPIVPPIVLDITKNPVVSQYDVSSVRMIISGGAPLGKKLEDALRDRFPKAIFGQ

SEQ ID NO: 16440 - protein, 427 aa, Cyanothece sp. ATCC 51142
MRKAINTIHILVCLMRKRAFWVTLLVIFSLLFNFFAWTPNANAFTENQKLLLQSWRLVNQSYLDDTFNHQNWWLLRQDLLKRPLTDREETYDTIEEMLASLDEPFTRLLRPEQYHNLQVSTAGELSGVGLQININPETGNLEVVAPIEGSPAEAVGIKARDRILKIDDVDTTTLTLDEAATKMRGPRGTTVSLTILPYQKESNVRDIEIVRDRISLSPVTASLNQPTPNLPIGYIRLNQFSANAAEEMAEAIYNLEKEGAQGYILDLRNNPGGLLQAGIQVARLWMDQGTIVYTVNRQGVQDSFTASGTALTDDPLVLLVNKGTASASEILAGALQDNGRARLVGEKTFGKGLIQSLFELPDGAGLAITVAKYETPSHNDIHKLGIQPDKVVVQDPISYQQIGTKDDLQYEAAIELLTGNSVLANAG

SEQ ID NO: 16441 - protein, 228 aa, uncultured cyanobacterium
HEVADAGQHELGMKFAQLIEAADNVMTYKYVVRNVAKKYGKTATFMPKPVFNDNGTGMHVHQSLWKGGQPLFFGEGTYANLSQTARWYIGGILNHAPAFLAFTNPTTNSYKRLVPGFEAPVNLVYSEGNRSAAVRIPLTGPSPKAKRLEFRSGDALANPYLAFSAMLMAGLDGIKNQIDPGDGEDRDLFELAAEELSKIATVPASLNGALEALNADRAFLTAGGVFTD

SEQ ID NO: 16442 - protein, 557 aa, Suaeda salsa
MWSQLSSFFASKMDMVSTSDHASVVSMNLFVALLCGCIVIGHLLEENRWMNESITALLIGLSTGIIILLISGGKSSHLLVFSEDLFFIYLLPPIIFNAGFQVKKKQFFRNFITIILFGAVGTLVSFIIISLGSIAIFQKMDIGSLELGDLLAIGAIFAATDSVCTLQVLNQDETPLLYSLVFGEGVVNDATSVVLFNAIQNFDLTHIDHRIAYRIAFQFGGNFLYLFFASTLLGAVTGLLSAYVIKKLYFGRHSTDREVALMMLMAYLSYMLAELFYLSGILTVFFCGIVMSHYTWHNVTESSRVTTKHAFATLSFVAEIFIFLYVGMDALDIEKWRFVSDSPGTSVAVSSILLGLLMVGRALLFSLVFLMNLSKKSNSEKVTFNQQIVIWWAGLMRGAVSVALAYNQFSRSGHTQLRGNAIMITSTITVVLFSTMVFGLLTKPLILFMLPQPKHFTSASTVSDLGSPKSFSLPLLEDRQDSEADLGNDDEEAYPRGTIARPTSLRMLLNAPTHTVHHYWRRFDDYFMRPVFGGRGFVPFVPGSPTEQSTTNLSQRT

SEQ ID NO: 16443 - protein, 605 aa, Conopholis alpina; identical to SEQ ID NO: 9503

SEQ ID NO: 16444 - protein, 169 aa, Streptomyces avermitilis MA-4680
MTTDNAATSVLDTEIDALQGGSADLSQYAGKAVLIVNVASKCGLTPQYAGLERLQERYAAQGFTVLGVPCNQFLGQEPGTSEEIAEFCSATYGVTFPLTEKVEVNGDARHALYESLVGFADGEGHTGDIRWNFEKFLIGRDGKVVARFSPQTEPESAEVVTAVERQLAG

SEQ ID NO: 16445 - protein, 545 aa, Populus euphratica
MEAHMSSIGLKLQMLSTSDHASVVSMNLFVALLCACIVIGHLLEETRWMNESITALIIGVGTGIVILLISGGKSSRLLVFSEDLFFIYLLPPIIFNAGFQVKKKQFFRNFMTIILFGAAGTLICCAIISIGAMQIFEKMDIGPLDIGDYLAIGAIFAATDSVCTLQVLSQDDTPLLYSLVFGEGVVNDATSVVLFNAIQSFDLTNINAVIAWEFVRNFLYLFLTSTMLGVLTGLVSAYIIKKLYFGRHSTDREVALMILMAYLSYMLAELFYLSGILTVFFCGIVMSHYTWHNVTESSRVTTKHAFATLSFVAEIFIFLYVGMDALDIEKWRFVSDSPGTSVAVSSILLGLVMVGRAAFVFPLSFVSNLSKKSPHEKIGFRQQFIIWWAGLMRGAVSMALAYNKFTSAGHTNLRANAIMITSTITVVLFSTVVFGMLTKPLISILLPHPKYQSRSLSFSSDPATPKSFTVPLLGEGQDSLDDLGGRDIPRPSSLRALLTTPTHTVHYYWRKFDNAFMRPMFGGRGFVPFVPGSPTERNPPQNQWH

SEQ ID NO: 16446 - protein, 709 aa, Lactobacillus plantarum WCFS1
MPIIELVILLACLVLLSNVLSHYLVAIPVSLIQVGLGLGVALLLNVQVKLQTDWFMLVFIAPMLYNDGREFPKQELWELRGAIFANAIVLVFITTILGGFLIHVLIPTIPLAVGIALAAILSPTDPIAVQSISEGVKLPKEILHLVSGESLINDASGLIGFKYALAAAVTGTFVLGEAVGDFFYISLVGLAVGLALITIIQLIRDVLRREGINDIVFNVVLQILTPFAIYFIAEEWFHASGVVAVVAAGVLSHLQNSHESEDAPELRLVTERVWNVVVYLLNGIVFLILGIELPAATQATIKGAHTNTFHAVFDVLIVWGILLLIRVAWTYAYMLFNWLRHHKKAKPSLRIAALSGLSGVRGAITMAGVFTIPTVVASGKAFPERALVLFIAAGVIIVSLVAAAAILPLMAAKSLPFVTRGSSPDEDDAVLAEGTDDGDDSSGQLPQLTYKQARIYILQLAIQNIEEHRRPANQRAAYDLILDQQFQIRRLEVASQTADELAPMLTDELELRLVALNGERAAVREMIANKQTSKLAGQVYLRRVDRREQRFLQATHRQGLPTLRSLRLLLTRAMQGIRLWLAPGDSEELRVALLDIQREASKAAIKALSQYLKQANVDEQQFDRQALYHLIVHYRNRIENAKNDHTLSRDDYEQQLHGLRIKSLGAERAGVQHLLESGQISLRTAAKLRQFINYSENLLMLNDIEADED

SEQ ID NO: 16447 - protein, 228 aa, uncultured cyanobacterium
HEVAGAGQHQLGMKFAQLIEAADNVMIYKYVVRNVAKKYGKTATFMPKPVFNDNGTGMHVHQSLWKGGEPLFFGEGTYANLSQTARWYIGGILKHAPAFLAFTNPTTNSYKRLVPGFEAPVNLVYSEGNRSAAVRIPLTGPSPKAKRLEFRSGDALANPYLAFSAMMMAGLDGIKNQIDPGDGEDRDLFELSAEELQKIATVPPSLNGALEGLSANRAFLTEGGVFTD

SEQ ID NO: 16448 - protein, 505 aa, Glycine max
MVKMKGKSQSQRIGKKSRKMKGALSTTTNTTRHLQLQLGQVSLIPLQQPSSTTATTSSAVSCFQNLLDAEAPNASSSRVALIDNAAAAAADDRDCILSQDFFCTPDYITPDNQNVFNGFDCDRENTPCPKSPEKLNTTKSKRCRPDAMSVHPLSPTFCSDHQPVVELGKDSGTEELALEKTIAPGKPKAQNYVSHSAVALRCRVMPPPCFRNPYLKDVSDKDLDPFGNQRLKCAGLFPAFTGGDGLSRYRADFHEIEQIGRGNFSSVFKVLKRIDGCLYAVKHSTRPLRLETERTKALMEVQALAALGLHENIVGYYSSWFENERLYIQMELCDHSLSIRKYSALFTEGQVLDALFQVANALQFIHEKGIAHLDVKPDNIYVKNGVYKLGDFGCATLLDSSLPIEEGDARYMPQEILNENYDHLDKVDIFSLGASIYELIRRLPLPESGCQFFNLKEGKFPLLPGHSLQLQNLLKVMMDPDPVKRPSAKELIENPIFCRIQRTAS

SEQ ID NO: 16449 - protein, 438 aa, Pseudomonas putida KT2440
MLHSPRLTQLALSIALAVGAPLATAAEPAKAAAVPATEVTAKAPLPLEELRTFAEVLDRIKAAYVEPVDDKTLLENAIKGMLSNLDPHSAYLGPEDFQELQESTSGEFGGLGIEVGQEDGFIKVVSPIDDTPASRAGVQAGDLIVKINGAPTRGQTMTEAVDKMRGKVGEKITLTLVRDGGNPFDVNLTRAVIQVKSVKSQLLENDYGYIRITQFQVKTGDEVGKALAKLRKDNGKKLRGVVLDLRNNPGGVLQSAVEVADHFLTKGLIVYTKGRIANSELRFSADPADASAGVPLVVLINGGSASASEIVAGALQDQKRAVLMGTDSFGKGSVQTVLPLANDRALKLTTALYYTPNGRSIQAQGIVPDIEVRPAKLTAEADTENFKEADLQGHLGNGNGGADRPTGSSKRKERPQDDDFQLSQALSLLKGLNITKGD

SEQ ID NO: 16450 - protein, 159 aa, Streptococcus pyogenes str. Manfredo
MPNLYDFTVKAQNGNDLSLAAYKEKVVLIVNTATKCGLTPQYQALQALYDTYHDKGFEVLDFPCNQFLNQAPGDAEEINHFCSLTYHTTFPRFAKIKVNGKDADPLFTWLKEEKSGPLGKRIEWNFTKFLIDQNGQVIKRYSSKTYPKLIEEDLKALLG

SEQ ID NO: 16451 - protein, 1330 aa, Arabidopsis thaliana
MAFTFLSPHPVFLSLTGTTSSFSYKPVLLPFSRNSRTLTVAAGPARRNSYPNPADDDPPEAPEDSMHGVSKFQQIQRQAARARKLEEEDFEKNRNTYLSAIADVEDAAETGRDDEESGGDLFSDIDRAISMKRSEFVKQGLLKPNPPKTASLKKIGEEGNEEEGDVTDDVDELDEEEVVDLDEIDKLTGLTEISDEEDWVDEEGNTRINKKKEFGSDHQFEFDLDDFGESKARIVEPKFKMCLAELLDESKVVPISVYGDLDVEITGIQHDSRGVSAGDLFVCCLGSENFLSEADKRGAVAVVASKEIDIEDTLGCRALVIVEDTNAVLAALASSFYRHPSKNMSVIGVTGTDGKTTTTYLIKSLYEAMGVRTGMFSTVSCYIHGDNKLDTPNATMNPDAVLVQSLMAKMLHNGTESLVMEASPQELALGKCDEVDFDIAVFTNLTRENTDFRGTDEEYRDAEAKLFSRMVDPERHRKVVNIDDPNAAFFVQQGNPNVPVVTFAMENTKADVHPLKFELSLFETQVLVNTPQGILEISSGLLGRHNIYNILAAVAVGIAVGAPLEDIVRGVEEVDAVPGRCELIDEEQAFGVIVDHANTPDGLSRLLDSIRELKPRRIITVIGCEGENERGKRPLMTKIATEKSDVTMLTSDNPRNEDPLDILDDMLSGIGWTMQEYLKHGEHDYYPPLANGHRLFLHDIRRVAVRCAVAMGEEGDMVVVAGKGHEAYQLEGEKKEFYDDREECREALQYVDELHQAGIDTSEFPWRRKILKVEEDAYKFSKKRESLEHSMDSLRFLRILLLLSSILLLSLRSTVTAGDIVHQDNLAPKKPGCENDFVLVKVQTWIDGVENEEFVGVGARFGKRIVSKEKNANQTHLVFANPRDSCTPLKNKLSGDVVIVERGNCRFTAKANNAEAAGASALLIINNQKELYKMVCEPDETDLDIQIPAVMLPQDAGASLQKMLANSSKVSAQLYSPRRPAVDVAEVFLWLMAIGTILCASYWSAWSAREAAIEHDKLLKDAIDEIPNTNDGGSGVVEINSISAIFFVVLASGFLVILYKLMSYWFVELLVVVFCIGGVEGLQTCLVALLSRWFQRAADTYVKVPFLGPISYLTLAVSPFCIVFAVLWAVYRVHSFAWIGQDVLGIALIITVLQIVHVPNLKVGTVLLSCAFLYDIFWVFVSKKLFHESVMIVVARGDKSGEDGIPMLLKIPRMFDPWGGYSIIGFGDILLPGLLIAFALRYDWLANKTLRTGYFIWAMVAYGLGLLITYVALNLMDGHGQPALLYIVPFTLGTMLTLARKRDDLWILWTKGEPERACPHHVRLEQCSEK

SEQ ID NO: 16452 - protein, 380 aa, Oryza sativa
MVAAEAAAAPAPPHDAVAAVAVGMVGAAGTVDEQKAAGVGILLQISMLVVSFVLGHVLRRRKVYYIPEASASLLIGMIVGGLAKISNTQRSISLAPKPFFSNFGAIITFAILGTFIASIVTGLLVYVGGLIYIVYKLPLVECMMFGALVSATDPVTVLSIFQELGTDVNLYALVFGESVLNDASLILSNLFKYAALGVENLHNLESCLFVLFPYFSYMLAEGFGLSGIVSILFTGIVMKRYTFYNLSEDSQRFTARFFHLLSSLAEAFVSLYYLQGLRGAMAFALALQSIHDLPEGHGETIFTATTSIVVLTVLLIGGSTGTMLESLQHNFDGNNAGYPGQRYGEETSTSSNFTMKLKELQRRYSSSHLILKLYLLIALL

SEQ ID NO: 16453 - protein, 374 aa, Pristimera andina; identical to SEQ ID NO: 9516

SEQ ID NO: 16454 - protein, 523 aa, Rhodococcus sp. RHA1
MTTTAAEPNTSTTRALGGRARAFLLAAVAACAACGLIYELALLTLSVSLTGGGITQTSLIVAGFVAALGVGALAAKPLLSTAAASFVVVEIVLGLVGGFSAVTLYVTFTFFGSSAIVLVLATALIGVLVGAEVPLLMTLLQSGRNDTDAESTGKVLANLNAADYAGALVGGLLWPFVLLPIAGMIRGAAITGIINLVAAAVVALILLRWQLSLRTRLFAVVALLVAAACIAVLLVRADGIETTSRQRLYTDPVVAAERSQYQEIVVTERGGDVRLFLDGDLQFSSIDEHRYTESLVYPAMADDPKRVLILGGGDGLAAREVLRLPGVEEIVQVELDPAVIELANTRLSGLNQGALQDPRVHVVLDDAFRWLRDAPDSGFDAVIVDLPDPDTPALGRLYSTEFYGLAAAALNPGGLMVVQSGSPYSTPDAYWRTTSTVASAGLAVTPYHVLVPSFGDWGYVLARRGPEPPALRLPRDVPELRFLDEPTLAASAIFPRDRPRRELEPSTLDRPRIVDDMRKGYER

SEQ ID NO: 16455 - protein, 374 aa, Psammomoya choretroides; identical to SEQ ID NO: 9522

SEQ ID NO: 16456 - protein, 444 aa, uncultured archaeon GZfos31B6
MILMTANEDVLGMIAENNIKFIRLQFVDVLGIVKNVAIPAAQMKKALDVGISFDGSSIEGFARIQESDMVLKPDPETFRILPWKADEGKIAGIVCDVCLPDGTPFHGCPRYALTRAITEAEKMGYVMNTGPELEFFLFEKEDGIPTTTPHDSGGYFDFPPVDLAEDIRRDIVIALEEMDFEIEASHHEVACGQHEIDFKYSDALTTADKVVTFKYVTKTIATNKNLHATFMPKPVFGTSGSGMHINTSLFNKNNENVFFSPDDDHGISDTARYFIGGLLAHIKAVTAITNPLVNSYKRLVSGYEAPVYITWSWANRSSLIRVPAARGSGTRIELRSPDPSCNPYLAFAAILASGLDGVKNKIDPGEPIEENIYEMDFHEITDAGIDTLPTSLSLALDYLESDAVVRSALGEHVYTAFMRVAAAEWEEYRVQVHQWELDRYLQLF

SEQ ID NO: 16457 - protein, 374 aa, Psammomoya choretroides; identical to SEQ ID NO: 9525

SEQ ID NO: 16458 - protein, 238 aa, Phaseolus vulgaris
LVLDGVIQLTERDECAYQEMITHLPLCSIPNPKKVLVIGGGDGGVLREIARHSSVEKIDICEIDGMVVDVSKQYFPDVAVGYEDPRVTLTVGDGVAFLKNVPEGTYDAVIVDSSDPIGPAQELFEKPFFGSVAKALRPGGVVCTQAESIWLHMDIIEDIVSNCRHIFKGSVNYAWTTVPTYPSGMIGFMLCSTEGPPVDFKHPVNPIDENECQKSARPLKFYNSEIHTAAFCLPSFAK

SEQ ID NO: 16459 - protein, 131 aa, Salmonella enterica
SGMHCHMSLAKNGTNLFSGDKYAGLSEQALYYIGGVIKHAKAINALANPTTNSYKRLVPGYEAPVMLAYSARNRSASIRIPVVASPKARRIEVRFPDPAANPYLCFAALLMAGLDGIKNKIHPGEAMDKNL

SEQ ID NO: 16460 - protein, 374 aa, Pterocelastrus tricuspidatus; identical to SEQ ID NO: 9526

SEQ ID NO: 16461 - protein, 508 aa, Nicotiana tabacum
MKRKTLNRTSTPRRNNKSNTKRMNKGSLFTVGFSKVSLPPLPNQQQLQSSFSTLPLSNPSRFQKLLDSEVLPPAQSNFPSILPSNTDADAADGDNKDFILSQDFFCTPDYLTPDAPAICNGLDGNKDDCMPCPKSPEKLQTVARKRQRLAVKSATSLSSDFPGQQQLADIPEDAFGSDETKSEKITESEKGHSYVSQSAIALRYRVMPPPCIRNPYLRDASEIDVDPFGNRRSKCAGFNPVIFGNDGLSRYRSDFHEIEQIGTGNFSRVFKVLKRIDGCMYAVKHSTKQLHQDTDRRKALMEVQALAALGPHENVVGYYSSWFENEHLYIQMELCDHSLSNKKYSKLSSEVAVLEAMYQVAKALQYIHQRGVAHLDVKPDNIYVKSGVYKLGDFGCATLLDKSQPIEEGDARYMPQEILNENYDHLDKVDVFSLGAAIYELIRGSPLPESGPHFLNLREGKLPLLPGHSLQFQNLLKVMMDPDPTRRPSAKDLVDNPIFERCQRNANK

SEQ ID NO: 16462 - protein, 140 aa, Salmonella enterica
KSDVYCQTGVHCQTNLAKNGTNLFSGDKYAGLSEQALYYIGGVIKHAKAINALANPTTNSYKRLVPGYEAPVMLAYSARNRSASIRIPVVASPKARRIEVRFPDPAANPYLCFAALLMAGLDGIKNKIHPGEAMDKNLYD

SEQ ID NO: 16463 - protein, 286 aa, Pseudomonas syringae pv. tomato str. DC3000
MSDYQETLYEGYGQRFRMEKMLHEVRTEHQHLVIFQNPRMGRVMALDGVIQTTEADEFIYHEMLTHVPILAHGAAKRVLIIGGGDGGMLREVAKHLTVEHITMVEIDATVVEMCKEFLPNHSSGAFDDSRLNLVIDDGMRFVATTEEKFDVIISDSTDPIGPGEVLFSENFYQACHRCLNEGGILVTQNGTPFMQLSGVQTTAGRMNGLFADWHFYQAAIPTYIGGAMTFAWGATDKSYRKLPLETLRQRFSGSGIVTRYYNPEVHIGAFALPQYVLHAVNKASND

SEQ ID NO: 16464 - protein, 245 aa, Putterlickia verrucosa; identical to SEQ ID NO: 9529

SEQ ID NO: 16465 - protein, 528 aa, Corynebacterium efficiens YS-314
MTVSRFVRHCDTRSPTGKESKSTPMIELTLGQIVEIVGGELAGGAQPDTTVTGTVEFDSRQVTAGGLFLALPGARVDGHEYATTAIGQGAVAVLAARPVDVPSIIVPPVTPTDSNADIYAHDPEGHGAAVIEALSKLARHVVDLAVGAHDLTVVALTGSAGKTSTKDFIATVLSMAGDTVAPPGSFNNEVGLPHTALRCTTHTRYLVAEMSARGIGHIAHLARITPPRIGAVLNVGSAHLGEFGSRANIAQAKGELVEALPAAADGGVAVLNADDPFVAAMAPRTTARVVTFSTANPPAPGAQYWAGDLELDDVARASFTLHTPRGSWPVSLQVFGEHQVANALAAAAVAIEAGVDETTVVSGLSSHAAASAHRMDVRTRPDGVTVINDSYNANPDSMRAGVAALAYTASARRDATSWAVLGQMGELGDEAVQEHRALGAELAKYHVERLIAVGDNPNCRALREQAAALGVRTDAVPDAASAVDLLRHQVRDGDVVLVKASNADQLWRVAEELHAMFDGDSRRDVEGL

SEQ ID NO: 16466 - protein, 604 aa, Conopholis americana; identical to SEQ ID NO: 9531

SEQ ID NO: 16467 - protein, 526 aa, Corynebacterium efficiens YS-314
MCADTPHHPTPVHTEEAMAITLGELARTIGGELFNAPDQDLEIHNIGLDSSTLAKKAPIFAAVPGSRKHGAEFADTDRAAGALAVLTDRDGATILDRKGDTRPRLIVDDVREVLGVASSSVYGDPSRDLVLIGVTGTSGKTTTSYLLERGLMEAGYKVGLIGTTGTRIDGEPVPTKLTTPEAPTLQKLFYRMRQHGVTHVVMEVSSHALSLGRVSGSHFNVAAFTNLSQDHLDFHDTMEEYFDAKALFFRAGSPLAADHQVVCIDDEWGTRMAEVAGNAQTVATTGKRADFTAGLVTVKETGEQSFTVTVPDHGEVPVTLALPGAFNVANATLALAAAVRAGVDPVAFARGMAQVAVPGRMERIDEGQDFLAVVDYAHKPAAVAAVLDTLRTQIDGRLGVVIGAGGDRDATKRAPMGELSARRADLVIVTDDNPRSEVPATIRAAVMEGARRGAAEADHEVEVREIGDRAEAIRALIEWAGPGDGIVVAGKGHEVGQLIAGVTHHFDDREQVREALRHTQSDGEGK

SEQ ID NO: 16468 - protein, 154 aa, Glycine max
MRKCELCNSPAKLFCESDQASLCWKCDAKVHSANFLVTKHPRILLCHVCQSLTAWHGTGPKFVPTMSVCNTCVNNNSTETCSQQNHEDDDDDGTGEDHAENDDGGVAEDDDDDDDEENQVVPWTSTPPPPASTSSNSVTTSSTRFSDVEEGGSD

SEQ ID NO: 16469 - protein, 335 aa, Glycine max
MADESVVESPVKRQRDDGEENGVSVSMDAEGGKDPLSNGLSSVIPGWFSEISAMWPGEAHSLKVEKILFQGKSEYQNVMVFQSSTYGKVLVLDGVIQLTERDECAYQEMITHLPLCSIPNPKKVLVIGGGDGGVIREVARHSSVEKIDICEIDKMVVDVSKQYFPDVAVGYDDPRVTLHIGDGVAFLKEVPEGTYDAVIVDSSDPIGPAQELFEKPFFASVAKALCPGGVVCTQAESIWLHMDIIEDIVANCRQIFKGSVNYAWTTVPTYPSGMIGFMLCSTEGPPVDFKHPVNPIDENESQKSVRPLKFYNSEIHTAAFCLPSFAKRKISSKAN

SEQ ID NO: 16470 - protein, 228 aa, uncultured cyanobacterium
HEVAGAGQHELGMKFAELIQAADNVMTYKYIVRNVAKKYGKTATFMPKPVLNDNGSGMHVHQSLWKGGQPLFFGEGTYANLSQTTRWYIGGILKHAPSFLAFTNPTTNSYKRLVPGFEAPVNLVYSEGNRSAAVRIPLTGPSPKAKRLEFRSGDALANPYLAFSAMMMAGIDGIKNQIDPGDGVDVDLFELAADELKKIATVPASLNGALEALNSDHHYLLEGGVFTK

SEQ ID NO: 16471 - protein, 241 aa, Arabidopsis thaliana; identical to SEQ ID NO: 14188

SEQ ID NO: 16472 - protein, 650 aa, Listeria monocytogenes str. 4b F2365
MEIFELILLMLSAVFLSNVLSRFLPGIAVPLIQVILGIILAIPLGDHTMDLNPELFLLLFMAPILFNDGASTDKKSLWKNRKAILSLSIGLVFVTVGVLGAFIHYLIPAIPFAAAFALAAALAPTDAVAVGALAEKVRVPHKIMHILEGESLINDASGLVSFQFAVLALVTGTFSFMSAGTSFLLLSLGGIALGAALSLLKIMLMRGLRQLGIENMTSFMLMEILLPFLIFMVAEKVGVNGILAVVSGGMVHSFSYKGLNPEIAQLNLLSKNTWSVIIFSLNGLVFILLGTQLPQILMTIWQDANIQKGMLFVYILGITFLLLGLRFLWILFFRNYEENPKVDLVSRLKNTFLYTVAGVRGTITLVSALSLPFVLGNGNAFPERDLLIFIAAGVIITTLLLANFTLPLFADKKDKIAADHTTDIVLLRDIVQQLQAYKTDENAVEMNKVLNMYNNRIFSLMEHKEVNATEKELRRLTQEWQLENTRRLVFERKIDTGVGLSHMMRLGKRLYVQTRAEKYRARMRYRQLLSHRFRDFRFVPLTFEERRKEIAKLQNENNLFVIQKLQELDSNEYNPEIISLYLMNFERALGRGKNKKESNDEALQTTIDLASQIERETIQHYFEKGTITRKEMKVYRDNLLAIEANMQLEF

SEQ ID NO: 16473 - protein, 188 aa, Pseudotsuga menziesii var. menziesii
DDVTVITMDGAPKEGCQHISVLTEADETQCPSVEIHPDDVVALPYSSGTTGLPKGVMLTHKGLVSSVAQQVDGENPNLYFHSEDVILCVLPLFHIYSLNSVLLCALRAGAATLIMQKFNLATLLELIQRYKVTVAPIVPPIVLDITKNPVVSQYDVSSVRMIISGGAPLGKKLEDALRDRFPKAIFGQ

SEQ ID NO: 16474 - protein, 515 aa, Vibrio vulnificus YJ016
MWHPMKMHSRTSFMAERGSENKMRNTMNLTNLLAPWLDCPELADITVQSLELDSRQVKQGDTFVAIVGHVVDGRQYIEKAIEQGANAVIAQSCQQYPPGLVRYQQNVVIVYLEKLDEKLSQLAGRLYQHPEMSLIGVTGTNGKTTITQLIAQWLELAGQKAAVMGTTGNGFLNALQPAANTTGNAVEIQKTLADLQQQGAKATALEVSSHGLVQGRVKALQFAAGVFTNLSRDHLDYHGTMEAYAKAKMTLFTEHQCQHAIINLDDEVGAQWFQELQQGVGVSLFPQDASVKALWASSVAYAESGITIEFDGCFGQGRLHAPLIGEFNATNLLLALATLLALGVDKQALLDSAASLRPVLGRMELFQVNSKAKVVVDYAHTPDALEKALQALRVHCTGHLWAIFGCGGDRDKGKRPMMAEIAERLADHVVLTDDNPRSEDPAMIVQDMLAGLTRGDSAVVEHDRFSALQYALDNAQADDIILLAGKGHEDYQVLKHQTVHYSDRESAQQLLGISS

SEQ ID NO: 16475 - protein, 650 aa, Burkholderia cepacia
MGKIIGIDLGTTNSCVAIMEGNQVKVIENSEGTRTTPSIIAYMDDNEVLVGAPAKRQSVTNPKNTLFAVKRLIGRRFEEKEVQKDIGLMPYSIIKADNGDAWVEGHGEKLMAPPQVSAEAVRKMKKTAEDYLGEPVTEAVITVPAYFNDSQRQATKDAGRIAGLEVKRIINEPTAAALAFGLDKAEKGDRKIAVYDLGGGTFDVSIIEIADVDGEMQFEVLSTNGDTFLGGEDFDQRIIDYIIGEFKKEQGVDLSKDVLALQRLKEAAEKAKIELSSSQQTEINLPYITADASGPKHLNLKITRAKLEALVEDLVERTIEPCRIAIKDAGVKVSDIDDVILVGGQTRMPKVMEKVKEFFGKDPRRDVNPDEAVAVGAAIQGQVLSGDRKDVLLLDVTLSLGIETVGGVMTKMISKNTTIPTKHAQVYSTADDNQGAVTIKVFQGEREMAAGNKLLGEFNLEGIPPAPRGVPQIEVTFDIDANGILHVGAKDKATGKENKITIKANSGLSEAEIDQMIKDAEANAAEDHNVRELADSRNQGDALVHSTKKALTEYGDKLDAGEKEALEASLKSLEEVLKDTSADKAAIDAKVEELGKVSQKLGEKMYADMQAQQAGAAGAAGAAEGAAHAGGAQQAADDVVDAEFKEVKKD

SEQ ID NO: 16476 - protein, 178 aa, Arabidopsis thaliana; identical to SEQ ID NO: 12615

SEQ ID NO: 16477 - protein, 101 aa, Brassica napus
  misc_feature (6)..(6): Xaa can be any naturally occurring amino acid
  misc_feature (11)..(11): Xaa can be any naturally occurring amino acid
  misc_feature (21)..(21): Xaa can be any naturally occurring amino acid
  misc_feature (51)..(51): Xaa can be any naturally occurring amino acid
  misc_feature (58)..(58): Xaa can be any naturally occurring amino acid
  misc_feature (62)..(62): Xaa can be any naturally occurring amino acid
  misc_feature (75)..(75): Xaa can be any naturally occurring amino acid
  misc_feature (88)..(89): Xaa can be any naturally occurring amino acid
  misc_feature (92)..(92): Xaa can be any naturally occurring amino acid
  misc_feature (94)..(94): Xaa can be any naturally occurring amino acid
  misc_feature (96)..(96): Xaa can be any naturally occurring amino acid
  misc_feature (98)..(99): Xaa can be any naturally occurring amino acid
EKEEVXAYSMXSSATVVTSPXQATMVVPFTGLKSSSAFPVTRKANNDITSXVSNGGRXNCMXAWPPIGKKKFETXSYLPDLTEAELPXXVDXLXRXKXXPC

SEQ ID NO: 16478 - protein, 469 aa, Bacillus cereus ATCC 10987
MVVAFLIGAGGMFAGMSLFGVNPAEVTQTISNGNASTAQGNLAKINEAYALIDSRYVEDVKDEKLVEGAIQGMLSTLKDPYSTYMDKETAKQFSESLDPELEGIGAEVNKTDGKLIIVSPIKGSPAEKIGIKPNDQILSVDGNSVKDLSREEAVLKIRGKKGTTVAIEIKRAGVADPIVFKIKREKIPIFTVFSSVKQESGKDIGYMQITSFAENTAKEFKDQLKELEKKNIKGLVIDVRGNPGGYLNSVEEILGEIMTDKKPMLQVEQRNGEKKKFSTELKERKPYPISVLIDNGSASASEILAGALKEGEGYDLIGEKTFGKGTVQQAVPFKDGSNIKLTMFKWLTPDGNWIHKKGIKPTVEVKQPDYYHATPIQIEKTLSYNANDVQVKHAQEMLKSLGYVPGREDGYFSKETESALKAFQNANKMEATGQLDKKTAEAIQTKIIEKIRSGENDLQLQSALKLMAK

SEQ ID NO: 16479 - protein, 494 aa, Staphylococcus aureus subsp. aureus Mu50
MDASTLFKKVKVKRVLGSLEQQIDDITTDSRTAREGSIFVASVGYTVDSHKFCQNVADQGCKLVVVNKEQSLPANVTQVVVPDTLRVASILAHTLYDYPSHQLVTFGVTGTNGKTSIATMIHLIQRKLQKNSAYLGTNGFQINETKTKGANTTPETVSLTKKIKEAVDAGAESMTLEVSSHGLVLGRLRGVEFDVAIFSNLTQDHLDFHGTMEAYGHAKSLLFSQLGEDLSKEKYVVLNNDDSFSEYLRTVTPYEVFSYGIDEEAQFMAKNIQESLQGVSFDFVTPFGTYPVKSPYVGKFNISNIMAAMIAVWSKGTSLETIIKAVENLEPVEGRLEVLDPSLPIDLIIDYAHTADGMNKLIDAVQPFVKQKLIFLVGMAGERDLTKTPEMGRVACRADYVIFTPDNPANDDPKMLTAELAKGATHQNYIEFDDRAEGIKHAIDIAEPGDTVVLASKGREPYQIMPGHIKVPHRDDLIGLEAAYKKFGGGPVDQ

SEQ ID NO: 16480 - protein, 478 aa, Idiomarina loihiensis L2TR
MTEFALDTSTGITIIVLFGVFWVAFGYWLGRKNRSHEDFALAGRNVGFAFAAATAMATWVTSNTTLVAPQLTYQFGIWGMVGYSFAALGLVLFAPMAKRIKELLPNGYTSGDFVRLRYGNLAWLVFIIISVVYAFGWLISLGMAGGILLESLSGLDYHIGMTTILVICVGYTLFGGMRAVIATDFIQALIIIVGVSFIAYWIIDNVGLESIHSNLTSEHPQLLDMLFPAAVMFLFNNIFFGLGEIFHSNVWWSRALSFKKNVAYKAYLTGGLLWLPIPIVTGFIALAAPQLGIFPPSPDMIGPTVAAAVLGKAGAIIVFIVIFSALASSLDSLLAATSDLVTQDIFHKKLKPKASDKTLMRFNRSCILGLGVVTWLLCLPRVATLGALLNFAGAFVASTIWPIVLGLYHRRLTGTYAACAMGFGTAFGMLSYFVVGFYVAALVSCAVSGLICLVGIFRSSDKFDWDTLNEKEQSNANQ

SEQ ID NO: 16481 - protein, 293 aa, Zea mays
MELRRPASSPLVDNYVVPGDVVLDLSEMNNQTIKLGAGLRQECDTIQATSAGKLRQLKPNKYWIENSQKRYIPSVEDTVLGIVVDTKPDNFLVDIKGPNLAFLPVLSFEGGTRRNIPKFEIPWELRAVTLHGAVVDVAFSEISRRRSNRLKSWAEEGEGCGFLGGGEDASNLGEIGTLIYARVVKANSIMNPELSCMDATGKAAEFGQLKDGYMFDTSTGMSRMLLSSPTCPVLEVLGKKLSFEIAVGLNGRVWVNAPAASTVILVSNAIMRSESLSGIKQRAMVENLLERLS

SEQ ID NO: 16482 - protein, 443 aa, Clostridium beijerinckii
MAKYTKGDIINLVKENGVKFIRLQFTDIFGTLKNVAITDRQLEKALNNECMFDGSSIDGFVRIEESDMNLRPNLDSFVIFPWRPQQGKVARLICDVYKPDGKPFEGDPRYILKRAIADAAELGYTMNVGPECEFFLFETDENGNATTNTQDKGGYFDLAPTDLGENARRDMTLALEEMGFEIEASHHEVAEGQNEIDFKYGDALTTADSIMTFKLVVKSIAQRHGLHASFMPKPIFGINGSGMHVNMSLFKDGKNVFVDENDKNGLSPIAYNFIAGLLKNIKGLAAVTNPLVNSYKRLVPGYEAPVYLAWSCKNRTALIRVPAARGAGTRVELRCPDPSSNPYLVLAALLQAGLDGIKNNLQPPAEVEANIFAMTDEERKANGIDNLPNNLYEAVQFMRESELAKSALGDHVYNNYLEGKAAEWDDYRTKVHDWELENYLNRY

SEQ ID NO: 16483 - protein, 106 aa, Zea mays
VFSEVLFFIYLLPPIIFNAGFQVKKKQFFRNFMTITLFGAVGTMISFFTISLGAIAIFSRMNIGTLDVGDFLAIGAIFSATDSVCTLQVLHQDETPFLYSLVFGEG

SEQ ID NO: 16484 - protein, 538 aa, Phragmites australis
MGLGVVAHLVRLGVLSSTSDHASVVSINLFVALLCACIVLGHLLEENRWVNESITALIVGLCTGVVILLTTKGKSSHILVFSEDLFFIYLLPPIIFNAGFQVKKKQFFRNFMTITLFGAVGTMISFFTISFGAIAIFGRMNIGTLDVGDFLAIGAIFSATASVCTLQVLNQDETPLLYSLVFGEGVVNDATSVVLFNALENFDLNKIDVAVVLKFLGNVCYLFVSSTFLGVFTGLLCAYIIKKLYIGRHSTDREVALMMLMAYLSYMLAELLDLSGILTVFFCGIVMSHYTWHNVTESSRVTTKHAFATLSFIAETFLFLYVGMDALDIEKWKFASDSPGKSIGISSILLGLVLVGRAAFVFPLSFLSNLTKKTPFEKITWRQQIVIWWAGLMRGAVSIALAYNKFTRSGHTQLHGNAIMITSTITVVLFSTMVFGMMTKPLIRFLLPASSSTVTSEPSSPKSLHSPLLTSLQGSDLETATHIVRPSSLRMLLSKPTHTVHYYWRKFDDALMRPMFGGRGFVPFSPGSPIEQSVHGAR

SEQ ID NO: 16485 - protein, 189 aa, Zea mays
KISAGSKPLEEYTIPKGTITRIMRQVLPQDSRVTGGAKETMDQCIVQFSTALVRAATQECRRDRRLTITADDLIVGFANLGLADYVQPMSVYLRLYRETVNNQQQAVAPPSPTVQRGTTTAVPPPPPNLTLQLGLPSVPDVTELARDTDVYALWHGAAPAAGSTSASSVAPMPPPAGALQTKKVSYGSK

SEQ ID NO: 16486 - protein, 918 aa, Bacillus anthracis str. Ames
MINQTEVTIRLQHVSHGWFLWGEDDSGTPLSVTSWKRNAFTWHSTSFYGTFLKEATFEGKQGVMLTNAQAFEYIANQPMNSFARIQMNGPITALTKDANELWDAFTSGSFVPDMEHWPKQPSWKVQHTPIEDDTLASLFSSAVNESILQDNRSNDGWEDAKRLYEHYDFTKRQLDAALHEEDWLRKIGYIEDDLPFTIGLRLQEPQEEFEMWKLETIITPKRGAHRIYVYESIDYLPKRWHDYEERILETQEGFSKLVPWLKDGDTFRSELFETEAWNFLTEASNELLAAGITILLPSWWQNLKATKPKLRVQLKQNATQTQSFFGMNTLVNFDWRISTNGIDLSESEFFELVEQNKRLFNINGQWMRLDPAFIEEVRKLMNRADKYGLEMKDVLQQHLSNTAETEIVEEDSPFNDIEIELDGYYEELFQKLLHIGDIPKVDVPSSLHATLRPYQQHGIEWLLYLRKLGFGALLADDMGLGKSIQTITYLLYIKENNLQTGPALIVAPTSVLGNWQKEFERFAPNLRVQLHYGSNRAKGESFKDFLQSADVVLTSYALAQLDEEELSTLCWDAVILDEAQNIKNPHTKQSKAVRNLQANHKIALTGTPMENRLAELWSIFDFINHGYLGSLGQFQRRFVSPIEKDRDEGKIQQVQRFISPFLLRRTKKDQTVALNLPDKQEQKAYCPLTGEQASLYEQLVQDTLQNVEGLSGIERRGFILLMLNKLKQICNHPALYLKETEPKDIIERSMKTSTLMELIENIKDQNESCLIFTQYIGMGNMLKNVLEEHFGQRVLFLNGSVPKKERDKMIEQFQNGTYDIFILSLKAGGTGLNLTAANHVIHYDRWWNPAVENQATDRAYRIGQKRFVHVHKLITTGTLEEKIDEMLERKQSLNNAVITSDSWMTELSTDELKELLGV

SEQ ID NO: 16487 - protein, 212 aa, Arabidopsis thaliana
MKIDPRRDRFPCCIVWTPLPFISWLVPFIGHVGICREDGVILDFAGPNFVCVDNFAFGAVSRYIQINKEMESSRSSSSGMFNGERRYEQEEDSHEKEPTWDDALRKSTQEYQHHSYNILTCNCHSFVANNLNRLSIKSGGWNVVNLATLVLFKGRWVNKTAIVKSLLPPLIVYTIGILLGGWTFIASCSILVVLLTGWFIIGTYCFKKLIQL

SEQ ID NO: 16488 - protein, 374 aa, Quetzalia occidentalis; identical to SEQ ID NO: 9543

SEQ ID NO: 16489 - protein, 515 aa, Arabidopsis thaliana; identical to SEQ ID NO: 11257

SEQ ID NO: 16490 - protein, 374 aa, Quetzalia occidentalis; identical to SEQ ID NO: 9547

SEQ ID NO: 16491 - protein, 161 aa, Xanthomonas oryzae pv. oryzae KACC10331
MSDLSTFEFTDLEGRTQTMRDYAGKVLLVVNVASKCGFTPQYAGLQALWQRYRERGLVVIGFPCDQFGHQEPGDAAQIRQFCSLDYAVDFPLAEKIEVNGSGAHPLWQWLKHEQRGVLGSEAIKWNFTKFLIGRDGRVLERYAPTTKPEALAADIERALDA

SEQ ID NO: 16492 - protein, 389 aa, Clavibacter michiganensis subsp. sepedonicus
MKAVHFGAGNIGRGFVGLILHEAGYEVVFADVNAELIGHLASADSYRVTEVGPHARDWTVTGFRAIDSAADGEALIAEIATADVVTTAVGPNILRFVAPAIAAGLRARSADLGPVAVMACENAINATDTLRDEIAKALGDETDALGRAVFANTAVDRIVPNQDPAAGLDVTVEDFSEWVVERTPFGDAVPDIAGATFVDDLAPYIERKLFTVNTGHATVAYHGYARGAVSQSDAMAIPEVADEVRQVLEETSALLVAKHGLDESEQAAYREKNLARFANAALADTVERVGRQPLRKLSREERFVGPASQLAERGLPHDALVRAVGQALRFDPAGDPQALELQGLLATDTAADLVRRVTGLDDQHPLTPDLVAVVDAAQADRRSAPRHRA

SEQ ID NO: 16493 - protein, 126 aa, Salmonella enterica
NGSGMHCHMSLAKNGTNLFSGDKYAGLSEQALYYIGGVIKHAKAINALANPTTNSYKRLVPGYEAPVMLAYSARNRSASIRIPVVASPKARRIEVRFPDPAANPYLCFAALLMAGLDGIKNKIHPG

SEQ ID NO: 16494 - protein, 473 aa, Prochlorococcus marinus str. MIT 9211
MSKKPREVLSQIKDEGIELIDLKFTDIHGKWQHLTVTADMVDEEAFKSGLAFDGSSIRGWKAINESDMAMVPDASTAWIDPFYRHKTLSLICSIQEPRSGEPYARCPRALAQKALSYLSSTGLADAAFFGPEIEFFLFDDVRYNSSEGNSFYSVDTIEAPWNTAREEEGGNLAYKIQYKEGYFPVSPNDTAQDIRSEMLLLMGQLGIPIEKHHHEVAGPGQHELGMKFASLINAADNVMTYKYVVRNVAKKYGKTATFMPKPVWNDNGTGMHVHQSLWKNGQPLFYGEGTYANLSQTAKWYIGGILKHAPSFLAFTNPTTNSYKRLVPGFEAPVNLVYSQGNRSAAVRIPLTGPSPKAKRLEFRSGDALANPYLAFSAMMMAGIDGIKNQIDPGDGVDVDLFELPSEQLSKISTVPSSLNDALDALKADNSYLTEGGVFDSDFIDNFIELKYEEVQQLRQRPHPHEFFMYYDA

SEQ ID NO: 16495 - protein, 374 aa, Reissantia sp. Chase 2095; identical to SEQ ID NO: 9550

SEQ ID NO: 16496 - protein, 394 aa, Vitis vinifera
MAPDVYNHQHHPHQNSGLMRYQSAPSSLLGSFVDGSSVHLQSSSHETETMFARLMSGSSDSQGLQGVGAMKHEEEVMVEGVPQQNGYSNGSQMIYNSQPMQTISVHNSASPRTNMESSFMTSMAAENSMKIRNENCSSLVRQSSSPPGLFPNLTSENGICFSSFLHSFLFQTWLVMGNLRAGNSTNVEANPSVSRLNNQISFSSGLSSCNGLLPKISEIRNENIGLHSPKDGNNSNSRCYISNFTTDSWSDSPFSGLTRMAADNDLKMFSGLNSLEAQNVDSRYRSLGLTHHLSLPKNFPQITTIEKFLHFQDSVPCKIRAKRGCATHPRSIAERVRRTRISERMRKLQELFPNMDKQTNTADMLDLAVEYIKDLQKQVKTLNDTKVKCTCSSI

SEQ ID NO: 16497 - protein, 469 aa, Azoarcus sp. BH72
MNAQDVMKMIQENEVRFVDLRFTDTRGKEQHVGLPVSAFEEDHFEHGHPFDGSSIAGWKGIQASDMILMPDAASAYIDPFFDETTLVLACDVIEPSDGKGYDRDPRSIAKRAEAYLKSTGIGDTAFFGPEPEFFIFDAVEWSVDMSGVYSKIISEEAAWSTADKFEGGNTGHRPKVKGGYFPVPPVDSLNDIRAAMVLALEAAGIPVEVHHHEVANAGQCEIGTKFSTLTKRADWTQTLKYIVHNVAHQYGKTATFMPKPIVGDNGSGMHVHQSIWKDGQNLFAGNGYAGLSETALYYIGGIIKHARALNAITNPATNSYKRLVPHYEAPTKLAYSARNRSASIRIPYVANPKGRRIESRFPDPAANPYLCFAALLMAGLDGIQNKIHPGDPADKNLYDLPPEEDALIPTVCTSLDQALEYLDKDREFLTRGGVFSNDFIDAYIELKMEEVNRLRVTTHPVEFDLYYSL

SEQ ID NO: 16498 - protein, 374 aa, Reissantia indica; identical to SEQ ID NO: 9553

SEQ ID NO: 16499 - protein, 641 aa, Bacillus clausii KSM-K16
MCSISPTAGLHIPLEPELFFVLFIAPLLFNDGKVTPRDELWKLRLPILLLALGLVFATVVVIGLFIHWLIPSIPLPAAFALAAILSPTDVVAVSSIAKRVHMPKGLMRLLEGEGLMNDASGLVAFKFAVAATVTGVFSISEASVSFLLIALGGLGLGVLFSFMLIGLKMALRRFGMEDITTHMIIQIITPFVIYIGAEEFGVSGILAVVAAGIVHAIEKEKVESRTLELQRVSDTTWSVILFILNGLVFVLLGLQIPDTTRLIFEDPQITNMEVIGYILAITASLLLLRYIWLALFWKKIKPLLFFQAEPEEKHRAIALLTFSGVRGAVTLAGAFTIPYIVADGSPFPERDLLLFLAAGTILVTVLLASILLPLLAKKPELQEADQQLSFTRALEQLTQEARVILADKSHSHNKQTLRRLQREYDRIVIPLLHDANTNHTLIAPNRKKELFLLFKALQHEYDLLEATLEDPTLTEAMEKRLRARAQNIGQILSVRSPLAFLRFGSKHFIDRMLNKANKNRLSIEEKNRLYLIYTRLFADIIKKLDEQMTAENESVTKRVIHFYRIQLNRLDHVHLNYDEKLYKEMLGLHYEIMEEMRRSLQTLFQNNDLSRETTQKLRRYLNYIEANVTEALQLPDEKNGH

SEQ ID NO: 16500 - protein, 131 aa, Salmonella enterica
HCHMSLAKNGTNLFSGDKYAGLSEQALYYIGGVIKHAKAINALANPTTNSYKRLVPGYEAPVMLAYSARNRSASIRIPVVASPKARRIEVRFPDPAANPYLCFAALLMAGLDGIKNKIHPGEAMDKNLYDL

SEQ ID NO: 16501 - protein, 610 aa, Staphylococcus aureus
MSKIIGIDLGTTNSCVTVLEGDEPKVIQNPEGSRTTPSVVAFKNGETQVGEVAKRQAITNPNTVQSIKRHMGTDYKVDIEGKSYTPQEISAMILQNLKNTAESYLGEKVDKAVITVPAYFNDAERQATKDAGKIAGLEVERIINEPTAAALAYGLDKTDKDEKVLVFDLGGGTFDVSILELGDGVFEVLSTAGDNKLGGDDFDQVIIDYLVAEFKKENGVDLSQDKMALQRLKDAAEKAKKDLSGVSQTQISLPFISAGENGPLHLEVNLTRSKFEELSDSLIRRTMEPTRQAMKDAGLTNSDIDEVILVGGSTRIPAVQEAVKKEIGKEPNKGVNPDEVVAMGAAIQGGVITGDVKDVVLLDVTPLSLGIEILGGRMNTLIERNTTIPTSKSQIYSTAVDNQPSVDVHVLQGERPMAADNKTLGRFQLTDIPPAERGKPQIEVTFDIDKNGIVNVTAKDLGTNKEQRITIQSSSSLSDEEIDRMVKDAEVNAEADKKRREEVDLRNEADSLVFQVEKTLTDLGENIGEEDKKSAEEKKDALKTALEGQDIEDIKSKKEELEKVIQELSAKVYEQAAQQQQQAQGANAGQNNDSTVEDAEFNEVKDDDKK

SEQ ID NO: 16502 - protein, 133 aa, Oryza sativa
  misc_feature (15)..(15): Xaa can be any naturally occurring amino acid
GPDNCEGSSSVDQRXEEEEEAKEVCEEATPASAAAAAAPSFFAHPCSLLQYIARVCACCLGLSDSFCDPKASSVLVPGPEPAAADPSQEGEEDMKSSYFYMQEATTRVRAARLRPKPPGNPREGSGGNGGHHH

SEQ ID NO: 16503 - protein, 581 aa, Pseudomonas aeruginosa PAO1
MSDSCLPIAMVQSAQSHRPGTKPEIPALMQTVYTVLTLLLVVGATRLAAQLLPLPLPLIQIAAGALLALPSLGLHIALDPELFLFLFIPPLLFVDGWRIPKREVWRMRWPILMMAFGLVFFTVVGAGYFIHLLIPEIPLAASFALAAVLSPTDALAVSAITQGRLPKRLMHLLEGEALMNDASGLVAFKFAIAAAMTGVFSLVDASLNFLVVAVGGLAIGVFLSWSLGRIRAWMISRGWDDPATHVVLMLLLPFASYMVAEHLGVSGILSAVAAGMMQSWVDLLPRQTSTRLLNRSVWSMLEFAFNGVVFLLLGLQLPDIMKSVANHHGDLLWRSSLLLAYVAAITAVLMLIRYGWVYGYWKLSLRIDRWRGKSPPGLSGISLRRLSALSALSGVRGAVTLAAVLSVPMSLMDGSAFPQRDLIIFIATSVILISLIGATIGLPLLLRGLPASNNGAHERERREAWRKTAEAAIRALESEELPQVEGNDAANTSRVAEARAQIMAEYRQSLDTAPTTDEARDQAQALEIADKALRLKALRAQRLELYRQRRNNEIDDETLGDILRELDQQESWLTNRFARWV

SEQ ID NO: 16504 - protein, 614 aa, Emericella nidulans
MSDEVYEGAIGIDLGTTYSCVANYEGTNVEIIANEQGSYTTPSFVSFTDKERLIGEAAKNQAAMNPQNTIFDIKRLIGRRYEDPIVKKDVESWPFKVVDQGGNPAVEVEYLGETKTFTPQEISSMVLMKMKEVAETKLGKKVEKAVITVPAYFNDNQRQATKDAGAIAGLNVLRIINEPTAAAIAYGLGSGKSEKERNVLIYDLGGGTFDVSLLNIQGGVFTVKATAGDTHLGGQDFDTNLLEHFKKEFQKKTGKDLSGDSRALRRLRTACERAKRTLSNATQTSVEIDSLFDGEDFNTSITRARFEDLNAKSFSGTLEPVQQVLKDSGLAKNQVDEIVLVGGSTRIPRIQKLLSDFFDGKKLEKSINPDEAVAYGAAVQAGILSGKATSAETQDLLLLDVVPLSLGVAMEGNIFAPVVPRGQTVPTIKKRTFTTVVDNQTTVQFPVYQGERTNCADNTSLGEFTLAPIPPMRAGEAALECVFEVDVNGILKVTATEKSSGRSANITISNAVGKLSTTEIEQMIDDAAKFKTSDEAFTKRFESRQQLESYISRVEEIISDPTMSMKLKRGNREKIESALSDAMAQLEIEDSTPEDLKKKELALKRLITKAMATR

SEQ ID NO: 16505 - protein, 157 aa, Bacillus halodurans C-125
MSIHEFSARLINGEEKALSDYKDQVLLIVNTASKCGLTPQYEELQILYETYKDQGFTVLGFPSNQFMNQEPGDHNEIAAFCERNYGVSFPIFEKVKVNGKEAHPLFQYLTSQQGGLFTEKIKWNFTKFLIDRSGNVVKRYAPSTSPIKIKDDIEELL

SEQ ID NO: 16506 - protein, 449 aa, Rickettsia akari str. Hartford
MLLRLIITLFFIINSICTFAEAEKETENKISNQEAYKQFQDVFERIEKDYVQVPDRQKMIDEAINGMLSSLDPHSSYYTDEDLEDIFTFTKGEFGGIGVEIMYDSGAIKIISPIDDLPAFKAGLKGGDYIVGVNDELVSTLGPNKAIKEMRGMPGTKVKLLIIKEEEAKPQELELTREIVKIKPIKAHLEKNNIAYIRITTFNESTISELKAVVKKLKTESKDNLKGIILDLRNNAGGILDQAIAVSDYFIDSGVIVTTKGRTTSSNSETKANEFSLKAPKVPMIVLINGNSASASEIVAGALQDHKRAIILGTRSFGKGSVQALTQINSRAAVKLTISKYYTPSGRSIQAEGIEPDILIEPAKVEYPEVKKIDKRFSESSLKNYLKNDNEKNKDSKKETKAKNNKQEENELSELYKKDYQFARAYDVITGLILNKKLAAKEQVKQEDK

SEQ ID NO: 16507 - protein, 1403 aa, Nostoc punctiforme PCC 73102
MTKLANDTTNLQTKLANQYFDLDSSVQKVIQLLAIIYAPVDKNSLLSCLSKMGALDEKNKLWVTKTLSPQIDKLLKVGLLVQSGRQSPECHPLLTEIATRHAVQTGQFEIQVIAVESKFPIRTHWNHDSRIFYSLRQCIREIRIGIYRQDLNFINKQIEDYQKYADSEEKLVIENIFEQIFNNPFDADGFNTLPQGLYESGISSIFLNCALKLSVSEDALMMLSEQCSTGGKHCSDYLHLILTEQLLLQGCTQEAQESLERVSNEYQNNAAIFWGWLSFLRGENEQAIKYYTDALKAIKKATGKRQIYFNTMGGLFFILALLKDGSAQRLKEAEEYTNLMSRQGDHWLRFIYGRLKTVLQVHQGDITQKQFVLSAHISSVEEENSLQTLFCSLCLYWMDAEGAKKRLPKLLEPLYQRSFASGYHWLAMETAELLSRLKPSSKYQKEAEALREDSNIQTIVDLIRPQEAWEMCLNALANLQKQPQTSLKPESQLRLAWFITFYPSKCVLQPKEQKVNAKGEWSKGRPIALKRLSSGLAEFDYVTPQDMRVCSCIEVYSEGYYGKVDYTFGEKAISALIGHPLVFWEDMPNIRVEIVKGEPELLVKKEKLGRLTLEFSPKLPESQNILHIKETPTRIKVIEITTEHRRIAQIIGKDNKLNVPAFAEKQVLAAINAVSGIVTVHSDIGGGSEGAEEVPAQTLPHIHLLPANVGLKITLLSRPFTQGGPYFRPGTGGETVIAEIEGKRFQTRRNLSLEKQLAADAVAACPTLAQSEEQDGEWVIVDPESCLELLLELQALGNKVVMAWPEGEKLHISHNADLKDFNLSIQRQQDWFAATGELKLNNDLVLDMQQLLELLEKTPSRFIPLGDGQFLALTQAFRKRLDELRMFSEKHNKGIRFHPLATLGLEDFVDEVGKVKADKHWKTHREHLHEVKNLQPELPSTLQAELRDYQMEGFCWLARLAHWGVGACLADQMGLGKTLQALAVILRNAHEGPTLIIAPTSVCMNWVSEAQKFAPTLNIIQFSGANRQKLLDGLQPLDMLVCSYGLLQQEEVAQMLSVVHWQTIVLDEAQAIKNMTTKRSQAAMNLKSNFKLLTTGTPIENHLGELWNLFRFINPGLLGSFESFNQRFAVPIEKYQDKLARNKLKKLIQPFLLRRTKNQVLEELPSRTEILLHVELSREEKAFYEALRRQAISKLTESDADAGKKHLQVLAEIMKLRRACCNPSLVMPDTVLPSSKLQLFGEVLGELLENRHKALVFSQFVDHLHIIRDYLEQQGINYQYLDGSTSVAERKKRVDAFQAGSGDVFLISLKAGGTGLNLTAADYVIHTDPWWNPAVEDQASDRAHRIGQQRPVTIYRLVAKDTIEEKIVQLHHQKRDLADSLLEGTDMSGKISTEALLQLISQG

SEQ ID NO: 16508 - protein, 495 aa, Salmonella enterica subsp. arizonae serovar 62:z4,z23:--
MADRNLRDLLAPWVAGLPARELREMTLDSRVAAAGDLFVAVVGHQADGRRYIPQAIAQGVAAIIAEARDEATDGEIREMHGVPVVYLSQLNERLSALAGRFYHEPSENMRLVAVTGTNGKTTTTQLLAQWSQLLGETSAVMGTVGNGLLGKVIPTENTTGSAVDVQHVLASLVAQGATFGAMEVSSHGLVQHRVAALKFAASVFTNLSRDHLDYHGDMAHYEAAKWMLYSTHHHGQAIVNADDEVGRRWLASLPDAVAVSMEGHINPNCHGRWLKAEAVDYHDRGATIRFASSWGEGEIESRLMGAFNVSNLLLALATLLALGYPLTDLLKTAARLQPVCGRMEVFSAAGKATVVVDYAHTPDALEKALQAARLHCAGKLWCVFGCGGDRDKGKRPLMGAIAEEFADIVVVTDDNPRTEEPRAIINDILAGMLDAGQVRVMEGRAEAVTNAIMQAKDNDVVLIAGKGHEDYQIVGTQRLDYSDRVTAARLLGVIA

SEQ ID NO: 16509 - protein, 245 aa, Rzedowskia tolantonguensis; identical to SEQ ID NO: 9571

SEQ ID NO: 16510 - protein, 1145 aa, Cymodocea nodosa
MAAVEHGPLSYRMFLEEVNGTVTGEVKSESSPQDGIIFVGVSLVLGIASRHVLRGTRVPYTVALLLLGVGLGALEYGTSHGLGKLGSGIRIWANINPDLLLGVFLPALLFESSFAMEVHQIKRCIVQMILLAGPGVLTSTFCLGSLLKLTFPYNWDWKTSLLLGGLLSATDPVAVVALLKDLGASKKLSTIIEGESLMNDGTAIVVYQLFYRMVLGEKFGVGSIIKFLSEVPLGAVAVGLAFGIVSVLWLGFIFNDTIIEITITLAVSYIAFYTSQEAIELSGVLTVMTVGMFYAAAARTAFKGESQESLHHFWEMVAYIANTLIFILSGVVIGESVMRNESNFESDGATWGYLILLYAYVQLSRVAVVAILFPLLRYFGYGLEFKEALILIWAGLRGAVALSLSLSVKRASDSLDSPSLKQEVGTLFVFFTGGIVFLTLIINGSTTQFLLHFLAMDKLSAAKIRILNYTKYEMLNKAIEAFEDLGEDEELGPADWPTVKKYITCLNDLEGEKEHPHTITESENHLHHINLSDTRVRLLNGVQAAYWEMLDEGRITQTTGILLMQSVDEAMDTVSHEPLCDWKALKSYVHFPKYYKFLQMSRIPQRLVTYFTVERLESACYISAAFLRAHRTARRQLHEFIGESEIAAAVINESNAEGEDARNFLEDVRISFPQVLRAVKTKQVTYSVLKHLSEYVQTLEKVGLLEEKEMLHLDDAVQTDLKKLLRNPPLVKMPKVRELLDTHPLLGVLPKQVRVPLENSTKETMKIKGTTLYKEGSKPNGIWLISNGVVKWASKTLSNRQSLHPTFLHGSTLGLYEVLVGKPFICDMITDSLVHCFFIEAEKIVPLLRSDPDIEEFLWQESSIVIAKLLLPPVFEKLSLQEVRGLIAERSRMNIYISGEFIEIPHNSVCILLEGFLKTQDAHKSLIASPAVLLPSNVELSFLSLESSGIAAASFCHRGNSYMAEARARVILFEIGATEPPSPLQRRQSSWMSHSIEPQKLQEHGGLMSWPENLQRARSHQILKDSDHHANNMSTRAMELNIFGSMVEGTHKHHAGVPKTSLDFSKSYHRIPSETSPLPLVSTRSEGESLGKRLGQREKPKLLPPPPKPVTGASESKPAEDNSSDESGAEEEIIVRIDSPSHIDI

SEQ ID NO: 16511 - protein, 123 aa, Salmonella enterica
KPMFGDNGSGMHCHMSLAKNGTNLFSGDKYAGLSEQALYYIGGVIKHAKAINALANPTTNSYKRLVPGYEAPVMLAYSARNRSASIRIPVVASPKARRIEVRFPDPPPPPYLCFAALLMAGLD

SEQ ID NO: 16512 - protein, 245 aa, Salacia impressifolia; identical to SEQ ID NO: 9574

SEQ ID NO: 16513 - protein, 569 aa, Porphyromonas gingivalis W83
MKKTNLFLSLLVIFITGSFMTACAQKSKTNKLTEEDRSRNEYVQSMDVLSNIIGNVRLYFVDTISIKHMTRRGIDAMLGGLDPYTEYIPYEEMDELKLMTTGEYAGVGAIISQRPDSAVIIQRPMEGMPADEAGLIAGDRILTIDGKDFRKSTTPKVSQALKGIAGTVAKVTVMRYGETKPRTFSVKRQKVIMNSVTYSGMLDGSIGYIRLNNFTDKSAEEVRTALLDLRDKQGAKGLILDLRGNGGGLMQAAIEIVNLFVPKGKEVVTTKGRIAESASVFRTLTEPIDTKLPIVVLIDGQSASSSEIVAGALQDMDRAVLMGQKSYGKGLVQTTRQLPYNGVIKLTTAKYYIPSGRCIQRLDYSRTNRTGMATAIPDSLHKIFYTAAGRRVEDAGGILPDIEVKQDTAATLLYYMAINNDVFDFVTGYVLKHKTIAKPEDFSITNEDYAAFCKMMEEKKFDYDRQSGKMLDKLEELAKIEGYLPEANSELKALREKLKPNLSRDLLRFKKEITNYLNNEIVTRYYYERGSIRQSLPEDKVVKEAIKLLKDHPEQIRQILAAPKAENKG

SEQ ID NO: 16514 - protein, 245 aa, Salacia impressifolia; identical to SEQ ID NO: 9575

SEQ ID NO: 16515 - protein, 469 aa, Salmonella enterica subsp. enterica serovar Typhi str. CT18
MSAEHVLTMLNEHEVKFVDLRFTDTKGKEQHVTIPAHQVNAEFFEEGKMFDGSSIGGWKGINESDMVLMPDASTAVIDPFFADSTLIIRCDILEPGTLQGYDRDPRSIAKRAEDYLRATGIADTVLFGPEPEFFLFDDIRFGASISGSHVAIDDIEGAWNSSTKYEGGNKGHRPGVKGGYFPVPPVDSAQDIRSEMCLVMEQMGLVVEAHHHEVATAGQNEVATRFNTMTKKADEIQIYKYVVHNVAHRFGKTATFMPKPMFGDNGSGMHCHMSLAKNGTNLFSGDKYAGLSEQALYYIGGVIKHAKAINALANPTTNSYKRLVPGYEAPVMLAYSARNRSASIRIPVVASPKARRIEVRFPDPAANPYLCFAALLMAGLDGIKNKIHPGEAMDKNLYDLPPEEAKEIPQVAGSLEEALNALDLDREFLKAGGVFTDEAIDAYIALRREEDDRVRMTPHPVEFELYYSV

SEQ ID NO: 16516 - protein, 150 aa, Salmonella enterica
ATFMPKPMFGDNGSGMHCHMSLAKNGTNLFSGDKYAGLSEQALYYIGGVIKHAKAINALANPTTNSYKRLVPGYEAPVMLAYSARNRSASIRIPVVASPKARRIEVRFPDPAANPYLCFAALLMAGLDGIKNKIHPGEAMDKNLYDLPPN

SEQ ID NO: 16517 - protein, 450 aa, Triticum aestivum
LSLTSLYKKAGWYRSGIPGISSTHASASGQHRCRVVPAGRFYEIARNKGVGLTFASMGMTSFCDGPADGTNLTGVGEIRLMPDMSTLLRLPWSTREEMVIADMQIRPGEAWEYCPRYALRKVTKVLLDEFNVTMKAGFENEFYLRRKLVSEGHERWVPYDNSSYCSTSSFDGASSILQEVYSSLKVANIVVEQLHAEAGKGQFEVALKYVLCTLAADNLIYAREIIKSVARKHGLIATFLPKPDLNDIGSGSHVHLSLWKNDQNVFMGSNEYSHYGMSNVGEQFLAGVYHHLPSILAFTAPHPNSYDRIQPNTWSGAYLCWGKENREAPLRTACPPGVPLDMVSNFEIKSFDGCANPHLGLAAIVAAGIDGLRKGLKLPEPIESNPADYATKLKRLPQDLLESVESLAADKTLHELIGDKLITAIIAVRKAEIDHYSKNPGAFGDLIHRY

SEQ ID NO: 16518 - protein, 361 aa, Salacia nitida; identical to SEQ ID NO: 9577

SEQ ID NO: 16519 - protein, 127 aa, Salmonella enterica
FMPKPMFGDNGSGMHCHMSLAKNGTNLFSGDKYAGLSEQALYYIGGVIKHAKAINALANPTTNSYKRLVPGYEAPVMLAYSARNRSASIRIPVVASPKARRIEVRFPDPAANPVSVLCRPADGRSGR

SEQ ID NO: 16520 - protein, 620 aa, Campylobacter upsaliensis RM3195
MAKVIGIDLGTTNSCVAVYERGESKVIPNKEGKNTTPSVVAFTDKGEILVGDSAKRQAVTNPEKTIYSIKRIMGLMINEDAAKEAKNRLPYHITERNGACAVEIAGKIYTPQEISAKVLMKLKEDAEAFLGESVVDAVITVPAYFNDAQRKATKEAGTIAGLNVLRIINEPTSAALAYGLDKKDSEKIVVYDLGGGTFDVTVLETGDNVVEVLATGGNAFLGGDDFDNKLIDFLAEEFKSETGIDLKNDVMALQRLKEAAENAKKELSSANETEINLPFITADASGPKHLVKKITRAKFESMIEKLVSETITKINEVVSDAGLKKDEIKEIVMVGGSTRVPLVQEEVKKAFNKDLNKSVNPDEVVAIGAAIQGAVIKGDVKDVLLLDVTPLSLGIETLGGVMTKIIEKGTTIPTKKEQVFSTAEDNQNAVTINVLQGEREFSRDNKSLGNFNLEGIPPAPRGMPQIEVTFDIDANGILTVSAKDKATGKAQEIKITGSSGLSEEEINNMVKDAELHKEEDKKRKEAVEMRNQADSLAHQVEKSLNELGEKVAEDDKANIQKALDDLRETLKNENASKEEIEAKMKTLSEVSHKLAETMYKKDEANDKKKKDDDVIDAEVE

SEQ ID NO: 16521 - protein, 592 aa, Xanthomonas oryzae pv. oryzae KACC10331
MKQARRHCWRRGIAATLIGGVISRRGTRASIGRDGLQLRFAALPWRTRCVAAAFCRFVKRSTRTPRARQESAVGLATLDIVIVLVYLTGIFVLAQWVSREKAGHSKSAEDYFLASKSLPWWAIGASLIAANISAEQIIGMAGSGYAIGLAIASYEWMAALTLLIVGKFFLPIFLRNGIYTMPQFLEQRYGKWIRTLMAVFWLLLYVFVNLTSILWLGSIAVSQVTGMDQTLALALIGVFALVYQLYGGLKAVALTDIVQVTLLVLGGLLVAALTLARIGDGAGVLEGFQHLWNAHPEHFHMILTKDNPFYKDLPGLSVLLGGLWVMNISYWGFNQYIIQRALAAKNIGEAQKGMVFAAFLKLLMPLVIVVPGIAAVVLAPDLAKPDQAYPTMMQLLPTGMLGLVFAALVAAIVASLASKINSVATIFTLDFYAKFRPQTEQKQLVRVGRIVAAVSVLIGILTARPLLGNFDQGFQFIQEFTGFFTPGVVVIFMLGLFWKRANEAGALTAAIGSVVLSFVLKFAWPELPFMDRIGVVFVAALMLAVLVSLLTPATQARDLIRTNEVAYGTTLSFKIGAAGVIAILIVLYTVFW

SEQ ID NO: 16522 - protein, 561 aa, Blastopirellula marina DSM 3645
MLRWTTPRSASRFVGAFLLTLILLSLVAAPAALAQVKIPDEAVLDQREITQLIADGELLEKEGRWAEALTHFEDAARAFPEVAQLKEKVDTVRRRYDVSRRYADRSFVGGMRNLPADQALSLYDDLLAKIQTNYVDSPRWSDLAYRGMLQLDAALFDRTFRQVNLKGMSEEQIADLRRQLWQSAQIDRVQNRFDVRAIALQAGQISQRISGMPATAAVLEFISGAAGSLDHYSCFLTPDQLNEVYSQIEGNFVGVGIELKTQDDALLIVRSIPGSPADKAGILDGERIVAVEGRTINQLGSEKAADMLKGVIGSSITMTIADANDAKRDVSVTRDRIEVPSVDVIKMIDPAAGVAYLRIASFQKTTTRDLTAALWSMHRQGMQALVIDLRGNPGGLLTSSVEIADLFLDQGTIVSTRGRSAGEDFDYTAHQAGTWRMPLVVLIDANSASASEIFAGAIHDNHRGTVVGERSYGKGSVQGIFPLGVANAGLRLTTAKFYSPSGQAISNRGVTPDVIVRRVAKPIGGTTILESKSDAALDAGLEAALVQLQPAQISNRAIGQR

SEQ ID NO: 16523 - protein, 119 aa, Arabidopsis thaliana
MASSMLSSATMVASPAQATMVAPFNGLKSSAAFPATRKANNDITSITSNGGRVNCMQVWPPIGKKKFETLSYLPDLTDSELAKEVDYLIRNKWIPCVEIRVGARIFVPVSTGNLNPGYY

SEQ ID NO: 16524 - protein, 456 aa, Oryza sativa
MSSGGGRPPAAQHIVRSVRQRFVPLPPPLARAPFAAAPGDYHRFAAASRGGEIEEGIVIRRTPLKRKTPCGESEAAESSERMMTSPGFTEGVGSPLMTPVSGKTSRTTKSMAKFNKAGPQTPISNAGSPGNPSTPASSRYDNSLGLLTRKFINLLKQTQDGILDLNDAAKILDVRKRRIYDITNVLEGTGLIEKKLKNRIRWRGSDDSGTNLDSDISCLKTEVENLYIQEQALDRSISEIREKMEELTEDESNHRWLFVTEDDIKGLPCFQNEALIAIKGPRGTTVEVPDPDEAGDYLQRRYRILLRSTMGPIDIYLVSQYKKMEELGETATPPRHASVVEPPSIATEAGHSSKQTMPLNVQQDIQETPELNASRAFGRMKKITPSDVNVDTDADYWLLTDDDISITHMWTTASEMQWDQIDTNDFLAEEISDTPCALNQPSAAASEPTGVGFNHG

SEQ ID NO: 16525 - protein, 387 aa, Oryza sativa Japonica Group
MEGGGAKDGSAAAAQTRGSGDDGSHKPLPPCCLKAKAAAAESEAKCHATVVSGWFTEPRSHSGKTSKVQYFNNPMWPGEAHSLKVENILYQGKSPYQEILVFESSTYGNVLVLDGIVQLTEKDECAYQEMVTHLPLCSIPSPKSVLVVGGGDGGVLREIARHASVENIDICEIDQLVIDVCKDFFPQLSVGFKDPRVQLHVGDAVDFLRNAPEGKYDAIIVDSSDPIGPAQELVEKPFFQTIARALKPGGVLCNQAESMWLHTHLIQDMLSICRETFKGAVHYAWTSVPTYPSGVIGFLLCAKEGPAVNFLSPVNPIEKLEGAMEAGREIRFYNSEVHRAAFVLPTFVRRELESHNTCAEKDKSETKPVAKPKKMKIMPNSAIPTAS

SEQ ID NO: 16526 - protein, 188 aa, Pseudotsuga menziesii var. menziesii
DDVIVISIDGAPKEGCQHISVLTEADETQCPSVEIHPDDVVALPYSSGTTGLPKGVMLTHKSLVSSVAQQVDGENPNLYFHSEDVILCVLPLFHIYSLNSVLLCALRAGAATLIMQKFNLTMLLELIQRYKVTVAPIVPPIVLDITKNPIVSKYDVSSVRIIMSGAAPLGKELEDALRERFPKAIFGQ

SEQ ID NO: 16527 - protein, 178 aa, Frankia sp. CcI3
MTVHDFTVDAADGTSRSLGDYAGQTLLIVNVASKCGLTPQYEGLESLYRDLHGRGLEILGFPCNQFGGQEPGTDAEIQEFCATKFDVTFPVLGKIEVNGPDAAPLYTHLRSEAPGDFGPDAGFLYEHIKKTRPEAIGTDEIKWNFTKFLVDPDGKVVRRYEPTVTPEEIRKDLEATLA

SEQ ID NO: 16528 - protein, 1126 aa, Physcomitrella patens; identical to SEQ ID NO: 9589

SEQ ID NO: 16529 - protein, 182 aa, Verrucomicrobium spinosum DSM 4136
MKKLLLTAVLAVSTAFAADAPSLYDIPVKDIEGKETSLKPYAGKVLLIVNVASQCGNTPQYQGLQDLYKKYGDKGLVVLGFPCNDFGAQEPGSNAEIKEFCSTNYKVTFPMFDKVHVKGPDQHPLFTALTGSQGAFPGNVKWNFGKFLIGRDGKPLQRIEPGTEPDDPAVVAAIEKALGEKG

SEQ ID NO: 16530 - protein, 1123 aa, Physcomitrella patens; identical to SEQ ID NO: 9590

SEQ ID NO: 16531 - protein, 444 aa, Prochlorococcus marinus str. MIT 9312
MKIRKLLKKNFIILFATTFSGLFLNNFAEATVLNNSYKEVIDHVWQIVYRDFLDSSGKFQKSNWINLRKEVLSKTYSDSNEAYDAIRDMLSNLDDSYTRFLEPKEFNQMRIDTSGELTGVGIQIVKDKESDDLIIISPIEGTPAFDAGIKARDKILSIDDISTEGMNIEEAVKLIRGQRGTKVKLEILRGSKSFFKILSRERIEIKTVSTKVNQAKNGLLIGYVRIKQFNANASKETRDAIKDLETKKVAGYVLDLRSNPGGLLESSIEISRHFINKGVIVSTVSKDGLKETKRGNGQALTKKPLVVLVNEGSASASEIVSGAIKDNKRGKLVGKKTFGKGLVQSMRTLVDGSGLTVTVAKYLTPNGTDINESGIIPDIEVKMNINPILQREIGTRKDKQYRAGEKELVNIIKRNNNISEFNPNTANLNALLKINKENKVFSLN

SEQ ID NO: 16532 - protein, 901 aa, Nostoc ellipsosporum
MRILKIQTLRGRNYWSIRRHKLIVMRLDLETLAETPSNEIPGFYEGLVEALPSLDGHYCSPGCHGGFLMRVREGTMMRHIVEHVALELQELAGMHVGFGRTRETATPGIYQVVIEYLNEEAGRYAGRAAVRLCQSIVDRGRYPKAELEQDIQDLKDLWRDASLGPSTEAIVKEAEKRGIPWMQLSARFLIQLGYGVNHKRMQATMTDKTGILGVELACDKEATKRILAASGVPVPRGTVINFLDDLEEAIEYVGGYPIVIKPLDGNHGRGITIDIRSWEDAEAAYEAARQVSRSIIVERYYVGRDDRVLVVDGKVVAVAERVPAHVIGNGRSTVAELIEEINQDPNRGDGHDKVLTKIELDRTSYQLLERAGYTLNSVPPKGTICYLRATANLSTGGTAVDRTDEIHPENVWLAQRVVKIIGLDIAGLDIVTTDISRPLRELDGVIVEVNAAPGFRMHVAPSQGIPRNVAGAVMDMLFPNEQSGRIPILSVTGTNGKTTTTRLLAHIYKQTGKVVGYTTTDGTYIGDYLVESGDNTGPQSAHVILQDPTVEVAVLETARGGILRFGLGFESANVGVVLNVAADHLGIGDIDTIDQLANLKSVVAESVYPDGYAVLNADDRRVAAMAEKTKANIAYFTMNSESELVRKHIQKGGVAAVYENGYLSIVKGDWTHRIERAEQIPLTMGGRAPFMISNALAASLAAFVQNVSIEQIRAGLRTFRASVSQTPGRMNLFNLGNYHALVDYAHNPASYEAVGAFVRNWTSGQRIGVVGGPGDRRDEDFVTLGKLAAEIFDYIIVKEDDDTRGRPRGSASELITKGITQVKPDARYESILDETQAINKGLDMAPANGLVVILPESVSRAIKLIKLRGLVKEEIQQQNSSTTVIDNQNGVASSSVINTLL

SEQ ID NO: 16533 - protein, 1130 aa, Physcomitrella patens; identical to SEQ ID NO: 9593

SEQ ID NO: 16534 - protein, 776 aa, Listeria innocua Clip11262
MIKLDMTMLDSFKENEALRKYLFSGHFGLEKENIRVTSDGKLALTPHPAIFGPKEDNPYIKTDFSESQIEMITPVTDSIDAVYEWLENLHNIVSLRAENELLWPSSNPPILPAEEDIPIAEYKTPDSPDRKYREHLAKGYGKKIQLLSGIHYNFSFPEALIDGLYAEISHPNESKRDFKNRLYLKVAKYFMKNRWLLIYLTGASPVYLADFTKTNSEEVLNDGSKALHRGISLRNSNAGYKNKESLFVDYNSFDAYISSISNYIEAGKIESMREFYNPIRLKNAHTDQTVESLAKHGVEYLEIRSIDLNPLEPNGISKDELIFIHLFLIKGLLSEDRELCANNQQLADENENNIALNGLAQPAIKNCDNEEMSLADAGLLELDKMSDFIQSLIPNDNHFQAIIEKQKERLLHPEKTIAAQVQAQSAKEGYVEFHLNQAKTYMEETEALAYKLVGAEDMELSTQIIWKDAIARGIKVDVLDRAENFLRFQKGDHVEYVKQASKTSKDNYVSVLMMENKVVTKLVLAEHGIRVPFGDSFSDQALALEAFSLFEDKQIVVKPKSTNYGWGISIFKNKFTLEDYQEALNIAFSYDSSVIIEEFIPGDEFRFLVINDKVEAVLKRVPANVTGDGIHTVRQLVEEKNTDPLRGTDHLKPLEKIRTGPEETLMLSMQNLSWDSIPKAEEIIYLRENSNVSTGGDSIDYTEEMDDYFKEIAIRATQVLDAKICGVDIIVPRETIDRDKHAIIELNFNPAMHMHCFPYQGEKKKIGDKILDFLFE

SEQ ID NO: 16535 - protein, 469 aa, Novosphingobium aromaticivorans DSM 12444
MATAKDILARIKDEEIEWVDLRFTDPKGKWQHLTMVSTVLGEDELEDGLMFDGSSIEGWKAINESDMILKPDLDAVYVDPFSASPMLIICCDIVEPSTGELYARDPRSTAKRAEAFVKTAGLGDTVYVGPEAEFFLFDDVKFYDGYDGNGFRIDDIELPTNSNKDIEGGNLAHRPRAKGGYFPVAPVDSCVDIRGEMVRTMLDMGLPCDKHHHEVASAQHELGLTFGTLVQTADRMQVYKYVVQQVAHAYGKTATFMPKPIKGDNGSGMHTHISIWDSGKPLFAGNGYAGLSDMCLYFIGGVIKHAKALNAFTNPTTNSYKRLVPGYEAPVLLAYSARNRSASCRIPYGAGAKAKRVEFRFPDAMANPYLCYAALLMAGIDGIKNKIHPGEAMDKNLYDLPPAELAEVPTVCGSLREALESLEADHDFLLQGGVFTKEQIESYIELKWPEVLRWETTPSAVEFDMYYSL

SEQ ID NO: 16536 - protein, 1122 aa, Physcomitrella patens; identical to SEQ ID NO: 9597

SEQ ID NO: 16537 - protein, 364 aa, Salacia nitida; identical to SEQ ID NO: 9598

SEQ ID NO: 16538 - protein, 183 aa, Oryza sativa
  misc_feature (137)..(137): Xaa can be any naturally occurring amino acid
  misc_feature (143)..(143): Xaa can be any naturally occurring amino acid
RKAAGVGILLQISMLVVSFVLGHVLRRRKVYYIPEASASLLIGMIVGGLAKISNTQRSIRRWFNFREDSFLLFLLPPIIFQSGFSLAPKPFFSNFGAIITFAILGTFIASIVTGLLVYVGGLIYIVFKSPLAACMMXFGALVXAPDPVTVLSIFQELGTDVNLYALVFGESVLNDAVAISLYR

SEQ ID NO: 16539 - protein, 374 aa, Salaciopsis glomerata; identical to SEQ ID NO: 9599

SEQ ID NO: 16540 - protein, 284 aa, Symbiobacterium thermophilum IAM 14863
MNRGDWLIEEQTPSYQTRWRVREVLHEEQTPYQKLQVLELEDFGRALVLDDAVQTTVGDEFIYHEMIAHVPLFTHPHPERVLIIGGGDGGTAREVCRHESVQKVDMVEIDRAVIEACRKHLPEIACGMDHPKVNLVVGDGIAWVADHADEYDVIIVDSSDPVGPAKGLFNQAFYKNVFRALKADGLFVCQVLSPFFHQSLIRDVYGVVSAIFPITMPYLAVVPTYPSGLHCFMLGSKRHSPLREGVRTPAWPTRWYTPAVHRAAFQLPPVVAQLLEPSGSQAGQ

SEQ ID NO: 16541 - protein, 147 aa, Salmonella enterica
TFMPKPMFGDNGSGMHCHMSLAKNGTNLFSGDKYAGLSEQALYYIGGVIKHAKAINALANPTTNSYKRLVPGYEAPVMLAYSARNRSASIRIPVVESRKARRIEVRFPDPAGNPYLCFAALLMAGLDGIKNKIHPGEAMDKNLYDLP

SEQ ID NO: 16542 - protein, 369 aa, Schaefferia frutescens; identical to SEQ ID NO: 9601

SEQ ID NO: 16543 - protein, 309 aa, Schaefferia frutescens; identical to SEQ ID NO: 9602

SEQ ID NO: 16544 - protein, 272 aa, Francisella tularensis subsp. tularensis SCHU S4
MPSKPVKKDHRGYIMPIGGGEDKFASPTVLEKFVQLSGGTEAKIAVIPTASKLPDTGDIYVDIFTKMGVKEVHNLKIETRLDATTNKEYQDILSQCTGIFMTGGNQLLLSTTLGGTPVAQLIRRLNAKGVNVAGTSAGAAFISGFMIAGGQAGLMPRCNMVNLAPGLGLTNKLLVDQHFSQRDRLGRLLAALSYNPYMVGVGIDEDTSALLNFENVIEVVGSGMVTIIDFSHLKHSSLHNARNNAPISLVDIRMHMLLEGQKFDLNTCLVEF

SEQ ID NO: 16545 - protein, 146 aa, Salmonella enterica
FMPKPMFGDNGSGMHCHMSLAKNGTNLFSGDKYAGLSEQALYYIGGVIKHAKAINALANPTTNSYKRLVPGYEAPVMLAYSARNRSASIRIPVVASPKARRMEVRFPDPAANPYLCFAALLMAGLDGIKNKIHPGEAMDKNLYDLP

SEQ ID NO: 16546 - protein, 363 aa, Simicratea welwitschii; identical to SEQ ID NO: 9607

SEQ ID NO: 16547 - protein, 143 aa, Oryza sativa; identical to SEQ ID NO: 14419

SEQ ID NO: 16548 - protein, 545 aa, Solanum tuberosum
MPMDTETKQSGDLIFRSKLPDIYIPKHLPLHSYCFENLSEFNSRPCLIDGANDRIYTYAEVELTSRKVAVGLNKLGIQQKDTIMILLPNCPEFVFAFIGASYLGAISTMANPLFTPAEVVKQAKASSAKIVITQACFAGKVKDYAIENDLKVICVDSVPEGCVHFSELIQSDEHEIPDVKIQPDDVVALPYSSGTTGLPKGVMLTHKGLVTSVAQQVDGENANLYMHSDDVLMCVLPLFHIYSLNSVLLCALRVGAAILIMQKFDIAQFLELIPKHKVTIGPFVPPIVLAIAKSPLVDNYDLSSVRTVMSGAAPLGKELEDAVRAKFPNAKLGQGYGMTEAGPVLAMCLAFAKEPFDIKSGACGTVVRNAEMKIVDPDTGCSLPRNQPGEICIRGDQIMKGYLNDPEATARTIEKEGWLHTGDIGFIDDDDELFIVDRLKELIKYKGFQVAPAELEALLINHPDISDAAVVPMIDEQAGEVPVAFVVRSNGSTITEDEVKDFISKQVIFYKRIKRVFFVETVPKSPSGKILRKDLRARLAAGISN

SEQ ID NO: 16549 - protein, 188 aa, Pseudotsuga menziesii var. menziesii
DDVIVISIDGAPKEGCKHISVLTEADETQCPSVEIHPDDVVALPYSSGTTGLPKGVMLTHKSLVSSVAQQVDGENPNLYFHSEDVILCVLPLFHIYSLNSVLLCALRAGAATLIMQKFNLTMLLELIQRYKVTVAPIVPPIVLDITKNPIVSQYDVSSVRIIMSGAAPLGKELEDALRERFPKAIFGQ

SEQ ID NO: 16550 - protein, 545 aa, Solanum tuberosum
MPMDIETKQSGDLIFRSKLPDIYIPKHLPLHSYCFENLSEFNSRPCLIDGANDRIYTYAEVELTSRKVAVGLNKLGIQQKDTIMILLPNCPEFVFAFIGASYLGAISTMANPLFTPAEVVKQAKASSAKIVITQACFAGKVKDYAIENDLKVICVDSAPEGCVHFSELIQSDEHEIPDVKIQPDDVVALPYSSGTTGLPKGVMLTHKGLVTSVAQQVDGENANLYMHSDDVLMCVLPLFHIYSLNSVLLCALRVGAAILIMQKFDIAQFLELIPKHKVTIGPFVPPIVLAIAKSPLVHNYDLSSVRTVMSGAAPLGKELEDAVRAKFPNAKLGQGYGMTEAGPVLAMCLAFAKEPFDIKSGACGTVVRNAEMKIVDPDTGCSLPRNQPGEICIRGDQIMKGYLNDPEATARTIEKEGWLHTGDIGFIDDDDELFIVDRLKELIKYKGFQVAPAELEALLINHPDISDAAVVPMIDEQAGEVPVAFVVRSNGSTITEDEVKDFISKQVIFYKRIKRVFFVETVPKSPSGKILRKDLRARLAAGISN

SEQ ID NO: 16551 - protein, 188 aa, Pseudotsuga menziesii var. menziesii
DDVIVISIDGAPKEGCQHISVLTEADETQCPSVEIHPDDVVALPYSSGTTGLPKGVMLTHKSLVSSVAQQVDGENPNLYFHSEDVILCVLPLFHIYSLNSVLLCALRAGAATLIMQKFNLTMLLELIQRYKVTVAPIVPPIVLDITKNPIVSQYDVSSVRIIMSGAAPLGKELEDALRERFPKAIFGQ

SEQ ID NO: 16552 - protein, 606 aa, Streptococcus pneumoniae
MSKIIGIDLGTTNSAVAVLEGTESKIIANPEGNRTTPSVVSFKNGEIIVGDAAKRQAVTNPDTVISIKSKMGTSEKVSANGKEYTPQEISAMILQYLKGYAEDYLGEKVTKAVITVPAYFNDAQRQATKDAGKIAGLEVERIVNEPTAAALAYGLDKTDKEEKILVFDLGGGTFDVSILELGDGVFDVLSTAGDNKLGGDDFDQKIIDHLVAEFKKENGIDLSTDKMAMQRLKDAAEKAKKDLSGVTSTQISLPFITAGEAGPLHLEMTLTRAKFDDLTRDLVERTKVPVRQALSDAGLSLSEIDEVILVGGSTRIPAVVEAVKAETGKEPNKSVNPDEVVAMGAAIQGGVITGDVKDVVLLDVTPLSLGIETMGGVFTKLIDRNTTIPTSKSQVFSTAADNQPAVDIHVLQGERPMAADNKTLGRFQLTDIPAAPRGIPQIEVTFDIDKNGIVSVKAKDLGTQKEQTIVIQSNSGLTDEEIDRMMKDAEANPEADKKRKEEVDLRNEVDQAIFATEKTIKETEGKGFDPERDAAQAALDDLKKAQEDNNLDDMKAKLEALNEKAQGLAVKLYEQAAAAQQAQEGAEGAQATGNAGDDVVEEFTEK

SEQ ID NO: 16553 - protein, 151 aa, uncultured Frankia sp.
SRDPRNTAKKAEAYLRGTGFADTAYFGPEAEFYIFDDVRYDYNPYGSLHAVDSIEAAWNTARKEEGGNLGYKPRFKGGYFPVPPTDHFTDLRSEMSRALIRAGITVEMQHHEVGTAGQAEIDIRYDTLLRTADNLMLYKYIIRNVALSRGK

SEQ ID NO: 16554 - protein, 289 aa, Photorhabdus luminescens subsp. laumondii TTO1
MSQKEIWSETLHANFGQYFSVDKVLYHDKTEHQDLIIFENATLGRIMALDGTVQTTERDEFIYHEMMAHVPLFAHGNAKRVLIIGGGDGGMLREVCRHQYLESITMVEIDAGVVEFCRQYLPNHNAGAYDDPRFNLIIDDGVNFVNTTDQKFDVIISDCTDPIGPGEGLFTSEFYQGCQRCLNEGGIFVAQNGVCFLQQDEAVTSHKKLSNYFADSGFYQAAIPTYYGGIMTFAWASQNPALRHVDLATLQQRFDNASFTCRYYNPAVHVGSFALPQYLLDALFTGCTI

SEQ ID NO: 16555 - protein, 402 aa, Shewanella oneidensis MR-1
MKHLLRNIASLGLGLSLGLSISLSSQENTKSYRSDFDYPLLQDVLETVETYYVKTVTKDELVQAAIKGIFEHLDPYSSFLNHQELLDLKDSNRGEYFGFGFEVASEKDHISIIAPFANSPAEQAGIQAGDIIIKLNNTPTTETNLADILNQIKQHSLSHQSIRLTLKHRNDEAEFEVMLKPSTITIQSVASKLLDGNIGYVRLSSFQEDSTEDMVRTLSQWQGTQLTGLILDLRNNPGGLLDQAINIADLFLAKGRIVSTSGRFFDANSDYYASPQTMLANVPMLVLINKGSASASEVLAAALQENGRAKLLGETSFGKGTVQSLIPILNNGNAVKLTIAQYNTPKGENIHDIGIKPDIKVVSETGSNQKNMPIIDAISARTDVSQDTIVTSAITWMQHHDE

SEQ ID NO: 16556 - protein, 173 aa, Glycine max
  misc_feature (84)..(84): Xaa can be any naturally occurring amino acid
  misc_feature (99)..(99): Xaa can be any naturally occurring amino acid
MSDAPPSPTHESGGEQSPRGSSSGAREQDRYLPIANISRIMKKALPPNGKIAKDAKDTMHECVSEFISFITSEASEKCQKEKRXTINGDDLLWAMATLXFEYYIEPLKVYLARYREAEGDTKRSVRSGDGSATSDHVRVAGQNSQLVHQGSLNYIGLQVQPQHLVMPSMQGHE

SEQ ID NO: 16557 - protein, 910 aa, Arabidopsis thaliana; identical to SEQ ID NO: 12464

SEQ ID NO: 16558 - protein, 517 aa, Nostoc punctiforme PCC 73102
MDVTELVKVSIILLLLATGVALLSRRLRIPYVTGLVLAGLPITELLSRPIGLNPTLVLNLFLPILIFEAGINTDVSRLRSTFKPIALLAGPGAVLSSGIIAALLKFGLGLSWIPALFVGVILANTDTVSMIAVFKEIPVPSRLSTIVEGETLFNDAAALVSFNLILQVYSTGSLTFVEGIQQLLFISLGGCLVGLVLGYLSIPVFARLDDALSSLLLTVAVALGTFQVGQFLGVSGAVAVVVAGLIFGNLGLSQNTSASSRITLLSFWEYASFTVNTFIFLLIGVEIDLVTLWRTLPAIIFAVLAYQVGRVLTVYPLLAGIRLIDRPIPLRWQHLLFLGNIKGSLSMALALSLPETLPGRDVLIALVFGSVLVSLVGQGLSLPWVVKRLQLSKFSEVQQQVEELQAQLMTGKAAQDELDSLLKSGVLPKAVYEEMRSAYQVRIAGAEKTLRELYNRRPDDVNGKSNSSGKLDAIRRRLLLAEKGALNEAMRKRILSEEIVRGRIQNLDEQLLKLDDD

SEQ ID NO: 16559 - protein, 623 aa, Cyanophora paradoxa
MEVKHMGKIVGIDLGTTNSVVAVMEGGKPTVITNAEGFRTTPSVVAYTKTGDRLVGQIAKRQAVLNPGNTFYSVKRFIGRKFDEVTEEAKQVPYKVTGTQNVRIECPALQTSFTPEEISAQVLRKLAEDASKYIGEPVTQAVITVPAYFNDSQRQATKDAGKIAGLEVLRIINEPTAASLAYGLDKKKNETILVFDLGGGTFDVSILEVGDGVFEVLSTSGDTHLGGDDFDKKLVDFFIEEFQKLENINLREDQQALQRLTEAAEKAKIELSSVTQTEITLPFLSLTPSGPKHFDTTLNRAKFEELCSTLIDRCRIPVETALKDAKLTKEDIDEVVLVGGSTRIPAVRELVQKVLDKVPKQSVNPDEVVAVGAAVQAGVLAGEVKDIVLLDVTPLSLGVETLGGVMSKIIVRNTTIPTQKSELFSTATDGQTNVEIHVLQGERGFAKDNKSLGTFRLDGIAPAPRGVPQIEVTFDIDANGILSVTAKDKGTGKEKSITITGASTLSQDEVERMVQEAEKNAAQDKENRQKIELRNQAESLINQAERQLKEFKLEPNVQAPIEQTIQQLQTALKEDNLEQVQSLCQELQNSLLEIGKQVYSKTETTTPNKNEEDVIDASFSEEK

SEQ ID NO: 16560 - protein, 135 aa, Brassica napus
MGEVVEIMFGNGFPEIHKDTSPIQTLHSNQQECHWYEETIDDDLKWSFALNSVLHKGTSEYQDIALLDTKRFGKVLVIDGKMQSAERDEFIYHECLIHPALLCHPNPKTVFIMGGGEGSAARQILKHKTIEKVVM

SEQ ID NO: 16561 - protein, 1126 aa, Ceratodon purpureus; identical to SEQ ID NO: 9620
  misc_feature (344)..(344): Xaa can be any naturally occurring amino acid

SEQ ID NO: 16562 - protein, 515 aa, Nostoc punctiforme PCC 73102
MVVESAIAEEVITNNLKQFLLVLSVSLGVATLPQVFSWFRNIPYTLLLVIVGLGLAFVDVRLVTLSPELILFIFLPPLLFEAAWNLKWSELKRDLVPICLYAVFGVVIAIAGVAIALNQFIGISLTTALLIAASLSATDPVSVTALFRQLGVGSRLTTLMEGESLFNDGMAVVAFSFVVALSLGTVELEFQPILLQLFTVVGIGVGVGAFIGFGISYLTQRFDLPLVEQSLTLVSAYGTYLIIEDLGGSGVIGVVTTGLILGNFGSRIGMNPRTRIIVSEFWEFLAFFVNSIVFLLIGDQIRFASLGENLQIIIVTVIAMILMRAVALLILSKLSTSITRSDISLPEQTILWWGGLRGSVSIALALSVSTILPEREKIIATVFGVVLFTLLVQGLSIKPLLEKLNLLGDAPLREEYLELVARHIALERVLQHLQADKRPGIDPEFRRYQETLIKSELADLRTKIDNLQDEYPNLQSFTTEQFRGELLAIEADTYAEFVKSGRLNKELASMLEDVL

SEQ ID NO: 16563 - protein, 1046 aa, Cyanothece sp. ATCC 51142
MTVLHGTWIDNKQEKKFFIWGENWRSLSDNFELQYSILLHPFAVDKDKIFEQLDNNNITIQGKKDIQGMSEIFYLPSQCLPNSKQKIPLLSTQLEDDFFDSKDIALIPFQIEGVALNIENTIQFLRQLPLGFTNKNENTIGEDLQFWTHIYRWSLDLLTRGKYLPGIEQEKNEAYGRWYPLLDSLVDQQKFSKFMQTMPNSCLAYYNLTDDKISYSLIKQNIIFDFFSTIIDQQVRQFVDVSIASNSSIQNWLQSLTQDFAQVEGSEFEIKGLNNALSNWTSSLDEYIISSDNQQLGINQFRVCFQLETPPINNKKSEQSNWRLNYCLQALDDPNILISAQAIWDNPVTQLVWNKRTIDYPQETLLKGLGLASRLSYLIEDSLQESYPSFCELDPIQVYEFIRGTANLLKDNGLGVVLPASLEKGVEEKRLGISLSAEVKAKKGQRLSLKSLLNYKFNLAIGDKTISKKEFEKLLAQKSPLVEVKGEWIALQPADVKAAQEVLNKSYDPLELSVEDALRFSTGDSSTIAKLPITNFEATGDLANLINAINNNESIPMIENPPGFKGQLRPYQQRGVGWLAFLEKWGLGACLADDMGLGKTPQLIGFLLHLKSEDMLEQPTLVVCPTSVLNNWEREVKKFAPSLSTLIHHGDKRSKGKAFIKAVSEKNVIITSYSLIHRDIKSFEQVEWQGVVLDEAQNIKNPQAKQSQAVRQLSTQFRIALTGTPVENRLSELWSILDFLNPGFLGTPQFFRRRFATPIEKYGDKQSLQIMRSLVQPFILRRLKTDKTIIQDLPEKQEMTVFCGLSSEQAQLYQELVDNSLMEIEEKTGIQRKGLILSLLLKLKQICNHPDHFLKKKNLKKAEQSGKLLRLEEMLEELIQEGDHALIFTQFSEWGKLLKPYLEKKFAQEVLFLYGATRRIQRQEMIDRFQHDPNGPRIFILSLKAGGTGLNLTRANHVFHIDRWWNPAVENQATDRAFRLGQKRNVQVHKFVCTGTLEERINEMLESKQKLAEQTVDSGEQWLTELDTDQLRNLLLLDREAIIDEP

SEQ ID NO: 16564 - protein, 842 aa, Glycine max
PRVRAWHGRQRQRATRAEKLRFQALKADDQEAYMRMVKESKNERLTLLLEETNKLLVNLGAAVQRQKDSKQSDGIEPLEDSETDLPESDGLKNGISKESPLEEDVDLIDSDRNGGDTSDLLEGQRQYNSAIHSIQEKVSEQPSILQGGELRPYQLEGLQWMLSLFNNNLNGILADEMGLGKTIQTISLIAYLMEHKGVTGPHLIVAPKAVLPNWINEFSTWAPSITTILYDGRLDERKAMKEELSGEGKFNVLITHYDLIMRDKAFLKKIHWLYLIVDEGHRLKNHECALARTLDSGYHIQRRLLLTGTPIQNSLQELWSLLNFLLPNIFNSVQNFEDWFNAPFADRVDVSLTDEEQLLIIRRLHQVIRPFILRRKKDEVEKFLPSKSQVILKCDLSAWQKVYYQQVTDVGRVGLDNGSGKSKSLQNLTMQLRKCCNHPYLFVGDYDIHKHKEEIFRASGKFELLDRLLPKLRRAGHRVLLFSQMTRLMDILEIYLRLNDFKFLRLDGSTKTEERGSLLRKFNAPDSAYFMFLLSTRAGGLGLNLQTADTVIIFDSDWNPQMDQQAEDRAHRIGQKKEVRVFVLVSVGSIEEVILERAKQKMGIDAKVIQAGLFNTTSTAQDRREMLQEIMRRGTSSLGTDVPSEREINRLAARSDEEFWLFEKMDEERRQKENYRSRLMEEHELPDWVYSPLNKDDKVKIFDSGSVTGKRKRNEVVYADTLSDLQWMKAVENGQDISKLSVKGKRRDHLPVDNHAQASDDMGTEERLFRSEDTFDVTPASKRLKPEEINSQKHENEDVSVGGLNEHIFSWNTRRKKRSGYLGQGSFSDSRGQNSNGRANWN

SEQ ID NO: 16565 - protein, 608 aa, Aspergillus fumigatus
MAPAVGIDLGTTYSCVGVFRDDRIEIIANDQGNRTTPSFVAFTDTERLIGDAAKNQVAMNPHNTVFDAKRLIGRRFQDAEVQSDMKHWPFKVVEKGGKPIIEVEFKGETKQFTPEEISSMVLTKMRETAEAYLGGTVNNAVITVPAYFNDSQRQATKDAGLIAGLNVLRIINEPTAAAIAYGLDKKAEGERNVLIFDLGGGTFDVSLLTIEEGIFEVKATAGDTHLGGEDFDNRLVNHFVNEFKRKHKKDLTTNARALRRLRTACERAKRTLSSAAQTSIEIDSLFEGIDFYTSITRARFEELCQDLFRSTMEPVERVLRDAKLDKSSVHEIVLVGGSTRIPKIQRLVADFFNKEANKSINPDEAVAYGAAVQAAILSGDTSSKSTNEILLLDVAPLSLGIETAGGVMTPLIKRNTTIPTKKSETFSTYSDNQPGVLIQVYEGERARTKDNNLLGKFELTGIPPAPRGVPQIEVTFDVDANGIMNVSAVEKGTGKTNKITITNDKGRLSKEEIERMLADAEKYKEEDEAEAARIQAKNGLESYAYSLKNTISEGKLNISDADKEKVSSKVEEIISWLDNNQTATKDEYESQQKELERYVSFLSLLMFT

SEQ ID NO: 16566 - protein, 178 aa, Zea mays
MAEAPASPGGGGGSHESGSPRGGGGGGSVREQDRFLPIANISRIMKKAIPANGKIAKDAKETVQECVSEFISFITSEASDKCQREKRKTINGDDLLWAMATLGFEDYIEPLKVYLQKYREMEGDSKLTAKSSDGSIKKDALGHVGASSSAAQGMGQQGAYNQGMGYMQPQYHNGDISN

SEQ ID NO: 16567 - protein, 490 aa, Yersinia pestis CO92
MRDLFAPWGLDVPERALREMTLDSRIAAAGDLFVAVVGHQTDGRRYIPQAIAQGVAAIVAEADGVAPDVSVAEIHGVPVIYLRNLNQHLSTLAGQFYHQPGAALRLVGVTGTNGKTTTTQLLAQWSQALGETSAVMGTVGNGLLGQVIPTENTTGSAVDIQHLLRNLVDQGATFAAMEVSSHGLIQDRVAALSFAAVVFTNLSRDHLDYHGNMTSYEAAKWLLFSTHQSEHKIINADDDVGRRWLSQLPQAVAVSMAGNVPKGWNGPWLSANKVIYHDNGASIAFDSSWGEGELESRLMGAFNVSNLLVALATLLVQGYPMAQLLAAAPHLQPVCGRMEVFNAPGKPTVVVDYAHTPDALEKALAAARLHCTGKLWCVFGCGGDRDKGKRPLMGGIAEQLADCVVVTDDNPRSEEPQAIVADILSGLLDAGRVQAIHGRAEAVTSAIMQAKEDDVVLIAGKGHEDYQLVGNRRLDYSDRVTVARLLGGQA

SEQ ID NO: 16568 - protein, 1110 aa, Lolium perenne
GSTSPRASPQSIHRSFLRSKFVIFFCFLSSPRRSEYGTKHGLGKLGAGIRIWAGINPDLLLAVFLPALLFESSFSMEVHQIKKCMAQMVLLAVPGVVISTVLLGTAVKLTFPYDWNWKTSFLFSGLLSATDPVAVVALLKDLGASKKLSTIIEGESLMNDGTAIVVYQLFYRMVLGTTFDAGSIIKFLSEVSLGAVALGLAFGIASVLWLGFIFNDTIIEISLTLAVSYIAFFTAQDALEVSGVLAVMTLGMFYAAFAKTAFKGDSQESLHHFWEMIAYIANTLIFILSGVVIADGVLQDNIHFERHGASWGFLLLLYVFVQLSRAVVVIVLYPLLRHFGYGMDVKKATVLVWSGLRGAVALSLSLSVKRASDAVQLYLKPEVGTMFVFFTGGIVFLTLIVNGSTTQFLLHLLGLGKLSATKLRVLKYTRYEMLNKALEAFGDLRDDEELGPADWITVKKYITCLNNLEDEQAHPHDVPDKDESVHTMNLKDTRVRLLNGVQAAYWGMLEEGRITQSTANILMRSVDEAMDLVSGQSLCDWKGLRSNVHFPNYYRFLQMSRLPRRLVTYFTVERLQLGCYICAAFLRAHRIARRQLHDFLGDSEVARIVVDESTAAGEEAKKFLEDVRVTLPQVLRALKTRQVTYAVLTHLSEYIQDLGKTGLLEEKEMAHLDDALQTDLKKLKRNPPLVKMPRVSELLNTHPLVGALPAAVRDPLSSNTKETIKVHGTVLYTEGSRPTGIWLVSTGIVKWTSQRLSTRHSLDPIFSHGSTLGLYEALVGKPYICDIITESVVHCFFIEAEKIEQLRQSDPSIEDFMWQESALVIARIFSPSDIEKMAMHEMRVLISERSMLNIYIKGEDIEPGHNYVGILLEGFLKMNNHLITPPAVLLPSNTDLNVFGLQSSVMNHIDYCYTATSYQVEARARAILFEIRRPEAESDLQRSASLLSPTLGPSRTQSKEHVGLVRWPESFRRSRGPGNPSLVDIGSQSFSARALQVSMYGSMMDDMHPAQRRQRPHPVKANQEHSASYPKVPSRVMSNSRPLLSVQSEGSNLMNRKSAPAPAIAPFPPRRQRRAIAEEDNSSDESVEEEIIVRVDSPSMFTFHPPSQGS

SEQ ID NO: 16569 - protein, 197 aa, Triticum aestivum
MESRKPQRSALVDSYVVPGDVILDLADMTNQTIKLGAGLRQDCDTIQATSAGRLRLSKPNKYWVENSQKRYVPSVEDTVLGIVVDTKPDNLLWWTYKGPNLAFLPVLSFEGGTRRNIPKFEIGTLIYARVVKANSIMNPELSCMDASGKAAEFGQLKSGYTFETSTGLARMLLSSPTCPLSRSPLGKNLSFGDSCWD

SEQ ID NO: 16570 - protein, 363 aa, Simicratea welwitschii; identical to SEQ ID NO: 9623

SEQ ID NO: 16571 - protein, 245 aa, Siphonodon australis; identical to SEQ ID NO: 9624

SEQ ID NO: 16572 - protein, 614 aa, Lactobacillus acidophilus NCFM
MSKVIGIDLGTTNSAVAVLEGKEPKIITNPEGNRTTPSVVAFKDGEIQVGEVAKRQAITNPNTIVSIKRHMGEADYKVKVGDKSYTPQEISAFILQYIKKFSEDYLGEEVKDAVITVPAYFNDAQRQATKDAGKIAGLNVQRIINEPTASALAYGLDKDDDDEKVLVYDLGGGTFDVSVLQLGDGVFQVLSTNGDTHLGGDDFDNRIMDWLIKNFKDENGVDLSKDKMAMQRLKDASEKAKKDLSGVSSTHISLPFISAGESGPLHLEADLTRAKFDELTNDLVEKTKIPFDNALKDAGLTVNDIDKVILNGGSTRIPAVQKAVKEWAGKEPDHSINPDEAVALGAAIQGGVISGDVKDIVLLDVTPLSLGIETMGGVFTKLIDRNTTIPTSKSQIFSTAADNQPAVDVHVLQGERPMAADDKTLGRFELTDIPPAPRGVPQIQVTFDIDKNGIVNVSAKDMGTGKEQKITIKSSSGLSDEEIKRMQKDAEEHAEEDKKRKDEADLRNEVDQLIFTTEKTLKETKGKVSDEDTKKVQEALDDLKKAQKDNNLDEMKEKKDALSKAAQDLAVKLYQQNGGAQGAAGQAGPQGGNPNDGNNGGAQDGEFHKVDPNK

SEQ ID NO: 16573 - protein, 120 aa, Brassica napus
  misc_feature (4)..(4): Xaa can be any naturally occurring amino acid
  misc_feature (36)..(36): Xaa can be any naturally occurring amino acid
  misc_feature (44)..(45): Xaa can be any naturally occurring amino acid
  misc_feature (57)..(58): Xaa can be any naturally occurring amino acid
  misc_feature (66)..(66): Xaa can be any naturally occurring amino acid
  misc_feature (71)..(71): Xaa can be any naturally occurring amino acid
  misc_feature (78)..(80): Xaa can be any naturally occurring amino acid
  misc_feature (82)..(82): Xaa can be any naturally occurring amino acid
  misc_feature (85)..(85): Xaa can be any naturally occurring amino acid
  misc_feature (90)..(90): Xaa can be any naturally occurring amino acid
MDAXEASATDLKRPREEDDAAAAAASMETENGDQTXEPACFSSXXPGWFSEMSPMWXXEAHSLKVXKVLFXGKSDYQXXXVXQSXTYGKXLFMQQLPKNCALSRTSSSLLCLLFPTPNVP

SEQ ID NO: 16574 - protein, 382 aa, Escherichia coli O157:H7 EDL933
MKALHFGAGNIGRGFIGKLLADAGIQLTFADVNQVVLDALNARHSYQVHVVGETEQVDTVSGVDAVSSIGDDVVDLIAQVDLVTTAVGPVVLERIAPAIAKGLVKRKEQGNESPLNIIACENMVRGTTQLKGHVMNALPEDAKAWVEEHVGFVDSAVDRIVPPSASATNDPLEVTVETFSEWIVDKTQFKGALPNIPGMELTDNLMAFVERKLFTLNTGHAITAYLGKLAGHQTIRDAILDEKIRAVVKGAMEESGAVLIKRYGFDADKHAAYIQKILGRFENPYLKDDVERVGRQPLRKLSAGDRLIKPLLGTLEYSLPHKNLIQGIAGAMHFRSEDDPQAQELAALIADKGPQAALAQISDLDANSEVVSEAVTAYKAMQ

SEQ ID NO: 16575 - protein, 485 aa, Idiomarina baltica OS145
MQLRDLLPPLPITFPNVAVSGIKLDSRQVANGDLFVAVPGYVTDGRDYINTAIAAGARAILAEGSSLRYEENGGAVCVFMPGVKEQLSEIAGRFFNHPSRHATLIGVTGTNGKTSVTHLAAQLAEKLGYTAAVIGTTGSGLIGQLLPEKHTTPDAVTVQQRLSTLVAEGADFIAMEVSSHALVQRRVEALRFDTAVATNISRDHLDYHGSMAHYVDAKRRLFEDFELNHRVINLDDRYLRDWLEGASNGLSISLQGHSRANIQVSDLAFAEHGTTFTLAYEGREAQFSTPLLGRFNVYNVVSAVAIMLAQKQSLTAIAQHCRHLSPVPGRMEAFQAGSSALVVVDYAHTPDALQQVLQALRLHCKGKLWCVFGCGGDRDRGKRPQMGQVAAEFADRVVVTDDNPRTEAPQQIIADIMAGIADKRKVHSMEGRRQAVLDTIERAAPDDVVLLAGKGHEDYQVIGHERIDYNERQIVQDWISGVNDD

SEQ ID NO: 16576 - protein, 144 aa, Salmonella enterica
ATFMPKPMFGDNGSGMHCHMSLAKNGTNLFSGDKYAGLSEQALYYIGGVIKHAKAINALANPTTNSYKRLVPGYEAPVMLAYSARNRSASIRIPVVASPKARRIEVRFPDPAANPYLCFAALLMAGLDGIKNKIHPGEAMDKNL

SEQ ID NO: 16577 - protein, 491 aa, Ralstonia solanacearum GMI1000
MGTVSVEPGSYRAEPPRNPGEVIDLIRQRAVQVVDLRFTDLPGLWQHFSITLPEVNDELFEAGIGFDGSSIRGFQEIHESDMLVRPDPATAFIDPFCETTTLALICDVIDPVLHQPYSRDPRHIAKKAERHLQHSGIATTCYFGPELEFFIFDSIRFGQDQHSGYYHVESAEGEWTSGRDEGAYGGGNLGYKQRYKEGYFPVPPHDTLQDIRSEIVLALMQAGIRVEVHHHEVATAGQNEIDMRFAPLTRMADNVMMYKFICKNVARRHGKVATFMPKPLFADNASGMHCHQSLWKDGENLFYDAGGWALTSQLCRWYIGGLLKHAPALMAFCAPSTNSYKRLVPGYEAPVNLAMSQRNRSAAARIPMYSDAPAARRVEFRCPDPSANAYLAFAAMLMAGLDGIAHQTDPGEPLDRNIYELPPEEAEKIRQVPGSLEESLEALEADSYFLRKGDVFTDDVIRTWIDYKRTREIDTLKLRPHPWEFYLYFDI

SEQ ID NO: 16578 - protein, 492 aa, Wolbachia endosymbiont of Drosophila simulans
MQGKDTKVIENKEGARTTPSIVALTSSGERLIGAPAKRQATTNASNTFFATKRLIGRQYSDPEMKNLSVPYKVFAAKSGDAWVKTTDNKEYSPSQIGAFILQNMKEAAEAYLGEEVKDAVITVPAYFNDSQRQATKDAGKIAGLNVLRIVNEPTAAALAYGLDKKHGHTIVVYDLGGGTFDVSILEIGDGVFEVKATNGDTHLGGEDFDNGVVSYLLDEFKKSNGIDLKNDPMAMQRIKEAAEKAKIELSSAMETEINLPFITADASGPKHLNMKLTRAKLESLVNDLIERTMAPCKKALEDAGLSASQIGEVVLVGGMTRMPKVIEKVKEFFGKDPHRGVNPDEVVAIGAAIQAGIIQGDVRDVLLLDVTPLSLGIETLGGVFTPLIERNTTIPTKKSQVFSTAEDNQTAVTIKVHQGERKLAVDNKLLGQFSLEGIPPAPRGRPQIEVTFDIDANGIAHVSAKDKATGKEQKIRIQSSGGLSDDEINRMV

SEQ ID NO: 16579 - protein, 374 aa, Siphonodon celastrineus; identical to SEQ ID NO: 9626

SEQ ID NO: 16580 - protein, 262 aa, Oryza sativa
  misc_feature (83)..(83): Xaa can be any naturally occurring amino acid
MESRPGGTNLVEPRGQGALPSGIPIQQPWWTTSAGVGAVSPAVVAPGSGAGISLSGRDGGGDDAAEESSDDSRRSGETKGTRXDGSTDQEKHHATSQMTALASDYLTPFSQLELNQPIASAAYQYPDSYYMGMVGPYGPQAMSAQTHFQLPGLTHSRMPLPLEISEEPVYVNAKQYHGILRRRQSRAKAELEKKVVKSRKPYLHESRHQHVMRRARGPGGRFLNTKKNEDGAPSEKAEPNKGEQNSGYRRIPRDFQLLQKET

SEQ ID NO: 16581 - protein, 665 aa, Vibrio cholerae O1 biovar eltor str. N16961
MKCRSKISLIAASLWLAAFSAQALEAKLKPEDLPLLVPEAQHATAAKRVTSRFTRSHYKQFNLDDQFSQAMFERYLEMLDYSRNIFTQADIDSFKAWSLQLDDQLKAGDNQIAYDLYNLSMEKRFERFQYALSLLDQEMTFDADESIELDRTKSPWPKDLKEINELWRQRVKYDALSLKLAGKEWPEIKETLDKRYNNAIKRLTQTKSEDVFQTYMNAFAREVDPHTSYLSPRNAEQFQSEMNLSLEGIGAVLQMTDDYTIIRSLVAGGPAALSKQLGEGDRIIGVGQEGEDVVDVVGWRLDDVVQLIKGPKGSKVKLLVLPEGKDAKSHVVTIVRDKIRLEDRAVKSEVIEKAGKKIGVLEVPSFYVGLAQDTEKLLAELKAKKVDGIIVDLRNNGGGALTEATALSGLFITSGPVVQVRDSYGRVNVNSDTDGSISYSGPMTVLINRYSASASEIFAAAMQDYGRAIILGENSFGKGTVQQHRSLNHIYDLFDKELGYVQYTIQKFYRIDGGSTQNKGVVPDIAYPTAIAPSETGESVEDNALPWDSIDKAKYERLNNFNTIIASLEAKHQQRVANDLEFGFIEQDIAKYRAEKDDNLLSLNEKVRKEESAKADEERLARINQRQKALGKSTYASLQDIPKDYEAPDAYLDESVNIMLDMISR

SEQ ID NO: 16582 - protein, 127 aa, Salmonella enterica
GSGMHCHMSLAKNGTNLFSGDKYAGLSEQALYYIGGVIKHAKAINALANPTTNSYKRLVPGYEAPVMLAYSARNRSASIRIPVVASPKARRIEVRFPDPAANPYLCFAALLMAGLDGIKNKIHPGEA

SEQ ID NO: 16583 - protein, 374 aa, Siphonodon celastrineus; identical to SEQ ID NO: 9631

SEQ ID NO: 16584 - protein, 521 aa, Zea mays
  misc_feature (135)..(135): Xaa can be any naturally occurring amino acid
  misc_feature (180)..(180): Xaa can be any naturally occurring amino acid
MARTAAPAAGYGEDGVYHSATGQSLTFAAFRSAVLTTAVALSSRAGVRRGDVVLFFAPNCFLYPVCFFAVTALGAVATTANPLYTPREVAKQATDSRAKLAITVSELLPKIVDLGFPTILLDGGGDGDAASAAAXSKPQGASVTLYSDLVSGARETEYRRPPTKQSDTTALMYSSGTTGXKKGVILTHRNFISAAAMMTADQDALGEGPNVFLCFLPMFHIFGLSVITFAQMQRGNSVVVMSRFDMDSVMAAVQRHRVTHLFCVPPVMIALAKLGSVGKYDLSSLRFIGSGAAPLGKDVMEGVAKNFPEAVIAQGYGMTETCGIISLEYPEKGQIRQFGSTGALVSGVEAKIVDVETLICLPPNQLGEICVRGPNIMQGYFNNVQATEFTIKQGWLHTGDIGYFDEGGQLFVVDRLKELIKYKGFQIAPAELEGLLLSHPEILDAVVIPFPDAEAGEVPIAYVVRSSESSLTEVDVQKFIEKQVAYYKKLRRVTFVDSVPKSASGKILRRELISKVRSSKL

SEQ ID NO: 16585 - protein, 1045 aa, Cryptococcus neoformans var. neoformans B-3501A
MTIGTIKPRRSLGAIIDSIPSQQEYVPDSCSENSGSDSERDAPIPTLKPIPLTPLPPRSARLISELGADPIKIGKKNEREEARAVPGDGKIDTKVHGAVDTLLAPVLYFAVQWRKPQFKKHKTWDGDANIKVEGNRIVMLDEDGNQMAATNVGDKVIKPEAEFKIGGYEIMVDHVLQQDQFKASTSILNRPKVIPTIKSTGYRPASFTKPFRPPIQKANLTPAKPSTMEIVNNEHHQSPISSSSKRSIPTPAAAQRAVAASSFYTRQSPKPFNERIVLGEKSNKERLQWGGALFNPHAEGAVVMPRPGEKLAKLKGTTIVDVVLDPVLGNLLRDHQKEGVKFMYSCVMGMTGAEGEGCILADEMGLGKTLQTIALIYTMLKQSPFANQTSIIGKAIIVCPVTLVDNWRKEFKKWVDRRVNVLVADGTDYRVSSFLRKVVKELASCIPPIDLIVCDEGHRLKSKDNKTIKMFDMLKTQRRIRTPVQNDLGEYWAMVNFACPGVLGKYSAFAKHYEKPILKSRTPNCSAKDVELGRERANDLAKLSKEFVLRRTAAVLENYLPPKYEYVIFIAPSLLQLSVLSNLLDPNIVGSFIRGYGAQSLALIDLMRKISNSPMLLKRRDDELARANDDLGSATSAAISAIPSDANINDVTTSGKMLMLDKMLHSIYQCTEEKVVVVSNWTSTLDLIQGLCKLKRYNYLRLDGSTPPKQRQELVDRFNKDKGRQESFVFLLSAKAGGVGLNLIGGSRLILFDSDWNPSTDLQAMARIHRDGQKRPVYIYRFLTTNAIDEKIYQRQITKTGLSDQMMDQTRTEKQTSKDSFSAAELRDIFTLNVRTDGCQTHDLLGCQCTRKPVGETRDIAEGEHNSKVLPDNASEESDSDENDHPTFVSANKYDPEPTPKMRRKAIQEQKNKLAALKHWAHFDPFEPASFRGIQDSLLYNVLFDSWETDSAPLSQNIKTYGSLAFESPHERHEDDLDSDEEVLVPKKRKSGIVRSGVMLKKARAADEENTGFSQRRHNLRSIAESGGTGRVTFVFEKISKSTIA

SEQ ID NO: 16586 - protein, 126 aa, Salmonella enterica
GSGMHCHMSLAKNGTNLFSGDKYAGLSEQALYYIGGVIKHAKAINALANPTTNSYKRLVPGYEAPVMLAYSARNRSASIRIPVVASPKARRIEVRFPDPAANPYLCFAALLMAGLDGIKNKIHPGE

SEQ ID NO: 16587 - protein, 668 aa, Arabidopsis thaliana
MARSFGANSTVVLAIIFFGCLFAFSTAKEEATKLGSVIGIDLGTTYSCVGVYKNGHVEIIANDQGNRITPSWVGFTDSERLIGEAAKNQAAVNPERTVFDVKRLIGRKFEDKEVQKDRKLVPYQIVNKDGKPYIQVKIKDGETKVFSPEEISAMILTKMKETAEAYLGKKIKDAVVTVPAYFNDAQRQATKDAGVIAGLNVARIINEPTAAAIAYGLDKKGGEKNILVFDLGGGTFDVSVLTIDNGVFEVLSTNGDTHLGGEDFDHRIMEYFIKLIKKKHQKDISKDNKALGKLRRECERAKRALSSQHQVRVEIESLFDGVDLSEPLTRARFEELNNDLFRKTMGPVKKAMDDAGLQKSQIDEIVLVGGSTRIPKVQQLLKDFFEGKEPNKGVNPDEAVAYGAAVQGGILSGEGGDETKDILLLDVAPLTLGIETVGGVMTKLIPRNTVIPTKKSQVFTTYQDQQTTVSIQVFEGERSLTKDCRLLGKFDLTGVPPAPRGTPQIEVTFEVDANGILNVKAEDKASGKSEKITITNEKGRLSQEEIDRMVKEAEEFAEEDKKVKEKIDARNALETYVYNMKNQVSDKDKLADKLEGDEKEKIEAATKEALEWLDENQNSEKEEYDEKLKEVEAVCNPIITAVYQRSGGAPGAGGESSTEEEDESHDEL

SEQ ID NO: 16588 - protein, 1126 aa, Marchantia paleacea var. diptera; identical to SEQ ID NO: 9638

SEQ ID NO: 16589 - protein, 151 aa, uncultured Frankia sp.
SRDPRNTAKKAESYLRGTGFADTAYFGPEAEFYIFDDVRYDYNPYGSLHAVDSIEAAWNTARKEEGGNLGYKPRFKGGYFPVPPTDHFTDLRSEMSRALIRAGITVEMQHHEVGTAGQAEIDIRYDTLLRTADNLMLYKYIIRNVALSRGK

SEQ ID NO: 16590 - protein, 158 aa, Bacillus sp. SG-1
MASIYDFSAMKPNGEEVSLSQFKGKAMVIVNTASKCGFTPQFEELQSLYEEYKDKGVLVLGFPSDQFMKQEFDNDEEIMEFCQINYGVSFPMFSKVDVKGSGAHPLFKYLIKEKKGLMTSEVKWNFTKFLVDKDGDVVKRYAPQTSPAKIKEDLEEIL

SEQ ID NO: 16591 - protein, 483 aa, Chlamydophila caviae GPIC
MNLKELLNNIEAKIYGKVSPIEVRNLTKDSRNVGFGDIFIANKGKQFDGNDFSPLAIENGAIAIASSIYNPFLSVVQIVSSNLPQLEAELSAKYYNYPSKKLCIVGVTGTNGKTTVSHLIKTLFDGCNKPSGLIGTIEHVLGNNRIQDGYTTPESCLLQKYLAEMVKNRLTSAVMEVSSVGLVLERLAEVDFDVGVLTNITLDHLDFHGSFEEYINAKLKLFSKLPATGLAVVNGDLSYASRFLEMTQAQPITYGIECPADYRAMHLRSSPFGTDFDLVYRGESLPCRLPLIGKHNVYNILAAIAVAHQHCNGDLQQLISLAANVESPRGRLEPVFSGPCPIYIDYAHTPDALENVCKTLHALLPEQGKLIVVFGCGGDRDQSKRQIMAEVVERYGFAVVTSDNPRGEDPEEIIKAICSGFVKRNFSIEIDRKQAITYALSIASDRDIVLVAGKGHETYQIFKHQTIAFDDKEIVREVLSSHV

SEQ ID NO: 16592 - protein, 165 aa, Glycine max; identical to SEQ ID NO: 338

SEQ ID NO: 16593 - protein, 334 aa, Glycine max
MGEIALPNGISNGNINGVNGQSHSLNGYRKSCWYEEEIEEDLRWCFALNSILHTGASQYQDIALLDTKPFGKALVIDGKLQSAETDEFIYHECLVHPALLHNPSPKNVFIMGGGEGSTARELLRHKTIDKVVMCDIDEEVVNFCKSYFVVNKEAFRDTRLEVVINDARVELEARDESYDVIIGDLADPIDGGPCYKLYTKSFYELIVKPRLKQGGIFVTQAGPAGIFSHTEVFSCIYNTLRQVFKYVVPYSAHIPSYADIWGWVMASDSPLDLSAEELDLRMRHRIKGENGYLDGKTFTSASTLSKTVRNSLDNETHVYTEESARFIYGHGKHA

SEQ ID NO: 16594 - protein, 190 aa, Saccharophagus degradans 2-40
MKRKTNTIKQLLAPSFLLACTFTASTHAAEESAQCPSYLDHSFKKLHSTQTVNLCELYTGKPLLIVNTASHCGYTKQFGGLEKLYQSYKDQGLQVIGFASDDFKQAAKSEMEAATICYKNYGVTFTMLAPTTVTGEKANAVFSHLNANTSAPSWNFNKYLITKNGQNIEKFNSDVTPLASDLEKKVQKAL

SEQ ID NO: 16595 - protein, 381 aa, Photobacterium profundum SS9
MKAVHFGAGNIGRGFIGKLLSDANVAVTFADIDKPLVDQLSHDQSYKVKVVGSQCQVDTVTHVTAVNSASQDVIDRIVHTDLVTTAVGPNVLDIIAKTIATGLAQRFEANNEKSLNIIACENMVRGTTHLKNEVYKHLDEQYHARADALVGFVDSAVDRIVPPSEAANDPLEVTVESFSEWIVDKQQFKGDIPVIEGMEMTDNLMAFVERKLFTLNTGHIMTAYLGALKGHETVRDAIEDNEIREQVKAAMQESGEVLIKRYGFDREVHNAYIEKILGRFANPYLRDEIDRVGRQPIRKLGENDRLIKPLLGTIEYGTENKTLLKGIAAAFMYTNESDPQAVELQTSLKEQGLRPTLAHYTGIDADSKEAKTIETIFLQLS

SEQ ID NO: 16596 - protein, 167 aa, Zea mays
MERSLDSYSSIKDVTYSCGYCGYALNLSSSARDTEGIGPKYRKQIRKGVVAFVAVDESRFTLAHELTCTPYFRSARSWGLFRRRSRLLCRKCGGHIGSAYGYGEEEEDARDSSSSSLFGGDGSSDDTRPSSGSGRSSVASSQKSYVVRISALQPSSDDSAVVPFTHR

SEQ ID NO: 16597 - protein, 118 aa, Zea mays
  misc_feature (29)..(29): Xaa can be any naturally occurring amino acid
  misc_feature (89)..(89): Xaa can be any naturally occurring amino acid
VKEDLLEDAPATPGGRGGDHKSGTPWGGXGGSGDISWIKNSFLPFANLSQFLKKAFPAYGKIAKDAKETVRDCVSKFISFITCEASDKXQREKRRTIIWPLPACGAMVHAWRILRDYF

SEQ ID NO: 16598 - protein, 637 aa, Prorocentrum minimum
MSKKTAVGIDLGTTYSCVGVWKNDGVEIIANDQGNRTTPSYVAFTDTERLIGDAAKNQVARNPENTVFDAKRLIGRKFADPIVQADIKLWPFKVEAGTGDKPMIVVTSQGEEKKFHPEEISSMILLKMKETAEAYLGAKCNDAVVTVPAYFNDSQRQATKDAGTISGMNVLRIINEPTAAAIAYGLDKKGSGEKNILIYDMGGGTFDVSLLTIEDGIFEVKATAGDTRLGGEDFDNRIVDFCMQDFKRKNRGKDLAGNQRAIRRLRTQCERAKRTLSSSTQATIEIDSLMDGIDFSCSLSRARFEELNMDYFRNSMGPVEKCLRDSGIDKRNVHEVVLVGGSTRIPKVQAMIQEFFNGKEPNKSINPDEAVAFGAAVQAAILTGEGSSQVQDLLLLDVTPLSMGLETAGGVMTKLIERNTTIPTKKGQTFTTYADNQPGVLIQVFEGERAMTKDNNLLGKFHLDGIPPAPRGVPQIEVTFDIDANGILNVSAQDKSTGKSNQITITNEKGRLSQAEIDRMVQEAEKYRAEDESNKAKIEAKNGLENYCFTMRNTLQEEKLKDKFEGGDKEKIEKAVQDALDWLDKNQLAEKDEFEAKQKELEGIVNPIMMKVYQAAGGGGMPEGGMPGAGPTVEEVD

SEQ ID NO: 16599 - protein, 327 aa, Oryza sativa Japonica Group
MARGGETVLGRVGAMGRGARWGGDECARASIGSAAVPICATARASVDWRLLGIGGDLAEEDHDPLSLLALLGSWLSLLVLLGSWAVQGILMYEFTCSAKISEGDAADRASNLTDATVDSLIESIIIKDGVKAKFFFNIMSLANSAGEKLLAFSQYILPMKFLERLLVKRLGWHVGKEIFMISGDTSADDREVAMDQFNNSADAKVLFGSIKACGEGISLVGASRVIILDVHLNPSVTRQAIGRAFRPGQQKKVFVYRLVAADSPEVKFHETAFKKEVIPKLWFEWSELCTTEDFKLNQVDIDDSEDELLEANAIRQDIKALYRRMLQ

SEQ ID NO: 16600 - protein, 366 aa, Bacillus subtilis subsp. subtilis str. 168
MIALHFGAGNIGRGFIGALLHHSGYDVVFADVNETMVSLLNEKKEYTVELAEEGRSSEIIGPVSAINSGSQTEELYRLMNEAALITTAVGPNVLKLIAPSIAEGLRRRNTANTLNIIACENMIGGSSFLKKEIYSHLTEAEQKSVSETLGFPNSAVDRIVPIQHHEDPLKVSVEPFFEWVIDESGFKGKTPVINGALFVDDLTPYIERKLFTVNTGHAVTAYVGYQRGLKTVKEAIDHPEIRRVVHSALLETGDYLVKSYGFKQTEHEQYIKNQRSLLKSFHFGRCDPRSEVTSQKTGRKCRLVGPAKKIKEPNALAEGIAAALRFDFTGDPEAVELQALIEEKDTAAYFKRCAAFSPMNRCTPSF

SEQ ID NO: 16601 - protein, 159 aa, Streptococcus pyogenes M49 591
MPNLYDFTVKAQNGNDLSLAAYKKKVVLIVNTATKCGLTPQYQALQALYDTYHDKGFEVLDFPCNQFLNQAPGDAEEINHFCSLTYHTTFPRFAKIKVNGKDADPLFTWLKEEKSGPLGKRIEWNFTKFLIGQNGQVIKRYSSKTDPKLIEEDLKALLG

SEQ ID NO: 16602 - protein, 264 aa, Zea mays
LLGHLTPKQKDIIYKLEAHDRFKRNAVGSALYIHPCLSELSEVNAEHRANTFRDDLVDSLVDSITVRDGVKANFFMNILSLANSAGEKVLAFSQYISPMIFFERLLVKKKGWHVGKEIFMISGDTSQEDRELATDHFNNSADAKIMFGSIKACGEGISLVGASRVVILDVHLNPSVTRQAIGRAFRPGQQKKVFVYRLVAADSDEVKVHETAFKKEVIPKLWFEWSEHCTTEDFKLGQIDIDDSGDELLDTKAIRKDIKALYRR

SEQ ID NO: 16603 - protein, 128 aa, Salmonella enterica
HMSLAKNGTNLFSGDKYAGLSEQALYYIGGVIKHAKAINALANPTTNSYKRLVPGYEAPVMLAYSARNRSASIRIPVVASPKARRIEVRFPDPAANPYLCFAALLMAGLDGIKNKIHPGEAMDKNLYD

SEQ ID NO: 16604 - protein, 485 aa, Clostridium tetani E88
MKLKEVLKKLEYNILNGNIEIDIENIQYDSRNIKKNDIFFAIQGYSTDGHKFIESAIEKGAKVIVFDKGFENENMYKDITFIKVKNSRKALAVAASNYYGNPKDKLKLIGVTGTNGKTTSTFMIKSILEEAGFKVGLMGTILNYIGDRKIYAQRTTPESLEIHKLFKDMVDSGVDYCVMEVSSHSLYLDRVYGIEFNEGIFTNLTQDHLDFHKTFENYYNSKLMLFKNSINSVINIDDNYGERILKEIEEKTFTYSIKKYSDLKAESVRLHSRGGEFTVDFKGNKEKINIHIPGEYNVSNALGSILACVNEGISLKVIKRGLEKLSGVPGRCEIVTMGYNLGYDVIVDYAHTPDGLDNVLRTARDFTKGKLISVYGCGGDRDRAKRPIMGRIGTELSDLAILTSDNPRTEEPFSIIDDIVKGVTKDNYIIVQSRREAIKKAMTIAKKDDVIVVAGKGHEDYQILKDKTIHFDEREVIKEIIEELY

SEQ ID NO: 16605 - protein, 477 aa, Corynebacterium efficiens YS-314
MAFNTPEEVTKFIKDENVEFVDVRFTDLPGIEQHFSIPASALDEDAIEEGLAFDGSSIRGFTTIDESDMNLLPDLATAKIDPFRKAKTLNIKFFVHDPFTREAFSRDPRNVARKAEQFLASTGIADTCNFGAEAEFYLFDSVRYSTDINSGFYHVDTNEGWWNRGRETNLDGTPNTGSKNRLKGGYFPVAPYDQTVDVRDEMVRNLRDAGFHLERFHHEVGGGQQEINYRFNTLLHAADDIQTFKYIVKNTAALHGKAATFMPKPLAGDNGSGMHAHQSLWKDGKPLFHDESGYAGLSDIARYYIGGILHHAGAVLAFTNPTLNSYHRLVPGFEAPINLVYSQRNRSAAVRIPITGSNPKAKRIEFRAPDPSGNPYLGFAAMMMAGLDGVKNRIEPHAPVDKDLYELPPEEAASIPQAPTSLEASLKALQEDSDFLTESDVFTEDLIEAYIQYKYDNEITPVRLRPTPQEFELYFDC

SEQ ID NO: 16606 - protein, 117 aa, Salmonella enterica
SLAKNGTNLFSGDKYAGLSEQALYYIGGVIKHAKAINALANPTTNSYKRLVPGYEAPVMLAYSARNRSASIRIPVVASPKARRIEVRFPDPAANPYLCFAALLMAGLDGIKNKIHPG

SEQ ID NO: 16607 - protein, 325 aa, Ensifer adhaerens
IGGWKAINESDMVLMPDPETAHMDPFFAQSTMVIICDILDPVSGEAYNRDPRGTAKKAEAYLKASGIGDTVFVGPEAEFFVFDDVKYKADPYNTGFKLDSSELPSNDDTDYETGNLGHRPRVKGGYFPVPPVDSCQDMRSEMLTVLAEMGVTVEKHHHEVAAAQHELGVKFDALVRNADKMQIYKYVVHQVANAYGKTATFMPKPIFGDNGSGMHVHLSIWKDGKPTFAGDEYAGLSETCLYFIGGIIKHAKSLNAFTNPSTNSYKRLVPGYEAPVLLAYSARNRSASCRIPFGTNPKAKRVEVRFPDPTANPYLAFAAMLMAGL

SEQ ID NO: 16608 - protein, 425 aa, Vibrio fischeri ES114
MSVYNTLCFLAAAAMLIAFFNSKIGKMQTTIAITAGSMMLSLGIIIAGQNNWFNLREVATETLTDINFEDFLLKGILGFLLFAGGLGIKLQNLKDQKWEITVLALGATLFSTFFIGFILWAICNVIGVNLDLIYCLLFGALISPTDPIAVLAIVKKMNAPQRISTQIEGESLFNDGFGLVIFVTLFTIAFGHETPTVGSVTALFFQEAIGGIAYGFILGLVFHYLISSTNDHSMELLLTIGIPTAGYALAEVLHVSGPLAMVVSGIMIGNWTRFIGFSKESEDHLDHFWELVDEFLNGVLFLLIGMSMLLFQFHQEDWILMAISIPLVLTSRYLSVFISYIGFNRFRTYNPLSVRILTWGGLRGGLALAMALAIPAGIMVIPEKNIDVREIILVMTYSVVVFSILVQGSTITPMIDKAKKLEKEM

SEQ ID NO: 16609 - protein, 323 aa, Oryza sativa Japonica Group
MESRPGGTNLVEPRGQGALPSGIPIQQPWWTTSAGVGAVSPAVVAPGSGAGISLSGRDGGGDDAAEESSDDSRRSGETKDGSTDQEKHHATSQMTALASDYLTPFSQLELNQPIASAAYQYPDSYYMGMVGPYGPQAMSAQTHFQLPGLTHSRMPLPLEISEEPVYVNAKQYHGILRRRQSRAKAELEKKVVKSRKPYLHESRHQHAMRRARGTGGRFLNTKKNEDGAPSEKAEPNKGYGLNRYGFDFKPEMMVNRCIIEKVALVYECDLCVEKYSDNLRCASKHLKDISGMDCEGWSLLKIATALKLVWYPDKRIVTEAVFR

SEQ ID NO: 16610 - protein, 340 aa, Oryza sativa Japonica Group
MLACFLPLVLIVLCFPKSSAPARINTGMSLFTVALLVVPVMDAVYVRGVPGLYGAFDVTVAATVLCGVADALVQGGVIGFAGELPARYMQAVVAGTATSGVLVSVLRVITKGVYPQDANGLRKSAILYFVVSIVVMIICIVCYNVADKLPVVIYYKNIKKRAQKAEEDGGMSGSAWRSTLWSIVGRVKWHGIGIALIYAITLSIFPGYITEDVHSEALKDWYPIMLITAYNVFDLVGKSLPAFYFLENANIAVAGSFARLLFYPLFYGCLHGPSFFRTEIPVTILTCLLGFTNGYLTCILMTLAPKAVPIQHSETAGIVIVLFLVAGLVVGSFVAWFWVI

SEQ ID NO: 16611 - protein, 411 aa, Glycine max
MESDLEQQPQVNSSGLTRYRSAPSSYFSNIIDREFYEHVFNRPSSPETERVFSRFVNSLNSEEEDSLHHKLSTDSSSSAAVKEEVNQQDQGINEEHVAVAALQQSNNNINNYNNNNNNNYSASHNFYQSSSSKPPLPNQNPNLPSAMEQGSFSMGLRHSGNNSNLTRHSSSPAGLFSQINIENVYAGVRGMGSLGAVNNSIEDAKFSSSRRLKNQPNYSSSGRMSSIAEIGDKGYRESSPDSEAFADGNDFMAGFQVGHWDDTAMMSDNVGGLKRFSEEDSKPFSGLNAVETQNETGQTHAPLAHQLSLPNTSAEMAAIEKFLQFSDSVPCKIRAKRGCATHPRSIAERVRRTKISERMRKLQDLVPNMDKQTNTADMLDLAVDYIKDLQKQVQTLSDCHAKCTCSHEKQQ

SEQ ID NO: 16612 - protein, 1342 aa, Oryza sativa Indica Group
MAMARSILLLLLLAAAASASADAPFLVAHKKVSLSRPKPGVERLAVSLDLYNQGSATAYDVSINDDTWPKEAFELVSGEMSKTLERLDPGVTASHAFVLETKVQGRFQGSPAVITYRVPTKAALQEAYSTPILALDVLAERPPEKKFEWAKVTSSMEDDDDDQRLLHSLGVTSADIHDIERRIISQATTDPADSSGPTINGGHQPDDALAKLHHKLRSVQIEIDAVASTIKGAKLKQPSGNKPHEHKGKDQPDHHGAGHLQQALAADRLTSLRKAKAQIQKEILQSHPSPSASNRKDKMLAMLVQDEPRHKKPPVGPKNIVKRPMKTVTYDDDNNFDAVLDGASAGFMETEREELIRKGLLTPFHKLKGFEKRVELPEPSHRQDDSAGQTEEAMEASRIARVAQSLKQIAQNRPATKLLDSESLPKLDAPAAPFQRLGKPLKRPVSPSSDEQEKKRPRNKTKRPLPGKKWRKANSIKESSLDDNDVGEAAVSVSDDDEDQVTEGSDELTDVTLEGGLRIPGTLYTQLFDYQKVGVQWLWELHCQRAGGIIGDEMGLGKTVQVLSFLGSLHNSGLYKPSIVVCPVTLLQQWRREASRWYPKFKVEILHDSANSSSKKSKRSSDSDSEASWDSDQEEAVTCSKPAKKWDDLISRVVSSGSGLLLTTYEQLRILGEKLLDIEWGYAVLDEGHRIRNPNAEITLVCKQLQTVHRIIMTGAPIQNKLSELWSLFDFVFPGKLGVLPVFEAEFSVPITVGGYANATPLQVSTAYRCAVVLRDLVMPYLLRRMKADVNAQLPKKTEHVLFCSLTTEQRATYRAFLASSEVEQIFDGNRNSLYGIDVLRKICNHPDLLEREHAAQNPDYGNPERSGKMKVVEQVLKVWKEQGHRVLLFTQTQQMLDIMENFLTACEYQYRRMDGLTPAKQRMALIDEFNNTDEIFIFILTTKVGGLGTNLTGANRIIIYDPDWNPSTDMQARERAWRIGQTRDVTVYRLITRGTIEEKVYHRQIYKHFLTNKVLKDPQQRRFFKARDMKDLFTLQDDDNNGSTETSNIFSQLSEDVNIGVPSDKQQDQLYAASATPTTSGTEPSSSRHGQGKEDHCPDQADEECNILKSLFDAQGIHSAINHDAIMNANDDQKLRLEAEATQVAQRAAEALRQSRMLRSHESFSVPTWTGRAGAAGAPSSVRRKFGSTLNTQLVNSSQPSETSNGRGQSLQVGALNGKALSSAELLARIRGTREGAASDALEHQLNLGSASNHTSSSSGNGRASSSSTRSMIVQPEVLIRQLCTFIQQHGGSASSTSITEHFKNRILSKDMLLFKNLLKEIATLQRGANGATWVLKPDYQ

SEQ ID NO: 16613 - protein, 1352 aa, Candida glabrata CBS 138
MELRRRLSRVQTLTQFNFSYNKSFGHKFRDFIAKSGHHVKPIQKYIFPNFIAVHYFYIIFMTILASILLYPVKNFSYIDILFLAAGATTQGGLNTVNINELTLYQQMIIYIICCLCTPIAIHGTLAFVRLYWFERYFDNIRDTSKRNYKMRRTKTILEREKTARTLSRLRTNTTIPIHKSNQENSQRSNFQEKLFSGEFVNRDEQNSIESQQDAMDSQSTQNSLPTFKGLGPSKIQKTASPRSLNSTLPSGSVLEDGESRTPYEQPIDYTIPNSNPNLTVPVERFKRRRSRDISPQDMYRSIMMLQDKHSNIDDNEEGPALVIGSPQDRQNIKPTVQSQSMGHNALTPVHSISDKEVSPKHVDANEINMGMKVKDKHGNQGPSRRSGSQSPSSENAFPNENDEEENFSPYTNSRKIKLNKHPTGRNYDNSSDDLNSAGNYNSEEGLEGENATQSTEEVSPLDSDDAYSDGDSHEYENTEVNEDSDSIQDIQSGNNRLYRRRTDQERNLNYESEASITQDNIERHNNDSINSENAASDDSESNGENTNDRNARTPNKGGEPKIQFNITEPPRKRRTQNFHIMEATRPNIPHNAHKRTSSNLFLKQLSKGKRIRHNLKRRLSSGPFEKNESPFNPSIKNVNKQKGSQKETNQDNGEDYFADNESDDDDNNPASSDYNGLSKTVSYNNTEDRKPDPVRLTMERAMTMDNITPEDLNKLAQKPDFQKMVYKNWKRKHRKNKKNRKLGWNKKFDFEDTLPTVFDSHNEGHQRTMSNDEDNEDIRNGNIDRYNTIDYNDGYQIDPDMNEEGYFGVSFNNDYNFSRHPFSRTMSANYLSWEPTVGRNSLFVDLSRAQKEELGGVEYRSIKLLCKILVIYYLGFHIMSFTMLLPWITHKTKYKHIVRDDGVSPGWWGFFTAMSAFNDLGLTLTPDSMSSFNRAAYPLIVMIWFIIIGNTGFPVLLRFIIWVMYHLSSDLSQLRESLAFLLDHPRRCFTLLFPSTATWWLFGILVGLNITDWILFIILDFNNVVVKPNPKGYRVLMGLFQAVSTRTAGFSVVDLSQLNSAVQVSYMIMMYVSVLPLAISIRRTNVYEEQSLGLYGNVEDDDSSDSDYEDHLSSEEELLAKNGDNDDDEETLDSQYYSKSIRGRNDSDESSSNEGGSNSSAKKRKRTAKKESSKGKKKKRRVSEKKSKSFIGAHLRRQLSFDLWFLFLGLFVICICENGKIKDVARPAFNVFPILFEIVSAYGTVGLSLGYPNTSQSLSGQFTTLSKLVIIAMLIRGRNRGLPYTLDRAIILPSDRLERIDHIEDLKLKRTAGLHARHQPRPEDERKKSIAKKSFKYIKKGGKGLLYPSKLL

SEQ ID NO: 16614 - protein, 236 aa, Glycine max
EFLKGLSLLTSLRHENIVKMRGFCCSRSRGEWFFVCDFATRGNLSQYLDKEDGSAHVIEWSKRVSIIKGIAKGIGYLHNNEASKPTIVHQNISVEKVILDHEFNPLITDAGLPKLLADDVVFSALKASAAMGYLAPEYLTTGRFTEKSDIYAFGVIVLQVLSGKVLMGGTIRVAVEAFRFEDFVDTNLKGDYSKSEAAILSKLAIQCTLEVPEQRPTMVEVIQELTMLPNPSSHSS

SEQ ID NO: 16615 - protein, 516 aa, Coprinopsis cinerea okayama7#130
MEFTSPIPLPPIPDDVTLQKFLMELDHVAKPHRGFDIPLMIDPDTGRRVTWHEVQDRSLHLANGLFLKYGLRRDDVVLIVSRNHVDFPIITFAVHKLGGIVSGANPDFSADELSYITQESKSTLLIVHPDCLDRAIQAASKNSIPLRNVVLLEAARSSSIKGSFETIDGLISYSKSTRLISFTEIKFAPGEAKTKIACLSFSSGTTGRPKAVALSHFGLVANVVQFSVHHKMNRKDLPPDSEERRYRVGDVVLGIVVPKFGFTDMLKIIQTYRVSHLYIVPPIALLLCKDPAVKRYDLSSIRFMLSGAAPLSHELQKQLQDTFPRAHIGQAFGEFLSIPINAKSTSAPVVLVQKKLPQVHSYMYFHPGMTETTTAVTMFSIENRSGVPGGSGILMPGVTARVVKPDGTLAGYDEVGEIWIKSPSIALRYTNDKEATEETFVDGWVRTGDQVTIDRHGEVKGFQVAPAELEGCLLDHPAVSSACVVGVPDSFCAYDPHSSHHSLINTPPPPPRHVSI

SEQ ID NO: 16616 - protein, 185 aa, Cucumis sativus
HRFSSLTRFVSPINSRSSLIASFFTRFDHTMATPSKTSVHDFTVKDAKGKDVDLSAYKGKVLLIVNVASQCGLTNSNYTELSQLYEKYKGHGFEILAFPCNQFGSQEPGSNEEIVQFACTRFKAEYPIFDKVDVNGNNAAPLYKFLKSSKGGLFGDAIKWNFSKFLVDKDGNVVDRYAPNNFPNS

SEQ ID NO: 16617 - protein, 540 aa, Cyanothece sp. ATCC 51142
MGIFYLLTNNIAISPIEESLATTGGFTGLVSTLIILLLVATAVALITRWLKIPYVIGLVLAGLVITKQALPGSVGLNPDVILNLFLPILIFEAAINTDISRLRSTIKPILLLAGPGVILSAAITATLLKFGLDLVWITACAVGVILTITDTVSVIAAFRTVTVPGRLATIVEGESLFNDGIALVLLTLITTIHTEGSFSVAEGLEQVFIAFVGGTILGVGLGYLCVGLFQQLDDALSDILLTVAVSLGTFQIGQFLGVSSAIAVMVAGLVIGNLGFRQTSATAKVTLLNFWEYAGFGVNTFIFLLVGIETDPIVLLTTIPDTLLTIVVYQIGRVCAIYPLLFFLGFVDRRLPLRWQHVLILGNVKGSLSMALALSLPYTLPGRTEVITLVFSTVFVSLVGQGLSLPWFVKRLQLSRLSPTKQEMETLQLNLIASKAAQQELGSLLKSGSLPKSLYEELFATYQAKVAVSEQKLRNLYHSPLIDESDNIGENGYLDGLRRRLYLAEKGAVNDAVRKGLLSDELAQCYIKSLNEKLLSLKDD

SEQ ID NO: 16618 - protein, 194 aa, Magnetospirillum magnetotacticum MS-1
MSRLLPTNPLGSFVASVVAAIGLAGGVAWGATGDHLDWSSLPLPAIAGGQVPADAFKGKVVLVVNTASQCGFTPQYQGLEALWREYRGRGLVVLGVPSNDFGAQEPGSNPEVASFCEINYGVDFPLLEKQVVTGTGAHPFYRWAAERTGALGVPRWNFHKILVGRDGQLVDWFASTTAPDSARLRAAIDKALTP

SEQ ID NO: 16619 - protein, 284 aa, Cyanothece sp. PCC 7424
MVNATEKAPEQSGKNQSVKQDIKGQLIIIGGAEDKEGDCKILREFIRRSGGIDAKIVIMTVATELPREVGDDYIRTFERLGVEDVRVADTVVREDADSRSILEALERATGVFFTGGDQARIVEVLKDTQIHKTLQKRYQEGLIVGGTSAGASMMSDKMILEGDSETYPRIEIVDLDSGMDFLSEVIIDQHFAQRGRLGRLLAAVARHPQLIGIGIDENTGIIVEDHQFQVIGEGSCTVVDLKSASHNNIKQILKDEGLALCDVNLNILPDGYGFDLNSRKAIVA

SEQ ID NO: 16620 - protein, 143 aa, uncultured Frankia sp.
SRDPRNTAKKAEAYLRGTGFADTAYFGPEAEFYIFDDVRYDYNPYGSLHAVDSIEAAWNTARKEEGGNLGYKPRFKGGYFPVPPTDHFTDLRSEMSRALIRAGITVEMQHHEVGTAGQAEIDIRYDTLLRTADNLMLYKYIIR

SEQ ID NO: 16621 - protein, 121 aa, Arabidopsis thaliana; identical to SEQ ID NO: 15671

SEQ ID NO: 16622 - protein, 430 aa, Arabidopsis thaliana; identical to SEQ ID NO: 15651

SEQ ID NO: 16623 - protein, 285 aa, Burkholderia pseudomallei K96243
MSTTLLFHPTPDVAYGFPNARRLARIESEYQEIEVWETSLLGRLFTLDGRPMTSVGDEFVYHECMTHPAALAHPAPKKALVLGGGDGGAARQLLRHPCIERIVVAELDAAVVDMARRFLGDVHQGALDDPRVELAIGDAARYVDHACEHFDLAVFDLTPPDSPAAGLYTPAFYTRLKRILTPQGAVSLHLGSPLYHGARIAALLAGLRERFAVVAPLCAHVPLYGSPWLMAIASDTLDAASLFSHDIDARLAERHIEGLRFYDAKLHSALFTLPHALRDTLGMHR

SEQ ID NO: 16624 - protein, 856 aa, Oryza sativa Indica Group
MVQGREVGEVVPFPGEVEGDWNVSVENRICGWGYSTIEVVGRICNSSVEKVEERETIILAISNTEKMGEKQQKSDQDFHFSDGTMAIPRDRKRKGELDPATDYVKDLWGAFYVAAESTQLDTSEVNNKKQLDNCNHDIHVYEDLGHVCHECGLVVRKADSLFHYQWKKASRKRTNTYEACLKKVVSDAISLSEDFIFSDIAIHPRHAKNIRPHQLEGFKFLINNLVTDEPGGCILVHAPGSGKIFMLITFIQSFMARHSTARSLVVLPEGILGTWKMEFQQWQVEDIPLYDFDSIKADERVEQLEVLKFWSSKRSILFVGSKHFTQIVCDDRDENAVAECRDMLLMVPSLLIIDEGHTPSIHETDMLQSARKVQTPCKVVMSGTLFHNHVKEVLNTLDLVRPGFLKTETSWPIVTRMMGQLEISSARSITEISESVEDTLLNDDNFTRKVNVIRSLGELTKDVLHYCKGEDLNEFPGLLDFSVFLELSPKQKDILCKLEEDHEMLKTSAVGAALYVHPCLSEISEANAVDRDDRVDSLVNSINLGDGVKARFFLNILALANSAGEKLVAFSQYTLPMKFLERLLVKEMGWYVGKEIFVINGDTSMEDGQLAMDQFNGSADAKVLFGSIKAFGEGISLVGASRIVILDIHLNLSVTRQAIGSTFRPGQKKKVFVYRLVAADSPEEKTHETAFNKEVIPKLWFQWSGRCTTEDFKLNQVCIDGSGDELLETDVIRQDIKALYQSFYQLGTEIRELILLYPFSFGCVYPGNKKLTAIGRTTGFMILARNLMVLDWYPEVPFYRVKFGISSWIGKVTLIRIFCILYNEKVQIALLASKGSIKDKQEGCKSWRGIQVSIHG

SEQ ID NO: 16625 - protein, 313 aa, Cyanothece sp. PCC 7424
MAGSEVKADLWINEYITPWDIYSHGITRILSYKKTPYQEMYIVESGAYGKALVLDGKWQSCTGDEFIYHEALVQPGMIAHQNPKTVLILGGGEGATTREVLRWNTVERVMMIDIDGEVVQACKDHLPEMHANSFDDPRFELVIADALEVLETTTEKWDIIISDLTDPIEEGPSFALFAKEYFEKLQRVLAPGGYVIVQSGPVSVPNVKYHARLINTLKTVFPHVLSYITPTAAYGSPWGLALCTPQPVNTRPDPHTIDQLLKEKTSGGLRLIDGVSLLGMLQTPLYIRTAIEEYQEIYSLETPPEFFGKGSKE

SEQ ID NO: 16626 - protein, 285 aa, Xylella fastidiosa Dixon
MTTKDTWFTEHFQATGSAIGFRVTGKLDEVQSPFQKIEIYNSTDWGKLMVIDGALMLTSRDNFIYHEMISHPALFTHTAPKCVVIIGGGDCGTLREVLKHPDIEQVTQCDIDEQVTRMAEKHFPELCTSNNDPRATLLFSDGVAYMADCPTNSVDVIIVDSTDPIGPAKGLFNRTFYESCFRALKNDGLLIQQSESPLALLELIKEMRHEMSKAGFKAFKTLPFPQPCYPTGWWSVTLSSKQPNANFAFRQTDAQTKPFDTLYYNAHLHHGVLAPPPFIAHALGE

SEQ ID NO: 16627 - protein, 831 aa, Vibrio vulnificus CMCP6
MHFDSGLLALLFVIIALFIGALVRHLLKGSQVPYTVALLILGIAIGLAHRGNAFTDNYTLIGETLSLASEIDPHLFLFLFLPTLIFESAFAMEVHLFRRMFTQIVILAVPGLMLAIWLTAELVAWVLPEHWQWSWALCLMFGALISATDPVAVVALLKEVSSRKRLETLIEGESLLNDGTAIVFFSLFYGWVLMEFSNPGEAITAPPWQAVAQFFVVVFVGLAVGLILGGLCILWIDRVFNDPMIEISLTIAAAYSAFFISENFHVSGVVAVVTLAIMFASVGRTRISPEVAGFLHHFWEMMAHMANTLIFLLVGILVAIRVPLDDKEAWLALFVLYLGIMAIRACSITVFMPILKRIGIGITYEKAVVLCWGGLRGAVSLALAMTVASSDIIPKQIGDHVLFLCAGIVVLTILFNGSTMGHVLKWLNLSSLPPGKQATVDKAQHEVNRVLHDMLPTMMTSDFLKGADWETVKQGAKLQVLKECNSPTEITQDELHTAYLRRLLETERKHYWTQFSQGLIGKQATNKLVEAVEHALDGDPIIGPRNELFTTWRLPDWVEPLRQYNSWNKLLLKVYFRRLALGYDVARGFIQAQEALESHIDTLAPDAEIAVMVRQQVELNKRLTFERIESLRMSFPEIIQALQSQAATRLLLNRERAVINDQLKQAVLDKPEAQKLLNMVEERMAALQKESIFDKSQEQKLINDIPWARELKSKTREELTSWIEHTVYDAGQLICENQRPLNRIGIVSRGSITELYETRSDDNLEKVRTTIGPGETFALISLLTGKTNAQYVSDTPTDIMWLPVDKLKLLMNQDPNLTAVVCQLFKQLKSV

SEQ ID NO: 16628 - protein, 313 aa, Candidatus Kuenenia stuttgartiensis
MEKLPLNWIDDYFSDYELHKLAFKNIVYEAESKHQKIIVVDTYSFGKCLILDNEFQSAESDEYVYHESLVQPSLIMHPEAQSVLIIGGGEGATLRETLRHKSVKKAVMVDINDEVISCAKKSLPSFHEGAFDDERTSLVIEDGRKYLENTDQQFDVIIIDVNDPVGGSPSAMLFTREFYQIAAGRLKKDGIVVVQSGAVSVTDNDLFSGIFHTLNDVFPHVFPYTTYIPSYACLWGFTIATHNLGDLDITGEEIDFRIGNRVNSALRYYDSITHHSLFNLPKYLREELKKSKHIIRDNAPLIKQYPGVSSEKI

SEQ ID NO: 16629 - protein, 187 aa, Oryza sativa Japonica Group
MADGPGSPGGGGGSHESGSPRGGGGGGGGGGGGGGVREQDRFLPIANISRIMKKAIPANGKIAKDAKETVQECVSEFISFITSEASDKCQREKRKTINGDDLLWAMATLGFEDYIEPLKVYLQKYREVRTDGDSKLTAKAGDGSVKKDVLGSHGGSSSSAQGMGQQAAYNQGMGYMQPQYHNGDVSN

SEQ ID NO: 16630 - protein, 508 aa, Xanthomonas oryzae pv. oryzae KACC10331
MVSGTEGGGMSLKWMPRGVAFLVGAASLVQEVLWVRLAGFATGGLPETFATILALYLLGIAVGAQLGRRLCVGRVLDIRRRASLVLLLSALVDIAAPFLFSWGIGFLPVTVAMLPLVIATAALKSALFPVVHHLGSNDAVAWKGGSFSKVYFANVAGCTLGPLIVTLWLMDVMVMEQLFVGVATVTAVAGMWLPGLRLVAVPAVVVAIAALVLQPALPALASRIVMATGGAQADWLLERKEGIIHTIADPQGNIVFGGNVYDGRINVDLRSNSNKIDRVYAAMAAVPNPKRVLVIGLGGGSWTRVIASFPTVDRVDVVEINPGYLELIAGHPQVAPILQDPRVHIHIDDGRRWLRAQGGARYDAIVVNSTFHWRSGATTLLSQEFFRLVGAHLSDSGVALVNATGSPEVLKTAASEFPQAYLFGNSVIMSRRDFRDTLRAGGEAIYATRMHGRPVFDPANASDAAAVRKVTAADLVGVDVVEERAGRPVEVNTDLRMLTEYKYGASSR

SEQ ID NO: 16631 - protein, 537 aa, Oryza sativa Indica Group
MELGLGMGMGLGDPPADYGSIAAVGLFVALICVCIVVGHLLEESRWMNESITALIIGLGTGGVILMVSSWKHSRILVFSEDLFFIYLLPPIIFNAGFQVKKKQFFRNFMTITLFGAIGTLISFSVISLGSLGLISRLNIGSLDLGDYLALGAIFSATDSVCTLQVLNQDETPFLYSLVFGEGVVNDATSVVLFNAMQNFDLANFSSVKFLQFIGNFLYLFATSTFLGVAAGLLSAYIIKKLYFGRHSTDREVSIMMLMAYLSYMLAELLDLSGILTVFFCGIVMHAFATLSFIAETFLFLYVGMDALDMEKWKIVGETYSPMKSIALSATILFLVLVARAAFVFPLSFLANLTKKTEEGKISIKQQVTYMMWVIQVIIWWAGLMRGAVSIALAYNKFTRSGHTQLPSNAIMITSTITVVLFSTMVFGLLTKPLIRLLVPARHLNRESSALSDPPSPKSFLDPLILNGSDADLEIGVGIRRPTSLRLLLASPTRSVHHYWRKFDNAFMRPVFGGRGFVPFVPGSPTERSVPLLQGNEN

SEQ ID NO: 16632 - protein, 417 aa, Pseudomonas anguilliseptica
MIRSFIRSSALLLALLPVTGYSAGPLILVGGGLKDDNTAIYQRLIQLAGGNGQARIGVITAASIPESDDPDAGTADAANSKANGEFYAQLLETYGAADAQWIPIDLDQISNNSNPQVVAQINSMTGFFFGGGDQSRLTQTLQTATRADSPALAAIRARHNAGAVLAGTSAGTAIMVQGPMVTGGESYDGLRYGVYTTPSGDDLSYDMQGGFGFFNYGLLDTHFSERGRQGRIVRLADHTQVPFAFGVDENTALLVQNNATLGQVEMEVIGENGVFIFDLRNKERGTGSTYALYDVLGSYLTAGDRYRPVTGQFVIASGKTSLRGRERYSAAMTVTTDIFSSPNNSGANGRRKPREFVKVSADLFDSRVTSTLGRTYETNPLSRRSVQKHAVRQPWLPGHRWRQEHAVLPAFADGFPS

SEQ ID NO: 16633 - protein, 276 aa, Bacillus licheniformis ATCC 14580
MSGLWYTEKQTKNFGITMKINRTLHTEQTDFQKLEMAETEEFGNMLFLDGMVMTSEKDEFVYHEMVAHVPLFTHPNPEHVLVVGGGDGGVIREILKHPSVKKATLVDIDGKVIEYSKKFLPSIAGKLDDPRVEVKVDDGFMHIAQSENEYDVIMVDSTEPVGPAVNLFTKGFYAGIAKALKEDGIFVAQTDNPWFTPELITNVQRDVKEIFPITKLYLANIPTYPSGLWTFTIGSKKYDPLEVEDSRFFDIETKYYTKEIHKAAFVLPKFVSDLIK

SEQ ID NO: 16634 - protein, 483 aa, Bordetella bronchiseptica RB50
MCMSTRKFRGFGLVAIGAVAGILLSVGVSAVAQRGSPLPLDELRQLSNVFAAIKNNYVEAVDDKTLIGNAISGMVSNLDPHSAYLDADAFREMQTATQGEFGGLGIEVGAEDGFVKVISPIEDTPAARAGIQAGDLIIKIDDTPTKGMSLNDAVKLMRGAPKSPITLTIMRADRPQPIVVKIVRDIIKVRSVRSKMLDNNVAYLRIAQFQEKTGPDLARHLKELGAKGAPKSLVLDLRNDPGGLLTSAIGVAGAFLPPDALVVSTDGRTPDSRHKYRATPSEYARGEGNYLNDLPGWVKTVPMVVLVNVGSASASEIVAGALQDHKRAKVLGNRTFGKGSVQVILPLSESTAVKLTTSRYFTPSGRSIQATGIEPDYVVADTADGDLFRLPREADLQRHLSNQQSPDAEVKSNNDDNTEVAGKAFEFGGKDDFQLQQALNLLAGKPVQKGSARAQAKADIKPSEGKTQRMTITPTGVEPAKSK

SEQ ID NO: 16635 - protein, 167 aa, Momordica charantia
MAEESPKSIYDFTVKDIRGNDVCLSQYSGKVLLIVNVASKCGFTDSNYKELNVLYDKYKSQGFEILAFPCNQFARQEPGTNEEIQETLCTRFKAEFPIFDKVEVNGKNAAPIYKFLKLKKGGIFGDGIKWNFTKFLVNREGKVVDRYAPTTPPLNIEKDIQNLLGSA

SEQ ID NO: 16636 - protein, 279 aa, Zea mays
MLPYTALNLKEKKRNNLKDFVNVAGPMGVTHFLILSNPQSLPHLRFAKSPQGPTFTFQIEEYSLAADIANSQKRPRCPPGIFKNSPLVVLGGLTGLGNPFRSLVEYFQHMFPSVDPTTVKLATCQRILLLKHDKEKDVIEFRHYSIKLQPVGVSRRIRKLMQNNQVPDLGEFEDVSEFVKKAGYGSESEADDEAAMVSLPSDIDKLNRASRKSAVRLQEIGPRMTMRLVKVEAGLCSGDVLYPWPVEKEVVGKKGTETGEVEGQEDDSEATDESEDEMV

SEQ ID NO: 16637 - protein, 481 aa, Corynebacterium efficiens YS-314
MASSPTTNPDEILKFIRDNDINWVDVQFTDVPGTEQHLSVPAAAFDESAMENGLAFDGSSISGYTTVDDSDMMLLPDLSTAFIDPFRRSKTLNIKFFVHDPYTREPFSRDPRNIARKAEEYLASTGFADSCNFGAEAEFYIFDSVRFSSQSNAAFHEVDSVEGWWNSGSRENPDGSRNLGHKVRQKGGYFPVAPYDHFQDLRDTIGETLAEIGFTVERSHHEMGSGGQQEINYRFNTLLRAADDLQTFKYVVKNTAKAVGKSATFMPKPLADDGGSGMHIHQSLWKDGKPLFHDEAGYANLSEMARHYVGGLLKHAPAVLAFTNPTLNSYNRLVPGFEAPVSLAYSQQNRSAAIRIPASGPNPKATRIEFRTPDPSGNPYLAFTASMMAGLDGIRNRIEPDAPLDKDLYELPPEEAAKVAEAPTSLEQALKALEEDHEFLTEGDVFTDDLIEAYVAYKHEHEITPERLRPTALDFELYYDC

SEQ ID NO: 16638 - protein, 111 aa, Triticum aestivum
  misc_feature (99)..(99): Xaa can be any naturally occurring amino acid
MARALDGCYSAKDVAYSCGYCGYALNLSSSTRNTANIGSKYGKQIRKGVVSFFAIDESRFTQTDEVSCTPYFRSSRSWGFFRKRTRLLCRKCSGHIGNXYDDKDLPCMILR

SEQ ID NO: 16639 - protein, 382 aa, Pectobacterium atrosepticum SCRI1043
MKALHFGAGNIGRGFIGKLLADANVELTFADVNQPLLDALNSRKSYSVRIVGDNTQVEAVSNVSAVHSGSQDAIALIAAADLVTTAVGPQILEKIAGTIAQGLVKRHEDGNTRPLNIIACENMVRGTSQLKQHVLKLLPEAHQEWVVEHVGFVDSAVDRIVPPSEAGSDDVLAVTVETFSEWIVDKTQFCGEPPAIPGMELTDNLMAFVERKLFTLNTGHAITAYLGQQARHQTIRDAILDPKVRAVVKGAMEESGAVLIKRYGFDADKHAAYINKILSRFENPHLHDDVDRVGRQPLRKLSAGDRLIKPLLGTLEYHLPHDNLIIGIAAAMHYRSEQDPQALELAELIRTLGPQATLVQISGLDADSEVVAQAVNVYNAMQ

SEQ ID NO: 16640 - protein, 144 aa, Brassica napus
MGIGLTEFLSIELATEHPQVIPISVFIVILCLCLVIGHLLEENRWVNESITAIAVGAVSGTVILLISKGKSSHILVFDEELFFIYLLPPIIFNAGFQVKKKKFFHNFLTIMSFGVIGVFISTTIISFGTWWLFPKLGFKGLTAR

SEQ ID NO: 16641 - protein, 117 aa, Glycine max
  misc_feature (72)..(72): Xaa can be any naturally occurring amino acid
MAAENVVEFTDLPVKRPREEEEGTNGVSNDAVSALPNDPQYPGISAVIPGEAHSLKMEKILFQGKSDYQNVXVFQSSTYGKVLVLDGVIQLTERDECAYQEMITHLPLCSIPNPKKV

SEQ ID NO: 16642 - protein, 491 aa, Listeria innocua Clip11262
MKLKELMQAIPVYTGEASAAIEVNQIAQDSRKVQPGTLFICIDGEIVDGHQFADRAVQLGAVAIIAEKQLDVSVPVLYVRDSKRAMAMLADYFYGSPTQALKLVGITGTNGKTTVSHLVEQIVRENGEQTGLIGTMYRKIGDEILETKNTTPDSLTLQETFRDMLLSGVSTAVMEVSSHALVQGRVYGSDYDVAVFMNLSQDHLDYHHTMEEYAYAKSLLFAQLGNSYNLSNPKIAVLNADDKESVRMQTATAAHIITFGIKEPADFSASNIQITSHGSTFDLKTPVGDFALKIKMIGNFSVYNVLAAIATSFALRIPVINAIATVESIPGVKGRFELVNAGQDFPVIVDYSHTPDSLLNVLQTIDEFAEKRVFVVVGCGGDRDKGKRPQMAKIAVDYATNPIFTSDNPRSEDPHAIIEDMIQGVPGSDSYVVHENRRDAIRYAVNMAEAGDVILIAGKGHEDYQVIGDEVIDFDDRVEARIAIEKKLGLA

SEQ ID NO: 16643 - protein, 1077 aa, Vitis vinifera
MVAQLESHPTLDPVQKAKTLICALNLISRNLPLPPDVFNAVSSIYHADDLLDRADVDTLDTPSEKVSDGPGISGGGDLIIDLDDALVKQRPNCTSGIELTKSRENRLQSHIQHRLTQLEELPSTRGEDLQTKCLLELYGLKLVELQSKVRSDVSSEYWLRMNCAYPDKQLFDWGMMRLRRPLYGVGDAFAMEADDQFRKKRDAERLSRLEEEEKNRLETRKRKFFAEILNAVREFQLQVQASLKRRKQRNDGVQAWHGRQRQRATRAEKLRFQALKADDQEAYMRMVKESKNERLTMLLKKTNDLLVDLGAAVQRQKGAEQSDGIETLKSPEPDLPDLSASKSQRQYNSVIHSIQEKVTEQPAMLQGGELRPYQLEGLQWMLSLFNNNLNGILADEMGLGKTIQTISLIAYLVENKGVTGPHLIVAPKAVLPNWVNEFSTWAPSIAAVLYDGRLDERKALREEISGEGKFNVLITHYDLIMRDKAFLKKIDWHYMIVDEGHRLKNHECALARTLVSGYQIQRRLLLTGTPIQNSLQELWSLLNFLLPSIFNSVTNFEEWFNAPFADRSDVSLTDEEELLIIHRLHHVIRPFILRRKKDEVEKYLPGKTQVILKCDMSAWQKAYYHQVTDLGRVGLDTVRFAGSGKSKSLQNLSMQLRKCCNHPYLFVGDYNIWQKKEEMVRASGKFELLDRLLPKLQKAGHRVLLFSQMTRLMDILEIYLQMNEIKYLRLDGSTKTEERGTKLKQFNAPDSPYFMFLLSTRAGGLGLNLQTADTVIIFDSDWNPQMDQQAEDRAHRIGQKKEVRVFVLVSVGSIEEVILERAKQKMGIDAKVIQAGLFNTTSTAQDRREMLEEIMRRGTNSLGADVPSEREINRLAARSDEEFWMFEKMDEERRQKENYRSRLMEEHEVPEWAYSTPDGKEEKSKGFEHDASKITGKRRRKEVVYADSLSDLQWMKAVESGEDISRLSVKGKRREHLPSEANESDSDKIGGEQKVLELRSENVSMTSEGTSEDTFSLAPKRLKSEGANSDQRTGGGSWNGHIPTWQTHTRRRSSYVVQSSSSDARGQNSNSRGNGWS

SEQ ID NO: 16644 - protein, 233 aa, Arabidopsis thaliana
MAFSYASFSTPFNGFAANPSPITSAFLGPSLRFSTRTSKTRNPSNGVSVKSSNSHRFLVKSKNFSVYARAAAEKSVHDFTVKDIDGNDVSLDKFKGKPLLIVNVASRCGLTSSNYSELSQLYEKYKNQGFEILAFPCNQFGGQEPGSNPEIKQFACTRFKAEFPIFDKVDVNGPSTAPIYKFLKSNAGGFLGDIIKWNFEKFLVDKKGKVVERYPPTTSPFQIEKDIQKLLAA

SEQ ID NO: 16645 - protein, 499 aa, Prosthecochloris aestuarii DSM 271
MMTLEDLIGLLDPLEYLAGRTPLKEVHALTADSRQAVEGGAYFALRGYVTDGHHFISDALSKGVGVVVCEEIPVSVDERCCYIRVADCRTALAAAAAEWFGHPASSLRVIGVTGTNGKTTTARLIRTMLDRSGVKTGYIGTGQALIGDESIVLERTTPEAMDLHALFRKMVNCGCEAVVMEVSSHALVLHRTEGISFYGAVFTNLTPEHLDFHATMDEYGSAKQILFRQVAPDGFGIVNADDAWGSMMAGAFSGSRLFCCTVGSQVFGCTNGSVVRARDIEARMDGSSVTVQMNGRACRASFLLPGLFNVMNMLEILSAGVAMGLSLETAAASVADVVSVEGRMEPVSDDGGLFSAIVDYAHTPDALEKVIGALNEVRPADSSLIVVFGCGGDRDRSKRPLMGGIAAAGADHVILTSDNPRSEDPEEILDAIASGITEGSFMRIADRADAIVCGVQMLRPGDLLLIAGKGHECYQESGGRKSYFSDREVVARALQERAD

SEQ ID NO: 16646 - protein, 612 aa, Ashbya gossypii ATCC 10895
MMANRAIQYMIVMTLRMGWAAGAGNDAGGVPNEPDGQPPIDGEPDENVNPITEEIFSSWALCILLFLLIAALWTNYYLTQRRIRAVHETVLSIFYGMLTGFLIRVSPGHYIQDTVTFNSSYFFNFLLPPIILNSGYELNQTNFFSNIVSILTFAIPGTFISAVVLGVILYLWTALGLESIDISFLDALSVGATLSATDPVTILSIFNAYKVDPKLYTIIFGESLLNDAISIVIFETCQKFHGKPLTFMSFFEGIGLFLMTFTISLLIGVMVGILVALLLKHSHVRRYPQIESCLVLLIAYESYFFSNGCHMSGIVSLLFCGITLKHYAYYNMSRRTQLTIKYIFQVLARLSENFIFIYLGLALFTQVELVYKPMLIIVTAISICVARWCAVFPLSDFVNWLYRVRTMGTLRSRTAVSIPDEIPYQYQMMTFWAGLRGAVGVALAMGLQGEFKFPLLATVLVVVVLTVIIFGGTTAGMLEILNIKTGCVEEQEDTDDEFDIEAPRPVQLMSSLDAPPFLADSPTGSPDQESFPPMIDRPSSRSASGADQPVGRLSLDRRNIRETLGNILQADGQWFNKFDERVLKPVFLDNPSASPSNNNQSGSNSFIGNRRS

SEQ ID NO: 16647 - protein, 531 aa, Ralstonia eutropha JMP134
MSPVLAFKLVLLSLIAIIALELLAAKLRLPPAAAFLVGGIAMAFVPGLPAVELSPDLVLLVFLPPLLTDGAYFSVWDEFRRNLSGILMLAIGAVLFTTLVVGVAVHMVVPGLPWAACFALGAIVSPPDAVAAKAVLERVALPRRLMTLLEGESLLNDATGLVLYRFAVAAALTGAFSLEHATVDFFVLALGGVAVGIAIGFALVRVLRRLADEYLLITAAILSSWVSYIVGEWLEVSGVIATVTTGMILGWHQHQVFSASTRIRGTAFWQVMVFLLEALVFILIGLSLRGVIARHGGTADVMASLALPVGMVIVSVVLSRFAWVFGSEALKSAWQRVVRRQARADWRSATIVSWAGMRGVVTLAIALALPEQMPGRDLILVASFAVILVTVLLQGTTIGPLIRLLDIRRIEDASGRKLTEAQAWARLEAVQRDAIRPLVFDADGALRHPRLWEQVNYRAQITESFKDNIIPDEERTSHYGVILAGLAAAREELLRMHRAGQLHDELLRHLEYDLDLQEIAALHGSAGVGAD

SEQ ID NO: 16648 - protein, 288 aa, Shigella flexneri 2a str. 301
MAEKKQWHETLHDQFGQYFAVDNVLYHEKTDHQDLIIFENAAFGRVMALDGVVQTTERDEFIYHEMMTHVPLLAHGHAKHVLIIGGGDGAMLREVTRHKNVESITMVEIDAGVVSFCRQYLPNHNAGSYDDPRFQLVIDDGVNFVNQTSQTFDVIISDCTDPIGPGESLFTSAFYEGCKRCLNPGGIFVAQNGVCFLQQEEAIDSHRKLSHYFSDVGFYQAAIPTYYGGIMTFAWATDNDALRHLSTEIIQARFLASGLKCRYYNPAIHTAAFALPQYLQDALASQPS

SEQ ID NO: 16649 - protein, 946 aa, Oryza sativa
MYYRRQRKASSEANANVFMPGGPNDISFPASNRDHDWGYGGVGKEWEASYARKLQLMNFLSSLHQRTANPLVTTRMDANMDTPLEQKQKDSSAIIVLDSDDEDGYTEGCEQLTSENNKQQAPSGLTSPYTTWIVSSAKDQVNGTLHVDGVQSTQIVPYYGQNAPLINQFPLQTSWQPSIQYERVILQKRPEEQRVQDLVAASHAEKIAETQVLLTLPTLPNERKRRKTEPTTLVDVDGGTNLGKRKRKNHQNQAAFDSNLDLQQNDVPSQSYRTMIEEEKPVKESDGLEDLWKDFSLAAECTKLDTNEDMSNEKDVDDENEMDDDCNHDIRIHEDLGHVCRICGMIVRKAETIIDYQWKKASRTRTNYYESRSKDADEIDTGAVKVSEDFIVSDIAIHPRHAKQMRPHQLEGFSFLVKNLVGDKPGGCILAHAPGSGKTFMLISFIQSFLAKYPSARPLVVLPKGILGTWKREFQRWQVEDIPLYDFYSVKADKRVEQLEVLKSWEAQMSILFLGYKQFSRIICGDGDGNIAAACRDRLLMVPNLLILDEGHTPRNRETDVLASLKRVQTPRKVVLSGTLFQNHVSEVFNILDLVRPKFLKMESSRPIARRIMSQVAISGIRSLKGVHDSAFTESVEDTLLNDDNFTRKAHVIRSLRELTKDVLHYYKGDILDELPGLVDFSVFLKLSTKQKEIVHKIEAYEKFKRSAVGTALYIHPCLSEISEGDAADRASNLTDATVDSLIESIIIKDGVKAKFFFNILSLANSAGEKLLAFSQYILPMKFLERLLVKRLGWHVGKEIFMISGDTSADDREVAMDQFNNSADAKVLFGSIKACGEGISLVGASRVIILDVHLNPSVTRQAIGRAFRPGQQKKVFVYRLVAADSPEVKFHETAFKKEVIPKLWFEWSELCTTEDFKLNQVDIDDSEDELLEANAIRQDIKALYRR

SEQ ID NO: 16650 - protein, 121 aa, Triticum aestivum
LPKTSSEMAAIEKFLQFQDAVPCKIRAKRGCATHPRSIAERVRRTRISERIRKLQELVPNMDKQTNTADMLDLAVDYIKELQEQVKVINESRANCTCSASKHQQQYSPRVRRGGRSVSSHL

SEQ ID NO: 16651 - protein, 481 aa, Arabidopsis thaliana
MDQEALLVGRTLLKRGIPTIPFILASQALEKLAYFGLVPNMILFLTVEYGMGTAEAANILFLWSAATNFFPLVGAFIADSYTGRFPLIGFGSSISLTGMVLLWLTTIIRPECDKLTNVCQPTTLLKSVLLYSFFALTAIGAGGVRSSCLAFAADQLQPNQTSRVTTSSLETLFNWYYFSVMVACFLSQSLLVFVQTTYGWQIGFGVSVAAMALSVALFFAASPYYVRFQKPTRNSRNPWKLCRVQQVEDLKSLINVIPIWSTGIILSLVTACQVSFIVLQAKTMDRHTFIQGFEIPPGSYGIFLVISFLLFLGLYDLVIVPLLSWALREPFRLGVMVRMWAGYVISVLCISALAATEYARRKTARDESGTKLSAMWLLPYMILGGIAEALNTIAQNEFFYSELPKTMSSVATTLSSLNMAAASLISSWIITIVDVTTYGSWITENIDEGHLDYYYWLLVGLSLLNVLYFVWCKKSYGKCSI

SEQ ID NO: 16652 - protein, 516 aa, Corynebacterium efficiens YS-314
MRGHDRLLQLASVFYFSRCHRVNQAGRTPTTPTCTIDALTCCFVDHFHPRRGVGACNSPEQVRGLRKLVCMNSQQEFVLSTIEERDIKFVRLWFTDIVGQLKSVVVAPAELESAFEEGIGFDGSAIEGYARISEADTIARPDPSTFQILPKEVETSRLQAARMFCDVTMPDGQPSFSDPRQVLRRQVQLAADEGFICMISPEIEFFLVQSLRTDGRPPVPTDNGGYFDQATFNEAPNFRRHAMLALEEMGIPVEFSHHETAPGQQEIDLRHADALTMADNVMTFRYLIKQVARDQGVAATFMPKPFAEHAGSAIHTHMSLFEGGTNAFHDPDDEFMLSRTARQFIAGILRHAPEFCAVTNQWVNSYKRIVYGNEAPTAATWGMSNRSALVRVPTYRLNKADSRRVEIRIPDSACNPYLAFSVLLGAGLKGIKEGYELEDPAEDDISSLSLRERRAMGYKDLPSSFDHALRLMERSDLVADILGEHVFEYFLRNKWREWREYQAQITPWELRTNLDY

SEQ ID NO: 16653 - protein, 618 aa, Cyanophora paradoxa
MGKIVGIDLGTTNSVVAVMEGGKPTVITNAEGFRTTPSVVAYTKTGDRLVGQIAKRQAVLNPGNTFYSVKRFIGRKFDEVTEEAKQVPYKVTGTQNVRIECPALQTSFTPEEISAQVLRKLAEDASKYIGEPVTQAVITVPAYFNDSQRQATKDAGKIAGLEVLRIINEPTAASLAYGLDKKKNETILVFDLGGGTFDVSILEVGDGVFEVLSTSGDTHLGGDDFDKKLVDFFIEEFQKLENINLREDQQALQRLTEAAEKAKIELSSVTQTEITLPFLSLTPSGPKHFDTTLNRAKFEELCSTLIDRCRIPVETALKDAKLTKEDIDEVVLVGGSTRIPAVRELVQKVLDKVPKQSVNPDEVVAVGAAVQAGVLAGEVKDIVLLDVTPLSLGVETLGGVMSKIIVRNTTIPTQKSELFSTATDGQTNVEIHVLQGERGFAKDNKSLGTFRLDGIAPAPRGVPQIEVTFDIDANGILSVTAKDKGTGKEKSITITGASTLSQDEVERMVQEAEKNAAQDKENRQKIELRNQAESLINQAERQLKEFKLEPNVQAPIEQTIQQLQTALKEDNLEQVQSLCQELQNSLLEIGKQVYSKTETTTPNKNEEDVIDASFSEEK

SEQ ID NO: 16654 - protein, 452 aa, Arabidopsis thaliana
MSGVVRSSPGSSQPPPPPPHHPPSSPVPVTSTPVIPPIRRHLAFASTKPPFHPSDDYHRFNPSSLSNNNDRSFVHGCGVVDREEDAVVVRSPSRKRKATMDMVVAPSNNGFTSSGFTNIPSSPCQTPRKGGRVNIKSKAKGNKSTPQTPISTNAGSPITLTPSGSCRYDSSLGLLTKKFVNLIKQAKDGMLDLNKAAETLEVQKRRIYDITNVLEGIDLIEKPFKNRILWKGVDACPGDEDADVSVLQLQAEIENLALEEQALDNQIRQTEERLRDLSENEKNQKWLFVTEEDIKSLPGFQNQTLIAVKAPHGTTLEVPDPDEAADHPQRRYRIILRSTMGPIDVYLVSEFEGKFEDTNGSGAAPPACLPIASSSGSTGHHDIEALTVDNPETAIVSHDHPHPQPGDTSDLNYLQEQVGGMLKITPSERNAAQQHCQIAGCGAQRETFVSGF

SEQ ID NO: 16655 - protein, 319 aa, Triticum aestivum
MGASESVLETSVHEFTVKDCNGKEVCLDTYKGKVLLIVNVASKCGFTETNYTQLTELYQKYREKDFEILAFPCNQFLRQEPGSDQQIQDFACTRFKAEYPVFQKVRVNGPDAAPLYKFLKANKPGLFGSRIKWNFTKFLVDKNGKVINRYATATTPFSFEKDIQKALEEEPSDSQTKKEEESSDSQKSHSCPATPRHRGHSTAKHQHPARRRKCIPTSSSARPRTSNSSPDSQHQHAKATDTASNFFRSHTAAAARPRHSGHSMAKHQHLAWRRKCIPTPSSARPRISNSSPNSQHEHAKAADIASISWSHLSRQTTLQ

SEQ ID NO: 16656 - protein, 151 aa, uncultured Frankia sp.
SRDPRNTAKKAEAYLRGTGFADTAYFGPEAEFYIFDDVRYDYNPYGSLHAVDSIEAAWNTARKEEGGNLGYKPRFKGGYFPVPPTDHFTDLRSKMSRALIRAGITVEMQHHEVGTAGQAEIDIRYDTLLRTANNLMLYKYIIRSVALSRGK

SEQ ID NO: 16657 - protein, 146 aa, uncultured Frankia sp.
SRDPRNTAKKAEAYLRGTGFADTAYFGPEAEFYIFDDVRYDYNPYGSLHAVDSIEAAWNTARKEEGGNLGYKPRFKGGYFPVPPTDHFTDLRSEMSRALIRAGITVEMQHHEVGTAGQAEIDIRYDTLLRTADNLMLYKYIIRNVA

SEQ ID NO: 16658 - protein, 811 aa, Oryza sativa; identical to SEQ ID NO: 15251

SEQ ID NO: 16659 - protein, 145 aa, uncultured Frankia sp.
SRDPRNTAKKAESYLRGTGFADTAYFGPEAEFYIFDDVRYDYNPYGSLHAVDSIEAAWNTARKEEGGNLGYKPRFKGGYFPVPPTDHFTDLRSEMSRALIRAGITVEMQHHEVGTAGQAEIDIRYDTLLRTADNLMLYKYIIRNV

SEQ ID NO: 16660 - protein, 468 aa, Parvularcula bermudensis HTCC2503
MAVKDVLKKIKDEDIQYVDLRFTDPKGKWQHVTFDKSMVDEELFEDGTMFDGSSIAGWKAINESDMILMPDAETAIVDPFFAQPTLSIICDILEPSTGQPYSRDPRTTAKAAEAYLKSSGIGDTAYFGPEAEFFIFEDVRISTEQNNMGFSLDSTEGPYNMAREYEGGNLGHRPRAKGGYFPVPPVDSEQDLRSEMLSYMSQMGLEPEKHHHEVAPSQHELGMKFSTLLKMADNMQIYKYVVHQVAHAFGKTATFMPKPVFGDNGSGMHVHQSIWNAGKPVFAGDRYADLSETCLHYIGGIIKHARAINAFSNASTNSYKRLVPGFEAPIMLAYSARNRSASVRIPWVSSPKGKRIETRFPDAAGNPYLTFAALLMAGLDGIENRIDPGDAMDKDLYDLSPEEQQGIPTVCASLEEAMAALDADRDFLRKGNVFSDDQIDAYIELKMEEIVRYNTTPHPVEFDMYYSV

SEQ ID NO: 16661 - protein, 477 aa, Rhizobium leguminosarum bv. viciae 3841
MSWLWTTEDMIAVMAGRPFGTLPEGITGISIDSRSITPGEAFFAIKGDRVDGHDYASMAMANGASLLIVSEARLPAMGRLTVPMIVVEDVLAALGRLGLASRERSRARIIAVTGSVGKTTTKEMLRHVLSPSGKVHASVASFNNHWGVPLTLARMPEDTDYGVFEVGMNHPGEIRPLVAMIRPDVAIITTIAPAHLGNFKNIKEIAAAKAEIFEGLEPGGHVVLNRDNDQFNFLDRTAQSLGIEHIHSFGQHAKAEFRLAEFNGSDENSTLWLTIGGETLEVALGAPGRHIAENALAALGVVRIVGADMQKAIEALATLRPEKGRGKRHRLVIGGGSFTLIDESYNANPASMRAAIALLAASEPTGRGRRIAVLGDMLEMGEYAQKVHTDLAVPLLAAGIEHVWLAGAEMAALKESLPESVHVEYRENTSELTDYVLNSVAPGDVLMVKSSLGIGFGKIVAALLDKFPPFADTQREF

SEQ ID NO: 16662 - protein, 591 aa, Mesorhizobium loti MAFF303099
MPAFFCYQLDAGHTVCCPSAIAVRRCLDATPTIAHGSPNSRNRAMQAAIFVLVVLVFVAVSGALVRLVRVPLPVLQIAIGAALAWPVRGIHVEIDPELFLLVFIPPLLFSDAFGAPKRELMALRGPILDLAIGLVFFTIVGFGYALHWLVPSIPLVVAFALAAVLSPTDAVAVSSIVDRNVVPARLMHILEGESLLNDASGLVMFRFAVAAALTGSFSFAAASLSFLYAVAAGIVAGVAALFVAAKALQLLNRIGGVPAEPQVLITILLPFVAYLGAENFGASGILAAVTAGLLTGSTGIFRFLGVSARMQTISLWTTFSFVFNGALFIVLGLQLPEIIRKVPPELSSRHWLLEPVLTVLLLTLCLIALRFVWIWIGDITAGFAARLGKRKAEPFGLRVRLAGSVAGVRGAITLAGILSLPLALQDGSPFPARDLVIFLAAGVIICSLLIASLALPVIARGLVEPGEDAGAAEERMARVGAAKAAIAHLESLAQTDEEEGDVPGLKLAAANGIVAAYRRRIAASDEADEARAEMREAGRLETDLRLAGIAAERDALRAMLRRGEINDHTARALFTEITLSEALLNGRQTRK

SEQ ID NO: 16663 - protein, 264 aa, Oryza sativa Indica Group
MDPMDIVGKSKEDVSLPKSTMFKIIKEMLPPDVRVARDAQDLLVECCVEFINLLSSESNEVCSREDKKTIAPEHVLRALQDLGFREYIEEVQAAYEHHKHDTLDSPKASKFTGVEMTEEQAVAEQQRMFAEARARMNNGAAKPKEPEPEAQQQTQQPPQPQLHPQPQQPLQPQLQLHPQPQQQPSQLHPQQLLHPQSQQTPQPQPQVHPQPQQPPQLQPQPQLLQQPQLPQQLQPQPQLHQQPQPQAELQSQSQPQTEHGLDSS

SEQ ID NO: 16664 - protein, 393 aa, Acinetobacter sp. ADP1
MAQRFNYRVFLTSVLMCLSPLSFAAPLIQPSSNVDEDGHELHSAEVPVESIQQFVQIYNLVKDNYVEAKSDDALFQQAIKGLVSGLDRYSRYLSPEDYKQLVQYTEGDLASVDFALVYDARIHQWVVRDLKEGADSYKLGLRNGQNVLKIDGQDLQTLNHDQVHTLLYGSIGTPIQIQTAEMPVSQTLIRNKKIEADVQPILLHNQVLVLKVKVFQQDTANEIKRLLEEYGSPRLKAVIIDLRNNPGGLLSAAVESADLFLNQGIIVSTKSRSEGNQQFQALPSSEFLRLKMGILINHRSASAAEVFTAAMKDHQRAWVIGEKSYGKGVVQKLFPLPDGSALQMTVSHYYTPDGSMIEGKGIQPNQRYPLPADMKDETYLENVADLLLKQPKS

SEQ ID NO: 16665 - protein, 177 aa, Oryza sativa; identical to SEQ ID NO: 14406

SEQ ID NO: 16666 - protein, 379 aa, Zea mays
  misc_feature (173)..(173): Xaa can be any naturally occurring amino acid
MEAGGAGSGLNGAVQAKGTGADDGSAKRLPPCCVKARAAAPESEARCHATVVSGWFTEPRSRCGKASKVQYYNNPMWPGEANSLKVEKILYQGKSLYQEVLVFESSTYGKVLVLDGIVQLTDKDECAYQEMITHLPLCSIPSPKKVLVIGGGDGGVLREVSRHSSVESIDICXCKDFFPHLSVGFQDPRVQLHVGDAVEFLRNAPEGTYDAIIVDSSDPIGPAQELVEKPFFDTIARALRPGGVLCNQAESMWLHTHLIQDMLSICRETFKGSVRYAWTSVPTYPSGVIGFLLCAKEGPLVNFLTPINPIEKLEGATKAGREIRFYNSEMHRAAFVLPTFARRELEAYCVSTETEQAEETPAAPLKLTLASRSEIFATS

SEQ ID NO: 16667 - protein, 527 aa, Triticum aestivum
MAASSLWDELVVAASTGGSSGTVVSICVFTAVLCLCLVAGHLLEENKWVNESITALIIGCIVGALIFLLSKGRNSHILRFDEQLFFIYVLPPIIFNAGFQVKKKQFFHNFLTIMSFGGFGVFISVAIVSAGFYWLLPKVGFGKLDAVDYLALGVIFSSTDTVCTLQVISQDETPRLYSLVFGEGVVNDATSVVLFNAIKNMDITKIKSRAVLKVIGDFLYLFATSTILGATIGLFTAYVLKALYFGRHSTDREVALMALMAYLSYMLAELLSLSGILTVFFCGIVMSHYAWHNVTESSRITTRHIFATLSFIAETFIFLYVGMDALDMDKWKTTQASFKTSIGIFGVIISLILLGRAAFVFPLSILSNFMSGNSEKAPITFKHQVVIWWAGLMRGAVSIALAYNQFTFSGVTQDPVHATIITSTIVVVFFTTLVFGFLTRPMISAMLPQHRHREPTGGRSTGSNSPKDEFILPFLGDEDASGSGSGFVQAKRSISMMLERPIHTVHIYWRKFDDRFMRPIFGGPRSY

SEQ ID NO: 16668 - protein, 428 aa, Lolium perenne
TLISFSIKSLGALGLISRLNLGALELGDYLALGEIFSATDSVCTLQVLSQDKTPFLYSLVFGEGVANDATSVVLFNAIQNFDLGNLSTLKFFQFIGNFLYLFGASTFLGVATGLLIAYVIKKLYFGRHSTDREVAIMMLMAYLPYMLAELLDLSGILTVFFCGILMPHYTWHNVTKSSRVTTKHAFATLSFISETFLFLYVGMDALDIEKWKIVSETYSPMKSVALSSVILALVLVARAAFVFPLSYLSNLTKKTPGEKISVRQQVIIWWSGLMRGAVSIALTYNKFAKSGHTQLPSNAIMITSTIIVVLFSTIVFGLLTKPLIRLLIPTRHLTREVSALSEPSSPKSFLEHVSVDGPDADLENAVTIRRPTSLRMLLARPTRSVHHYWRKFDNAFMRPVFGGRGFVPFVPGSPTESSVPLLAPVSEN

SEQ ID NO: 16669 - protein, 471 aa, Xanthobacter autotrophicus Py2
MTIKTAKDVLDLIKSEDVKYVDLRFTDPRGKWQHVTFDISMVDDEFLTEGTAFDGSSIAGWKAINESDMLLMPDPATTCIDPFFAETTLSIVCDVLEPTTNQPYGRDPRSIARKAEAYAKSTGIGDAVYFGPEAEFFIFDDVRFKADPYNTGFKLDSVELPTNGDTEYEGGNLGHRVKTKGGYFPVPPIDSAQDMRSEMLAAMAKMGAKVEKHHHEVASAQHELGLKFGSLVTMADHLQVYKYCIHQVANIYGKTATFMPKPVFGDNGSGMHVHQSIWKDGKPLFAGDKYADLSDYCLWYIGGIIKHAKSLNAFTNPLTNSYKRLVPGYEAPVLLAYSARNRSASCRIPYTNNPKAKRVEVRFPDPGANPYLAFAALFMAGMDGILNRIDPGQAMDKDLYDLPPAELKQIPTVCGSLREALDSLAADHEYLLKGDVFQKDFIESYIELKMTEVMRFEMTPHPVEFEMYYSV

SEQ ID NO: 16670 - protein, 1198 aa, Coccidioides immitis RS
MAETESKETKGSNAPERDETPDGPKEDYQELILTGDESSRLRALDAAVRDQNDLERDIGRQADRLLTEQANERDQKRLDHTKNEKLKVEDHILRLHQRLSHPIGTAARVRINAELQNLESKISALELDIEQIQQRIYERQQGIEDTAQAFGAGRSPNETRRDYLIRTGKITPFSKLGGGHRETLTSLQDALIDAEEEKEEELALEDLGGQQAASHRHLLRPGFDYDELTDSETHEIVGPRPQKRRRLINDIPADGSDANLTRSRSRTSRLPALESDDEYIDSGPLAESTEEEWGESSDMSTTRPIKTKPAKSTKSVVEDLHGVDDGNEKVYQTRLHDWVSRRSEARNRARSGHEEDVRDPDQEDSADEWFLPHPKVPDSVLDGGYRIPGDIYPYLFDYQKTGVQWLWELYQQRVGGIIGDEMGLGKTIQVIAFLAGLHYSKKLDAPIIVVCPPTVMKQWVNEFHRWWPPLRVSILHTSGSGMINIKKESRAEDTLTSEIWDPYRPTRMSGGQKAAKRILKRVLEDGHVLVTTYAGLQTYTSLLIPVDWGCAILDEGHKIRNPDTAITIHCKELRTPHRLILSGTPMQNNLTELWSLFDFVFPMRLGTLVNFRNQFEFPIRAGGYANASNLQVQTAAKCAETLKDAISPYLLQRFKIDVAADLPKKTEQVLFCKLTKLQRAAYEAFLSSNEMSAIMRGRRDVLFGVDILRKICNHPDLPEHKTLSQKANYNYGNSAKSGKMQVVKALLELWRDTGHKTLLFAQHRIMLDILEKFIKSLTGFNYRRMDGNTPIKVRQGMVDEFNNDPDIHVFLLTTKVGGLGVNLTGADRVIIYDPDWNPSTDLQARERAWRLGQKREVTIYRLMTAGTIEEKIYHRQIFKQFLTNKILKDPKQRQTFQMSDLHDLFTLGDNGPTETSKMFQEAGVTFQENSKHEKGTKESKVEEERKEKDKISKVTGVAALEQYQSATGTPTETDGETKRTAASHSDARLMETIFARSGVHSALEHEQIFNGRKRSVKADPKIIEAEAKRVAAEAAKELLKAQEVARTVPVGTPTWTGQFGTAGRPVDPTAPRGTMPVYAGGGGSVARRTMHGPSSASIIANLTNRTTGQHSSSGRNSPARSGTSTPRGKDFMVMIRDYITAQGGAVYTQMLVDHFNRFCDSPRATAEFKEILRTIAVLEKTGRQGRGKWVLRPEYARK

SEQ ID NO: 16671 - protein, 353 aa, Nicotiana sylvestris
MEVISTNTNGSTIFKSGAIPMNGHQNGTSKHQNGHKNGTSEEQNGTISHDNGNELLGNSNCIKPGWFSEFSALWPGEAFSLKVEKLLFQGKSDYQDVMLFESATYGKVLTLDGAIQHTENGGFPYTEMIVHLPLGSIPNPKKVLIIGGGIGFTLFEMLRYPTIEKIDIVEIDDVVVDVSRKFFPYLAANFNDPRVTLVLGDGAAFVKAAQAEYYDAIIVDSSDPIGPAKDLFERPFFEAVAKALRPGGVVCTQAESIWLHMHIIKQIIANCRQVFKGSVNYAWTTVPTYPTGVIGYMLCSTEGPEIDFKNPVNPIDKETAQVKSKLAPLKFYNSDIHKAAFILPSFARSMIES

SEQ ID NO: 16672 - protein, 610 aa, Zea mays
TRPLITTYDIVRNNYKLIRGNSYNNSNDDDDEEGTLWNYVILDEGHLIKNNKTQRAQSLYEIPCAHRIVISGTPIQNNLKEMWTLFNFCCPDVLGDKQQFKIRYETAILRGNDKNATAREKHVGSNVAKELRERIKPYFLRRLKSEVVFDTGASEEKTLAKKNELIVWLKLTPCQRKLYEAFLNSELVHLALQPKASPLAAITILKKICDHPLLLTKKGAEGVLEGMGEMLNDQDIGMVEKMAMNLADMAHDDNALEVGQDVSCKLSFIMSLLRNLVGEGHHVLIFSQTRKMLNLIQEAIILEGYAFLRIDGTTKVSDRERIVKDFQEGCGAPVFLLTTQVGGLGLTLTKATRVIVVDPAWNPSTDNQSVDRAYRIGQTKNVIVYRLMTSATIEEKIYKLQVLKGALFRTATEQKEQTRYFSKSEIQELFSLPQQGFDVSLTHKQLQEEHGQQVVLDESLRKHIQFLEQQGIAGVSHHSLLFSKTATLPTLSENDALDSKPRGMPMMPQQYYKGSSSDYVANGASFALKPKDESFTVRNYIPSNRSAESPEEIKARINRLSQTLSNAVLLSKLPDGGEKIRRQINELDEKLTSAEKGLKEGGTEVISLDD

SEQ ID NO: 16673 - protein, 1254 aa, Chlamydomonas reinhardtii
MAPSSALPAEPPGLPAAPAMAMAMPLLPGPLPYPPPPAASGDRATASDSAVSLVESPAPIALEILPNPTPPPPDTSLVAGHDLWDVGRRWGKAVQGVSKPIESWVGLRPRPLAQQVRRERQRQRCRLRPVFARNANHRAALRVRAAKDDKDDMVSGVFKTASGLVDKAADLVPDSVPRSTAKAGVTVAGVMFTFWVLNKVISGVVTLAVLAGIGYYFLTQQGKDDDDAIDVTPKAGGGKAGGGKAGGGKGSDLDDPLAEARKIMDKYKCSAGTSDATRKAAAKQLSEIARSHPDQLLSTVQKVHAYLYHKSWETRVAAGEALGYLADIFVQQTPDELRQQALACGVDEASLPPCEGPLTFSGFSLQQVLEKGTPLGASGGQEFDLVLDPGMTPKARLAAQRDVLKRRLGLDRDMGLDADAFAAAAAAAAAEIGEDEHAWMWHMRVRAQTGWPVKAPIPTSIRTTAVLLLRAVQAVADGGWPFQRLGDQLVVDSLDPVWEVRHGAALALRELLRSHAWCAAVEVPLDEASAAWARFGDYGSDQVTAPVRETAAQALGMALQALDGDSVAGVACMLRELQAHGDWRVRYGGFCGLKYLLAARLDLAPALLPAALPLLRAGLADPDDDVRAACADALVPVAGSLGVAGPQAVSELRRQLWDLLPQLSDLSAATNSVMSLLAHLTVRGSVMQCLERMLAAAEQLRALIQLATTQVSRPLDPQIYLVPSPEEPARLALEQYLHVCVLAALAAASAASGRLPDKFNSAIQPLMNSLRREPQLRLQEVCAGGLAELLGLCAGRTPSPNDKLVRNIVAMATAELLPPPGLLQPGLLQPGLQGQGSGVLLPSGGSLSLLGQQQGESGWQWYRGRGARPRQGRAFTIELVVVPLLNSSDDTCRLGGVEAVAALCGELGSGLVPYAVLLLVPLLRRMSDPAADVRAAAAGCFGSLMTLLPLAQGVPPPPGLDGEQLACVSQDSAFLLQLLDNRRVDAYALPFPLPPRLPYNLLVMSYEALRADVELLLSGTPIQNDEARGSKRGSREAEAGLLALEGLHRSLLPFVLRRTKGQASAEAVESLRSGMVLDLQLPAHRTAANAVLRTTEPTAVEAALRRGGLRHAPKLAALRDILATCGHKALLDLVERDLLAPYGVSYLRLDGGVEAGARFAVVQRFNADPTIDVLLLTTGVGGVGLNLTAADTVVFLEHDWNPMKDMQAMDRAHRLGQRRTVNVYRILTRGTLEERVLGLQQFKKDVAEAGARQR

SEQ ID NO: 16674 - protein, 319 aa, Nicotiana sylvestris
MEVISTNTNGSTIFKNGAIPMNGYQNGTSKHQNGHQNGTSEHRNGHQNGISEHQNGHQNGTSEHQNGHQNGTISHDNGNELQLLGSSNSIKPGWFSEFSALWPGEAFSLKVEKLLFQGKSDYQDVMLFESATYGKVLTLDGAIQHTENGGFPYTEMIVHLPLGSIPNPKKVLIIGGGIGFTLFEMLRYPTIEKIDIVEIDDVVVDVSRKFFPYLAANFSDPRVTLVLGDGAAFVKAAQAGYYDAIIVDSSDPIGPAKDLFERPFFEAVAKALRPGGVVCTQAESIWLHMHIIKQIIANCRQVFKGSVNYAWTTVPTYPT

SEQ ID NO: 16675 - protein, 174 aa, Arabidopsis thaliana
MASSMLSSAAVVTSPAQATMVAPFTGLKSSAAFPVTRKTNKDITSIASNGGRVSCMKVWPPIGKKKFETLSYLPDLSDVELAKEVDYLLRNKWIPCVEFELEHGNTPGYYDGRYWTMWKLPLFGCTDSAQVLKEVEECKKEYPGAFIRIIGFDNTRQVQCISFIAYKPPSFTEA

SEQ ID NO: 16676 - protein, 430 aa, Nicotiana sylvestris
MEVISTNTNGSTIFKNGAIPMNGHQSGTSKHLNGYQNGTSKHQNGHHNGTSEHRNGHQNGISEHQNGHQNGTSEHRNGHQNGTSEHRNGHQNGISEHQNGHQNGTSEHQNGHQNGTSEQQNGTISHDNGNELLGNSNSIKLGWFSEFSALWPGEAFSLKVEKLLFQGKSDYQDVMLFESATYGKVLTLDGAIQHTENGGFPYTEMIVHLPLGSIPNPKKVLIIGGGIGFTLFEMLRYPTIEKIDIVEIDDVVVDVSRKFFPYLAANFNDPRVTLVLGDGAAFVKAAQAGYYDAIIVDSSDPIGPAKDLFERPFFEAVAKALRPGGVVCTQAESIWLHMHIIKQIIANCRQVFKGSVNYAWTTVPTYPTGVIGYMLCSTEGPEVDFKNPINPIDKETTQVKSKLAPLKFYNSDIHKAAFILPSFARSMIES

SEQ ID NO: 16677 - protein, 389 aa, Shewanella sp. ANA-3
MTSYQILCILCALALVTSVASSRLHKLQETVAITALALGMSLLLLLGGKALGGHVYGYFVAGLEKLDFQALLLNGMLGFLLFAGALQIRLKILRHQKWEILILAFVSTLLSTFIVGGLLYYIAPMLGLPLALSHCLLFGALISPTDPIAVLAILKKMGAPEDIAIQVEGESLFNDGIGLVIFVAISHLAFSTEPLTFSQISLLFVQEALGGVVYGAVLGVLLHHFFRYCEEETQLMLVTLLIPTAGYVIAEVLGVSGPLAMVSAGMIIGNYSVPKYFVRHERVKLYTFWSLIESFFNALLFLLLGLLLLLVTFKAPLWWFMLVAIPLVLTARAVSVFLPYIGFRMVKSYNPYAESILIWGGLRGGAGLGHGDEFTRGRDCRFTKRCRAA

SEQ ID NO: 16678 - protein, 152 aa, Oryza sativa Japonica Group
WGGEGAGQVLPIANISRIMKKAIPANGKIAKDAKETVQECVSEFISFITSEASDKCQREKRKTINGDDLLWAMATLGFEDYIEPLKVYLQKYREMEGDSKLTAKAGDGSVKKDVLGSHGGSSSSAQGMGQQAAYNQGMGYMQPQYHNGDVSN

SEQ ID NO: 16679 - protein, 459 aa, Synechococcus sp. PCC 7335
MAYPDIHPLSANLQALQETLQDQGVKYAMASFVDIHGMCKGKVVPIGHFDRMMQGSELFTGAALDGVPQEINDDEVGTLPDPQSATVLPWNSEVVWFASDLHLVGKPFEACCRTILKNTLKQAEAMGYRFDLGIETEFFIFKETEGKRFGREFAPVSDRDTLPKAAYALPTLLDNYKVLDRIVSAMNQLGWDVYSFDHEDAQGQFETDFTYCDALKMADRLTFFRFMVKELAREEGYFASFMPKPFADQTGSGAHYNMSLANIETGENLFEDGDDPCGLSKLGYQFIAGVLRHAKAIVAVTCPTVNSYKRLVRKGSMSGFTWAPVYVCYGNNNRTNMLRIPLGGGRVECRAADISTNLYLGAAMILAAGLEGIREGLDPGKLHTENMYEYSLTQLRKMGIETLPKTLGEAIAAFADDPLSEKVMGSLMYQTYIDFKTQEWEEYHCHISDWEIQRYLKFF

SEQ ID NO: 16680 - protein, 341 aa, Physcomitrella patens subsp. patens
MALGRGDDEQAAPESGRNAAELIAQDNAAPAPSTARANLSSIMPGWFSEISPMWPGEAHSLKVEKFLFEGKSDYQDVVVFESATYGRVLVLDGVIQLTQRDECAYQEMITHLPLCSIPNPKKVLVVGGGDGGVLREIARHKSVEQIDICEIDKLVVDVAKEFFPDVAVGFEDPRVNLHIGDGVAFLKAVPEGTYDAIIVDSSDPVGPAQALFERPFYKTLDRALRPGGVICTQAESLWLHMPIIKDIVGACRHTFKGSINYAWTSVPTYPSGVIGFMLCSTAGPAVNFRKPCNPIDQAVDPNHYSKRPLKFYNSAMHEAAFSLPQFAREELEHLLTPPPTS

SEQ ID NO: 16681 - protein, 870 aa, Ustilago maydis 521
MRRSVILAALGGSPSLIPADGTKDSATPLKGKSSTFSRPSPLGDYSRNANAAGFGPLLGRKPFKPPSFANQREKDNPGGGRKRKKVDYRGMDSGEGRDADANSDSDAGSGSDNDGNTKARKTVAKKKGKAAVKTLEGIYKGIDATGVSLNVDRRKWDVFEIKPNAIKKGFSVPVMTNKQGQVIETRLSYAALGTRRQIDIPPRPLHDPMGEHAIVLFDPTIDDREAERRKAEIQQEQAAEETRIEAGAAVQTPHKSLADILGLNKAKSKEIEKVPVVIDPVLSKVLRPHQVEGVKFLYRCTTGLVVEKAYGCIMADEMGLGKTLQCIALMWTLLKQSPIAHKSTIEKCIIVCPSSLVRNWANELIKWLGPAAPGNLALDGKLSKDEMIEATRRWCSASGRAISQPVMIVSYETLRNLQEELGNTEVGLLLCDEGHRLKNADSLTFQALTQIKVRRRVILSGTPIQNDLSEYFALLNFANPELLGSRTEFRKNFEIAILKGRDAEATEKQQQEANEKLSQLSALVSRFIIRRTNDLLSKYLPVKYEHVVFCKMSAFQLDLYRLFIRSPEIKKLLRGTGSQPLKAIGILKKLCNHPDLLDLPNDLEGSEEYFPEAYTPRDRRYVNPELSGKMMVLQRFLETIRATSNDKIVLISNYTQTLDVFERMCRANRWGMFRLDGTMTINKRQKLVDRFNDPEGKEFIFLLSSKAGGCGLNLIGANRLVLFDPDWNPASDQQALARVWRDGQKKSCFVYRFIATGSIEEKILQRQSHKQSLSSCVVDEAQDAARHFSGEDLRALFTFKEETACDTHDTYKCKRCKNGKQFIKAGALLYGDTSTWNHYGKNEMHHLHDDLLRAEQAYDDVSFVFQYCSH

SEQ ID NO: 16682 - protein, 184 aa, Pseudomonas aeruginosa UCBPP-PA14
MKPRVLLSALALAGLPLSGWAADCPELLQGQLTKLRSKESIDLCQRYAGKPLVVVNTASHCGFTPQFKGLEALYQRYKGQGLEVLGVPSDDFKQEAADTAETAKICYGNYGVTFAMTQPQHVRGDEAIPLFRQLAEQSGQAPRWNFYKYVVDRQGRVVAQFSSKTTPDDPQLQAAIEKAIASQP

SEQ ID NO: 16683 - protein, 195 aa, Triticum aestivum
  misc_feature (94)..(94): Xaa can be any naturally occurring amino acid
  misc_feature (125)..(125): Xaa can be any naturally occurring amino acid
  misc_feature (130)..(130): Xaa can be any naturally occurring amino acid
  misc_feature (144)..(144): Xaa can be any naturally occurring amino acid
  misc_feature (149)..(149): Xaa can be any naturally occurring amino acid
  misc_feature (161)..(161): Xaa can be any naturally occurring amino acid
EISRHSSVESIDICEIDQLVIDICKEFFPHLSVGFEDPRVQLHVGDAVEFLRNAPEGTYDAIIVDSSDPIGPAQELVEKPFFETIARALRPGGXLCNQAESMWLHTHLIQDMLSICRETFKGSVXYAWVXPTYPSGVIGSVCAXMATGXFLTPVIIESERXLTGRNRLYQNHMHVVFALQRELSHERQREYARHK

SEQ ID NO: 16684 - protein, 429 aa, Glycine max
MNNLREDFSVSSSSRCDFANHPKVKENNCKERFKKSECILAPPQKRKRCQILNEFSQEDYLSPKHPRVKALQGNLLDLARTDSESRKSSKFEEWQTPQKKFHVFWDHHENEKQAKLSEMKHHLFESEYSRLNSDYKILEVLGRGSFGKVYRCINRIDKNEYAIKETFRSFTGKNKVYGLNETQALASLTAFEDNTNVVRYFNSWIEDDRLYLVMEFCPSSLKEERKQRGKFTETAIRKALRDVCLGLAYLHRHNIAHLDIKPENILISKTMRYKIGDMGQSRVVKRAGDIEEGDSRYVAPELLNCDDCEDEVDLKKCDIFSLGMTAFELLTDHNSPANGDEWHQLRNGRLDLLEAIPGVSQRLKMLIRKMLSKNPFERPSAQELLAHDLPSEMEIELKWEKIQNRILQERKTDLENQLNKRKKRRNSVA

SEQ ID NO: 16685 - protein, 192 aa, Rhodopirellula baltica SH 1
MSRFLLLTLALGCLMNAPQPVSAADSTADHECVLAHEAKTIEGKEVDLHDYEGKVVLIVNVASKCGYTKQYAGLQSLYEAHKDDGLVILGFPCNQFGSQEPGTNADILEFCSARYNVTFPMMGKVDVNGDDASPLYKQLTSVEAKPAGKGPISWNFEKFLIGRDGQVVGRYKSKVAPSDEELVSAIKSALKG

SEQ ID NO: 16686 - protein, 159 aa, Synechococcus sp. WH 5701
MAVNVSDVVVRGATGGEQRLGDFAGQVLLIVNVASRCGFTRQYAGLQKLQDSYGPRGLQVLGFPCNDFGAQEPGTLPEIQQFCATTYGASFTLFDKVHAKGVKTAPYDLLTTVEPAGDVEWNFEKFLVGKDGTVLARYKSAVEPDGAELTAAIEAALAA

SEQ ID NO: 16687 - protein, 891 aa, delta proteobacterium MLMS-1
MVAHSRTSLSISNIHCYPGAVAGLAEPTALVTLSIKGALPKSWQKPELALRRQMGRFPLSGPVPGLEGDNWPTQLLLAPPHKGFGPWLAAVAIAIQRLACDPVGRGRVVDISARQIRVALPWQRKPLLADALNLALNWLNLWLQPGKPEQFQQAKGRFEQWLQKAQAGGLAPNTVCFALAAQQLDIPVANLGGGVIQLGWGAGQRRLQSSFTDQTGVIATRLVRHKYVANRLLADHGLPVPPAGLAANLEQAVKLAEQLGWPVVVKPVDQDQGVGVCPNIRDKERLERAFKAAAQATTKGVLIEKHLTGEDYRLLVYGDELLLATRRTPGGVVGDGKRTVAGLLERVNADPRRGTEKRSLLIALSLDEQALELLAEQGLSADSIPAAGRLVSLRRTANISTGGTAEDVTAVVHPANRALARRAARLMGLDLAGIDLLISDISRPWYEVNGAICEINAQPAFRPHWLAAGGLDINLEVVKRMVAGRTPRIPTAAITGTNGKSTVGQMLHRIWLAAGRTPGLCTTQGVWLGDDLINIKNLSGQPGGRILLSDPAVEVAIIEVARKALHLYGHPCDRYDVAALLNVRDDHIGELGIDSLDEMARLKARVLQRARRAVVVNGDDPRCLAMLESVGCDRRILVSANPQQPAVLSHLAAGGEALLRAEHHGAPWLVLQQGDRATPIMALAELNCTMDGLIAVNEENALFAAALAHAQGLAPERIASGLRLFGNNLQHNPYRYNLHETEKGRILIDYAHNPDGVGRLCEMVRRLPVRGRRLAYCGTVGNRGRRFLEECLPMLAATFEQFVLTCDHNRVTQCPDYQGDNPKEIMLGHFTAGLQKQGIAAARIQQDPDPVAAARLALAQLQPDDLLVMLADPHDVGMGDIMDTMGRVTGI

SEQ ID NO: 16688 - protein, 757 aa, Haemophilus somnus 129PT
MKIQHLIKQHQLGLLFQQGSFGLEKESQRVYQDGSVVTTEHPKCFGNRSYHPYIQTDFAESQLELITPPNKNLEDSLRWLSAIHEVVLRSLPEDEFIFPLSMPAGLPSDELIKVAQLDNPEDVAYREHLVQSYGKNKQMVSGIHYNFQLDPALIQTLFNLQQEQKSAVDFQNNLYLKMAKNFLRYQWVLLYLLSATPTVESNYFKDSSPLGKGEYVRSLRSSKYGYVNDPEVIVSFDSLEQYAESLEHWVKSGKLIAEKEFYSNVRLRGAKKARDLIQNGIKYLEFRLFDLNPFEQYGMSLADARFIHHFVLLMIWLDEMPDQQGVELGRSRLAEVALENPLAQTAYREEGEWLLNQLISMLQSIGADQSAVSFVREKLAQFADPGLTLCGRLVQEIEQKGGYQKLGAELAKQYKENAFERFYALTAFDNMELSTQALMFDLIQQGISFEILDERDQFLRLQFGEHVEYVKNGNMTSRDSYISPLIMENKVVTKKVLENAGFNVPQSQEFTSVKQAIAGYSLFEKRAVVIKPKSTNYGLGITIFQQGVNNREDFAKAVEIAFREDKEIMVEDYLVGTEYRFFVLGEETLAVLLRVPANVVGDGIHTVAELVAQKNTHPLRGDGSRTPLKKIALGDIEQLQLKEQGLTVESIPAKDQIVQLRANSNISTGGDSIDITDEMHLSYKQLAVGIAKAMGAAVCGVDLIISDLKEPAQPDLSSWGVIEANFNPMMMMHIFPYAGQSRRLTRNVINMLFPEVK

SEQ ID NO: 16689 - protein, 141 aa, Oryza sativa Japonica Group; identical to SEQ ID NO: 13430

SEQ ID NO: 16690 - protein, 1059 aa, Candida albicans
MLYRVSGFYKRHTRNFTNIDYGYYIRNFIHHIASKIYPYAKVVLPNFRAAHYFYILTLVILGSILVYPVKTCAYIDVLFFTAGASTQAGLNTVNVNDLSLYQQIVLYLLATLATPIFIHGSLLFVRLYYFERHFDNIKERSLMDYRMRKSATLARLGSAPTMSSTRLNTFNNQVLGFQEREAEKGSSSSPQSSSSQTSQPVSTAYNDQGGNDIEHHSEPSDSDDDESGNGPVTFQEKIHFEEPQRPRSQRRHSRTDSGIKFSALPHPRRRKSIDPEDMYRSINMLQEHKKNQEAKSKGIQFLNIGSPVRRKSRSSNIEAFPEEDTNPSRDDEITPATNSVGTGNNDEDEDDILIIKPPIEIENSDGANPIFTKKKKLASQIQFKETPGKAKKWITTKKRKHYNPWTSKLKKTLSNSSKKGSLSVVPTDTEDDSEDEEYASIDSETSDISDNEHAADNAEGSDVDSVGSYEEDEDEDEHNSDDDDDDDDGEGERRLGNGASLTKAQSHLVLPSKDETGGKKYTKRSNTLDTPQQNTSDGRKIRKKAPKRKTPRTQRNASFNQHSNVSIGDGSIENVDTNDSYQRLSRTMSGNYLSWTPTVGRNSTFIKLTDEQKEELGGIEYRAVKLLIKIIVVYYVGFNIIPGVMLSIWIYCMPHYKNLMISSSISPAWWAFFTSQSSFNDLGLTLTSNSMMSFNQNAFVQILCSFLIVIGNTGFPILLRFIIWVMFKTARPLSLYKESLGFLLDHPRRCFTLLFPSVPTWWLFFILVVLNGFDLVIFCILDLHDDTFKGVDMGYRVLNGLFQAFCTRTVGFSVMDLSQLHAATQVSYLIMMYISVLPIAISVRRTNVYEEQSLGVYAKENAEGVDESAPSNYVGSHLRNQLSYDLWYICLGLFIICIAEGKRLKEQDLRFSIFAVLFEIVSAYGTVGMSMGYPGVDCSLSGEFNVISKLVIIAMMIRGRHRGLPYTIDRAIMLPNAAMKRHDRLQEEHAINRHNTMERTTTLGRVATFGNGPIDGGNNLLTRAITNIEHRLRNRRDGRSESSTVSEDPRYVVRTVSEV

SEQ ID NO: 16691 - protein, 182 aa, Triticum aestivum
MSDEAASPPGGGGGGGGGGSDDGGGGGGFGGVREQDRFLPIANISRIMKKAIPANGKIAKDAKETVQECVSEFISFITSEASDKCQREKRKTINGDDLLWAMATLGFEEYIEPLKVYLQKYRETEGDSKLAGKSGDVSVKKDALGPHGGASGTSAQGMGQQVAYNPGMVYMQPQYHNGDISN

SEQ ID NO: 16692 - protein, 457 aa, Triticum aestivum
MAASSLWDELVVAASTGGSSGTVVSICVFTAVLCLCLVAGHLLEENKWVNESITALIIGCIVGALIFLLSKGRNSHILRFDEQLFFIYVLPPIIFNAGFQVKKKQFFHNFLTIMSFGGFGVFISVAIVSAGFYWLLPKVGFGKLDAVDYLALGVIFSSTDTVCTLQVISQDETPRLYSLVFGEGVVNDATSVVLFNAIKNMDITKIKSRAVLKVIGDFLYLFATSTILGATIGLFTAYVLKALYFGRHSTDREVALMALMAYLSYMLAELLSLSGILTVFFCGIVMSHYAWHNVTESSRITTRHIFATLSFIAETFIFLYVGMDALDMDKWKTTQASFKTSIGIFGVIISLILLGRAAFVFPLSILSNFMSGNSEKAPITFKHQVVIWWAGLMRGAVSIALAYNQFTFSGVTQDPVHATIITSTIVVVFFTTLVVPLTGSRIFRYMMFYRRKTYTAH

SEQ ID NO: 16693 - protein, 647 aa, Polaromonas sp. JS666
MGRIIGIDLGTTNSCVSIMEGNTPRVIENSEGARTTPSIVAYQEDGEVLVGASAKRQAVTNAKNTLYAIKRLIGRKFTEKEVQKDINLMPYKIAAADNGDAWVEVRGKQISAQQVSADILRKMKKTAEDYLGEPVTEAVITVPAYFNDAQRQATKDAGRIAGLEVKRIINEPTAAALAFGLDKQEKGDRKIAVYDLGGGTFDISIIEIADVDGEKQFEVLSTNGDTFLGGEDFDQRIIDYIIAEFKKEQGVDLSKDVLALQRLKEAAEKAKIELSNSAQTDINLPYITADASGPKHLNIKLSRAKLEALVEELLERTLAPCRTAIKDAGVSVGDIHDVILVGGQTRMPKVQEMVKALFGKEPRKDVNPDEAVAVGAAIQGQVLSGDRTDVLLLDVTPLSLGIETMGGVMTKMIKKNTTIPTKFAQTFSTAEDNQPAVTIKVFQGEREIASGNKALGEFNLEGIPPAARGTPQIEVSFDIDANGILHVGAKDKGTGKENKITIKANSGLSEAEIQQMVKDAELHSADDKKKVEFVQAKNNAEAMVHSVRKSLGEYGDKLEVGEKEKIETAIKDMEEALKGDDKDAIEAKNTALMEASQKLGEKMYADMQSSQAAGAEAAAGGAGAEQAHAKPADDNVVDAEVKEVKKG

SEQ ID NO: 16694 - protein, 183 aa, Pseudomonas syringae pv. phaseolicola 1448A
MNIRFVSIPLLLLAMSGAAMAADCPPLLQGELPKLRAKENIDLCKRFAGKPLVVVNTASFCGFAPQFKGLEELSQRYKGQGLEVLGVPSNDFKQEAKDGEETAKVCYVNYGVTFTMTEPQAVRGDDATHLFKVLAEQSSAPRWNFYKYVVDRQGKVIANFSSMTKPDDPELIAAIEKAIASKP

SEQ ID NO: 16695 - protein, 527 aa, Triticum aestivum
MAASSLWDELVVAASTGGSSGTVVSICVFTAVLCLCLVAGHLLEENKWVNESITALIIGCIVGALIFLLSKGRNSHILRFDEQLFFIYVLPPIIFNAGFQVKKKQFFHNFLTIMSFGVFGVFISVAIVSAGFYWLLPKVGFGKLDAVDYLALGVIFSSTDTVCTLQVISQDETPRLYSLVFGEGVVNDATSVVLFNAIKNMDITKIKSGAVLKVIGDFLYLFATSTILGATIGLFTAYVLKALYFGRHSTDREVALMALMAYLSYMLAELLSLSGILTVFFCGIVMSHYAWHNVTESSRITTRHIFATLSFIAETFIFLYVGMDALDMDKWKTTQASFKTSIGIFGVIISLILLGRAAFVFPLSILSNFMSGNSEKAPITFKHQVVIWWAGLMRGAVSIALAYNQFTFSGVTQDPVHATIITSTIVVVFFTTLVFGFLTRPMISAMLPQHRHREPAGGRSTGSNSPKDEFILPFLGDEDASGSGSGFVQAKRSISMMLERPIHTVHIYWRKFDDRFMRPIFGGPRSY

SEQ ID NO: 16696 - protein, 1245 aa, Physcomitrella patens subsp. patens
SLVTERLRQRTNRKPIYVEEEEGMEGDEWEEEADEFEEEEDEEKEVLKMEQSEDFCSICHLGGDLLCCDTCTAVFHLGCLDPPMKVVPRGKWSCPKCVNPLGDVEKFIDTQMRPMKVPGRIAHNAEEKVSEDQPPKLVKQYLVKWKSRSYLHCSWVTAEDLERGMKTFAGLRMKLNHFHKMLDGSKNWNTPDEDRMPIRPEWTTVDRVLDMRHNGDITEYLVKWKELGYDEATWEVEEDVLAFQAEVDKFKEIMSRQALKKRKGSALDNKDLKRRRKDFKPFKKTPKFLVGGSLHPYQLEGLNFLRFAWEQNKHVILADEMGLGKTIQSISLLGSLIEENVGLPHLVVAPLSTLRNWEREFATWCPQMNVVMYVGSSQARAILRQYEFFFPQKSSKKSKDKGKKKMAGESKQDRVKFDVLLTSYEMINLDTTILKALKWECLIVDEGHRLKNKDSKLFQTLTTFSTRHRVLLTGTPLQNNLDELFMLMHFLDAGKFNSLEEFQQEFQDINQEEQVGRLHKMLAPHLLRRVKKDVLKEMPPKKELILRVELSSLQKEFYKAILTKNYQILAKQGGPQVSLTNVVMELRKLCGHPYLLEGVEPTVRNQAEANRQLLENSGKLLLLDKMMTKLHSQGHRVLIYSQFTRMLDILEDWLHLKKWGYERIDGKISGSERQIRIDRYNSPNSTKFCFLLSTRAGGLGINLATADTVIIYDSDWNPHADLQAMARAHRLGQQNKVMIFRLVTRGTIEERMMQMTKKKMVLEHLVVGRMKKENINQEELDDILRYGAMELFSEKDEDGKTRQIHYDDSAIDRLLDRAQVNDEEEKADDEEDSDLLKAFKVANFDYINEEDAAAAAAEEAEKEARAKLEAEMEGQGRAQFWDNLLKDRVVEQQVEEFEELGKGKRSRRQVPGLYSQEDDLAGMVEVNSDDGQEPEWAPTTDADSPGSFGEPGEVSGSKKLPSSRKRRMTGEPPPLIEGEGRELRILGFNHRQRSIFVNVLMRFGLGDFSWSEFIPRLKPKTPEEIKDYGTLFLSHIAEDINDSPFFSDGVPKEGLRIQDVLVRLAILHLIRDKVKALSEDPSIPLFSPGSHIYRYYSLRNTKVWKEEHDRKLLYAICSHGYGRWLSIVEDPQLGLGPVIRGELLLRGVNDIAGPSKNGNARSTPVPAEDEGPSGLPAEADREEREAYLQKRMVDFVKRRVLVLEKVLNAEYHCTVCFTVYIIHCLFNIFFMVLDDSIYALRVSCI

SEQ ID NO: 16697 - protein, 329 aa, Vitis vinifera
MGDISCSNGNEVNGKSHSLAGYRKSCWYEEEIEENLRWCFALNSILHTGATQYQDIALLDTKPFGKALVIDGKLQSAEIDEFIYHESLVHPALLHHPNPKSIFIMGGGEGSTAREILRHKTVEKVVMCDIDEEVVDFCKSYLVVNREAFCDPRLELVINDARAELESREECFDVIIGDLADPIEGGPCYQLYTKSFYESTVKPRLSPGGIFVTQAGPAGVFSHTEVFSCIHNTLRQVFKHVVAYSAHIPSFADIWGWVMASDSPFLLNAEELDLRMKQRIKGENRYIDGKTFSSASTLSKVVRTSLDNETQVYTEGTARFIYGHGTALK

SEQ ID NO: 16698 - protein, 62 aa, Nicotiana sylvestris
GVIGYMLCSTEGPEVDFKNPINPIDKETTQVKSKLAPLKFYNSDIHKAAFILPSFARSMIES

SEQ ID NO: 16699 - protein, 535 aa, Zea mays
MPPLHVPGSSTPRKFYHLVLFHVHPFWIQVLYFLLISVLGFLMLRVLPMKSSSVPRPSALDLLFTSVSATTVSSMIAVEMESFSNAQLLLMTLLMLLGGEVFTSMLGLHFTCTKLRNKRETPHNNLHGNSLEQSRRRHRPMEMEAQAAAVQMELAGFNKDGHGDFASMARLLMFIVLGYILVVHIAGYALILIYLSVVGSARAVLVRKRISLSTFSVFTVVSSFANCGFVPTNEGMVSFKSFPGMLLLVMAHILLGNTLFPIFLRLSITALERVTRWRDLCELLRDRGPGGGPAAAAAAAAIGYDHLLPGPRTWFLALTVAVFLAVQLVLYCAMEWGSGGLRGLNAFQKLVAALFMSVNSRHSGEMVVDLATVSSAVVVLYVLMMYLPPYTTFLPVAVEDDQQQQNEAQPHDNSPTKTSPSISIWHKLLMSPLACLTIFIVVICITERRQIARDPINFSVLNIVVEVISAYGNVGFSTGYSCSRQVTPGGGCCKDAWVSLSGKWSVEGKLTLMAIMFYGRLKKFSMLGGQAWRLN

SEQ ID NO: 16700 - protein, 493 aa, Bacillus anthracis str. Sterne
MVKIEIMVSLAIYMAGMLYIGYWSYKKTSDLSDYMLGGRGLGPAVTALSAGASDMSGWMLMGLPGAMYATGLSSVWIAIGLLIGAYANYLILAPRLRTYTEVANDSITIPDFLENRFKDRTKILRFVSAIVILVFFTFYASAGLVSGGRLFENSFNLDYKIGLFVTVGVVVAYTLFGGFLAVSWTDFVQGCIMFIALVLVPIVAFTDVGGVTETFNTIKQVDASHLDMFKGTTILGIISFLAWGLGYFGQPHIIVRFMAITSIKDLKTSRRIGIGWMTISIIGAMLTGLVGIAYYAKNNATLQDPEMVFVTFSNILFHPYITGFLLSAILASIMSSISSQLLVISSAVTEDFYKTFFRRKASDKELVFIGRLSVLVVAMIAVVLAYHPSDTILTLVGYAWAGFGSAFGPAILLSLYWKRTNKWGVLAGMIVGALVVITWVQIPSLKASMYEMVPGFFCSLLAVIIVSLVTKEPVKAIHREFNEMEAVLEEETK

SEQ ID NO: 16701 - protein, 155 aa, Arabidopsis thaliana
MPTLYKKAGCQFQLTTMTDEDRLLPIANVGRLMKQILPSNAKISKEAKQTVQECATEFISFVTCEASEKCHRENRKTVNGDDIWWALSTLGLDNYADAVGRHLHKYREAERERTEHNKGSNDSGNEKETNTRSDVQNQSTKFIRVVEKGSSSSAR

SEQ ID NO: 16702 - protein, 600 aa, Paracoccidioides brasiliensis
SARASMVLTEVRETAESYLGGTVNNAVVTVPAYFNGSQRQATKDAGLIAGLNVLRIINEPTAAAIAYGLDKKAEGERNVLIFDLGGGTFDVSLLTIEEGIFEVKSTAGDTHLGGEDFDNRLVNHFVNEFKRKHKKDLSSNARALRRLRTACERAKRTLSSAAQTSIEIDSLYEGIDFYTSITRARFEELCQDLFRSTMDPVERVLRDAKIDKSSVHEIVLVGGSTRIPRIQKLVSDFFNGKEPNKSINPDEAVAYGAAVQAAILSGDSTSKSTNEILLLDVAPLSVGIETAGGVMTPLIKRNTTIPTKKSETFSTFADNQPGVLIQVFEGERARTKENNLLLGKFELTGIPPAPGVPQIEVTFDVDANGIMNVSALEKGIGKTNKIVITNDKGRLSKEEIERMLAEAEKYKAEDEAEASRISAKNGLESYAYSLRNTISDSKVDEKLDASDKEKLKTEIDKTVSWLDENQTATKEEFEAQQKELESVANPIMMKFYGAGGEGGAPGAGFPGAGGPGGFPGAGAKRCSTSGGDDGPYRRGGRLNGFFLDSLGFFPFSPMAFKNGLKRGFFLSFLFFSFFFLLLPTISFCCDCGGLSMGSFL

SEQ ID NO: 16703 - protein, 453 aa, Thermoanaerobacter tengcongensis MB4
MRKFSIRIFTLLLVFFLAFTSYTYAEVSTQDQDLYNELADIGAIMKYITDNYIDNVTYEQLKEAALKGIFSSLDEYSTYFTKEEFSQFERGTSGTFSGTGMVLIEKDGKIVVDSVIEDSPAAKAGVKSGYIIKTVDGKSVEGMKLTDVVNMILGDPGTKVKITFDVGGTLKEIELVRQVIHINPVSYKLLEEGIGYIKITEFNENTTANLTKALLFMDKNNVKKLILDLRNNPGGLLTEVVSAANFFVPQGIVVTIERRNGEKEDYYSYLTKPKYKLAVLVNKGTASAAEILAGAIQDTKVGFLVGENTYGKGTVQSVVPLEDGSGFKLTIARYKLPSGRYIGKEGLTPDVYVKNVQYTADIKFGGELKIGSRGNEVKILQKYLNLLKFNAGPEDGIFGPKTANAVKELQKKAGLSPTGVFDKNTYNALLKMIDSLNNKDAVLEKALELLRNM

SEQ ID NO: 16704 - protein, 705 aa, Cytophaga hutchinsonii ATCC 33406
MIGFILSRIQLIVLLLLTFVAIPASAQTSKTEQPSCSKKTDALWVLLTKKHIAPIQFNHTVSVEIADLLLTELDYKKIHFYESDRQNLLIQIQNLKPSSAKDLCTLIAGISELYQTRIKESQAILQTLAANELNFSENEIVTFSSSKRQFMESKEKKISRWKRNIKFLVLNNLYYAVDSAHSTDVAAPSNFLADKNKITRTIIDKELKKINALADPSTDFTATVENALLNAICKRFDPHTEYYNYTAFKEFSEHLQSKVLTFGVFFGETAFGNLSIRYVAPGSTAWFSNVIQENDVVLWFKLNQQVFDVSALTHTEANALLQNEKYSLLEIGLKKDNGSSETIKLKREAIKFENNTVKSYIIKDAKKIGYISIPSFYSDDSNPNALGAANELSKEILKLKNENIEGLIIDLRNNGGGSLYEAVGMSGLFIDIGPLFYVLERSGKATLTKDMNRGTVYDGPLCIMVNGYSASASEIFSAAMQDNHRALIVGEQTYGKATGQSISQLDTTKSISTFSATDNMGATKITEIKLYRTSGFSYQGKGVTPDIILPYLDVLSEKENTEPFYLKGDSIAKKAVFAFPEALPVASLNEMNNIRIKENPQYKQLKHVSDSLHTTQDDDIIIHLTAAGFWKDMRILKAENEKESAAGSFVRPGFEVYYNRLESDFLSYDANYKKLYTGYLDELKTDLILQQTHDIMCDFIKLKQK

SEQ ID NO: 16705 - protein, 189 aa, Bradyrhizobium japonicum USDA 110
MMNRRTMLIAALAGAVAPVTRAVAGGGMSRISAYAFSFPALSGDDIRLAAFTGKPLLVVNTASLCGYTPQYAGLQELWSEFGERGLTVIGVPSNDFGGQEPGGTSEITETAHHQYGVTFPIAAKATVIGARAHPFYKWAADARPKDVPRWNFHKYLIGRDGYIAEVFASNIEPTDTRIKTAIAKTLADT

SEQ ID NO: 16706 - protein, 110 aa, Sophora tetraptera
MGRGKIEIKRIENTSNRQVTYSKRKNGILKKAKEITVLCDAQVSLIIFGSSGKMHEYISPSTTLIDILDRYHKASGKRLWDAKHENLSNEIDRVKKENDSMQIELRHLKG

SEQ ID NO: 16707 - protein, 121 aa, Triticum aestivum
IDLILLMFSPSGRPTICVGDKSPIDEVIAKYAQQTPQERAKRKLESLEALKKTFKKLDHDVNIQDFLGSGGQTVEELSSHPGALQCQMADVQKRLNYWSDPEKVGNIDHIRAMEQSLKESS

SEQ ID NO: 16708 - protein, 220 aa, Populus trichocarpa x Populus deltoides
MKGCELCGGSARMFCESDQASLCWDCDEKVHSANFLVAKHCRTLLCQVCQSPTPWKSSGSKLAPIVSVCESCFAVHKNKKKQLQDLNVMASDQESREAGNDYDESENDREFDDDDTDDDSDEYDEEEDEEEDGDNQVVPWSGLTASSSPSIAPPVASSSSSEEEISCAGGNGFLKRMRDSNVDLDSDVSLFFLFFHFFAIFFILFFRGHILIIEFVDLRK

SEQ ID NO: 16709 - protein, 1059 aa, Microcoleus chthonoplastes PCC 7420
MAILHGSWITGESDNYLFIWGEQWRPLASVDSAAKTGIMPHPFAMTQAELSEFLGDRGLTLPDSGTGKTKGNSESAIASWQSQVFVLPTHPAEAKTPAYPILSAKLLTDETDSSSLELHQWQVSGYRLTPSTALPFLQSLPLGGFNVADNYVGSDLRFWTHVYRWSLDLLTRCKFLPGLYRQPKGKAIAYWQPLLDSATDQTRLAEFTQSMPLACQAYDGNVETRHGASLQSQHPQSTILNFLRHTIDTQVQNWVESLSPPTATSPIPEWLQALCSANENLDVEPMAIARLDTALSNWTTSIQQHLVTPTTQGLTQNLFRTCLVLQPPEPDEANWRLDFCLQAMDDPDLLIDAKTIWRQPVEQLDYHGRTIKQPQETLLKGLGLASRLYPPLEASLHERCPRFCELNPVQVYEFIKASAWRLQDSGLGIILPPGLAPGSGEKRLGISITAEAPKSKKDERLGLQSLLKFKWDLAIGDTKLSKSEFQRLMSLKSPLVEVNGEWIALQPADARAAQTIMKASKEDMSLSVEDALRLATGDTKTLGKLPVVHFEASGALQELITNLTGNRTIEPIDVPQDFNGTLRPYQLRGASWLAFLERWGLGACLADDMGLGKTIQFIAFLLYLKEQDVLESPTLLVCPTSVLGNWEREVKKFAPTLKAIVHHGDKRSKGKTFAKTVKTKDLVITSYPLVYRDAATLESVSWQGVVLDEAQNIKNPGAKQSQAVRKLPTEFRIALTGTPVENRLSELWSILDFLNPAYLGDRQFFQRRFAMPIEKFGDRDSLQTLRSLVQPFILRRLKTDKTIIQDLPEKQEMTVFCGLAAEQAALYQKLVDESLVEIEAAEGIKRKGLILTLLMRLKQVCNHPAQLLKEKSLKDAKRSGKLLRLQEMLDEAISEGDRALIFTQFAEWGKLLKPYLAKQFDQEILFLYGATRKKQREEMIDRFQNDPEGPPILILSLKAGGTGLNLTRANHVFHIDRWWNPAVENQATDRAFRIGQTRNVQVHKFVCTGTLEERINDMIESKKQLAEQTVEAGENWVTDMDTDQLRSLLLLDRTAVIDE

SEQ ID NO: 16710 - protein, 467 aa, Azotobacter vinelandii
MSKSLQLIKEHDVKWIDLRFTDTKGKQQHVTMPARDVDDDFFEYGKMFDGSSIAGWKGIEASDMILMPDDSTAVLDPFTEEPTLIIVCDIIEPSTMQGYDRDPRAIARRAEEYLKSTGIGDTAFFGPEPEFFIFDEVKYKSDISGSMFKIFSEQAAWNTDADFEGGNKGHRPGVKGGYFPVPPVDHDHEIRTAMCNALEEMGLKVEVHHHEVATAGQNEIGVSFNTLVAKADEVQTLKYCVHNVADAYGKTVTFMPKPLYGDNGSGMHVHMSIAKDGKNTFAGEGYAGLSDTALYFIGGIIKHGKALNGFTNPSTNSYKRLVPGFEAPVMLAYSARNRSASIRIPYVNSPKARRIEARFPDPSANPYLAFAALLMAGLDGIQNKIHPGDAADKNLYDLPPEEAKEIPQVCGSLKEALEELDKGRAFLTKGGVFSDDFIDAYLELKSEEEIKVRTFVHPLEYDLYYSV

SEQ ID NO: 16711 - protein, 435 aa, Rhizobium leguminosarum bv. viciae 3841
MTLDLAAFARDKGIKYFMISYTDLFGGQRAKLVPAEAIADMQKDGAGFAGFATWLDLTPAHPDLFALPDASSVIQLPWKKDVAWVAADCVMDDQPVEQAPRVVLKRLVAEAAKEGLRVKTGVEPEFFLISTDGSVISDQFDTAEKPCYDQQAVMRRYDVIAEICDYMLELGWKPYQNDHEDANGQFEMNWEYDDALQTADKHSFFKFMVKSVAEKHGLRATFMPKPFKGLTGNGCHAHISVWDIDGKVNAFADKEMPFGLSAQGKTFLGGIMKHASALAAITNPTVNSYKRINAPRTTSGATWAPNTVTWTGNNRTHMVRVPGPGRFELRLPDGAVNPYLLQAIIIAAGLDGIRSQADPGRHYDIDMYAEGYLVKDAPRLPLNLLDALRAYDADEGLKQAIGAEFSAAYLKLKHQEWNAYCSHFTQWERDSTLDI

SEQ ID NO: 16712 - protein, 479 aa, Myxococcus xanthus DK 1622
MDAKGLRTFLEIPYDELEERNLKVKEQRLKHTASEKLRDERIEYLTKERAIKAVTVCFTDLEGRLHMLDYDKKFLIKSADNLTFDGSSIRGFSAQQESDLRLNIDWSAFYWLPSDIFGPGKVLVFSEVHERDGTQYHSDLRGRLKLLTESMYQKDGTVVHAAPEIEGFLFKGRDAEHHFHEKGHFDFISTGGYYHSLPGDVLRTFIDKVAEAQRAMGFQNEKDHPEVAPSQFEINFSYSEALIAADQIQLYKLLSRQVAAQLDCTASFLPKPVTGVNGNGMHMNLSLSKGGKNLFHDQNGPDGLSPMGWDFIDRLLTSANDICLTLNSSVNAYRRLDPHFEAPNQIKASANNRGAMVRIPFGNERSARIECRSVAPDANPYLVLYTLLRTGLEGPQPQEDAEAKRSRTRFLPDNIFDAIRIFKGSQFVASILGEGVQSKFAELKTTTAERSPKQLGTRVKYSEVKFHHEVTNQFLWNQF

SEQ ID NO: 16713 - protein, 133 aa, Arabidopsis thaliana
  misc_feature (6)..(6): Xaa can be any naturally occurring amino acid
  misc_feature (14)..(14): Xaa can be any naturally occurring amino acid
  misc_feature (21)..(21): Xaa can be any naturally occurring amino acid
  misc_feature (23)..(23): Xaa can be any naturally occurring amino acid
  misc_feature (28)..(28): Xaa can be any naturally occurring amino acid
  misc_feature (30)..(30): Xaa can be any naturally occurring amino acid
  misc_feature (32)..(32): Xaa can be any naturally occurring amino acid
  misc_feature (38)..(38): Xaa can be any naturally occurring amino acid
  misc_feature (78)..(78): Xaa can be any naturally occurring amino acid
  misc_feature (97)..(97): Xaa can be any naturally occurring amino acid
  misc_feature (102)..(103): Xaa can be any naturally occurring amino acid
  misc_feature (110)..(110): Xaa can be any naturally occurring amino acid
  misc_feature (118)..(118): Xaa can be any naturally occurring amino acid
  misc_feature (120)..(120): Xaa can be any naturally occurring amino acid
  misc_feature (123)..(123): Xaa can be any naturally occurring amino acid
  misc_feature (127)..(127): Xaa can be any naturally occurring amino acid
  misc_feature (131)..(131): Xaa can be any naturally occurring amino acid
MASSMXSSATMVAXPAQGHMXVXPLKGXKXSXAFPATXKANNDITSITSNGGRVNCMQVWPPIGKKKFETLSYLPDLXDSELAKEVDYLIRNKWIPXVEFEXXHGFLYRXHGTQPGIXYXGRXLPMXELPXFG

SEQ ID NO: 16714 - protein, 775 aa, Cyanidioschyzon merolae strain 10D
MAHHRCDAAACVFNQHAQEARTHARTHARTLARMHHRRLRKQSESASLQPLDSIARNGGAANTTTAFGVVVVVCDVVPRRVKELGQVDMATRRFSYRRVSIWNWALVAVLVHVCCCLFGRAVLVGAKDASSGGGKIEGPVIGIDLGTTYSCVGVFKNGKVEIIANEQGNRITPSYVAFTDKERLIGDAAKNQLALNPERTIFDVKRLIGRRFDEETVQKDIKLLPYKVVNKDGKPYIRVEVRDGEVKTFSPEEISAMILGKMKKIAEDYLGKPVKNAVVTVPAYFNDAQRQATKDAGTIAGLTVQRIINEPTAAAIAYGLDKGGSEKNILVFDLGGGTFDVTLLTLDDGVFEVLATNGDTHLGGEDFDQRVMDYLVKQFKKKNDGLDLRTDKRAMAKLRREVEKAKRALSYQTQVRIEIESIMDGKDLIEELTRARFENLNMDLFRKTLKPVEIVLKDAKKEKKDIDEIVLVGGSTRIPKIQELITEFFDGKQPSKGINPDEAVAYGAAVQGAILSGEGGETTKDILLLDVTPLSLGIETVGGVMTKIINRGTTIPTKKSQIFTTHVDRQSSVLIQVYEGERVATKDNHLLGKFELTGIPPAPRGVPQIEVTFEIDANGILQVSAEEKTAGKREKITIRNDKGRLKDEEIQRMVREAEEYAEVDAKLKRKVDAKNNFENYIYQVRQMYEDKDKKTKLSTDDIDKLKDSVESAQDWLDEHGEASDAAAIEERMKAFQDVVQPIILKTYESAKGTGKDSSADSSADDDRDSEEHDEL

SEQ ID NO: 16715 - protein, 538 aa, Arabidopsis thaliana
MLDSLVSKLPSLSTSDHASVVALNLFVALLCACIVLGHLLEENRWMNESITALLIGLGTGVTILLISKGKSSHLLVFSEDLFFIYLLPPIIFNAGFQVKKKQFFRNFVTIMLFGAVGTIISCTIISLGVTQFFKKLDIETFDLGDYLAIGAIFAATDSVCTLQVLNQDETPLLYSLVFGEGVVNDATSVVVFNAIQSFDLTHLNHEAAFHLLGNFLYLFLLSTLLGAATGLISAYVIKKLYFGRHSTDREVALMMLMAYLSYMLAELFDLSGILTVFFCGIVMSHYTWHNVTESSRITTKHTFATLSFLAETFIFLYVGMDALDIDKWRSVSDTPGTSIAVSSILMGLVMVGRAAFVFPLSFLSNLAKKNQSEKINFNMQVVIWWSGLMRGAVSMALAYNKFTRAGHTDVRGNAIMITSTITVCLFSTVVFGMLTKPLISYLLPHQNATTSMLSDDNTPKSIHIPLLDQDSFIEPSGNHNVPRPDSIRGFLTRPTRTVHYYWRQFDDSFMRPVFGGRGFVPFVPGSPTERNPPDLSKA

SEQ ID NO: 16716 - protein, 941 aa, Magnaporthe grisea 70-15
MAPRGTAYCAPNQTKTVLGKRPSPIENHFSSDASQPKRITIDISDSSSDERADLKPTSFSKKSLQTSSNTSPKDQDTASPDEIVRGGVLEKRLSNLIYFDGSRAPALSKLVPGRTLKEYQTALLKCNENKADAANWLMDNPTPKKQRQKDVQGFIRSFAYGPSPEAPSPPGSGDSDSDCIVEVTPKPKPAQPRRRLQQGRRPQASPVSSPVKARSEEEEEPIAITDDDDTDEEGYSSSENHIDPVDKAARALKYLNECELNGLLAICGSSKAKKDAARAMIENRPFRSLAAAKKVSVTAQTKGRKSKAELQEVGEDIVYDVSKFIKSLDAIDEVVATCEEEGVRMKSITDHWCMDSRGSSRTGKQPLPIPREPKLLQGRCTMKSYQIYGLNWLNQLYQHKFGCILADDMGLGKTCQIISFIAHIVESYNPKVDEVRPWPNLIVVPPSTLDNWQVEFEKFAPGVKVTMYHGKDREWLADEIKSDPAEHHVVLTTYTQLGRTGERDHTKIISKIRPNVAIFDEGHNLKNSKTKLYKDLCRITANWRVMLTGTPVQNNLMEMINLLNFIQPELFDGRVETLKDLFDQKVTLQEVSNGAMLFSDRVRRARSILEPFILQRQKEHVLGGFPPKTSRVLYCDMDAAQLKIYNEYRDRFRTGKDGSRAAGGAAIASRTSNDQNNVWIQLRKAAIHSQLFRRHFTDKKVAEMGDMLMRKVPQSRLKQDNKQHLIAELMDLSDFELHVWCVDEPCIKKFDVEKDSWMESGKVQKLLELLRQFRKNGDRALIFTRFAKVIEILTECLSTAEVPHLTFQGSTAVDMRQDLIDEFNENKDLTAFLLTTGAGGTGINLASANKVIIFDQSDNPQDDVQAENRAHRFGQTRPVEVIRLISRDSIEELVYKACQKKLELANRVTGTELPVASEVDVEAEVRQMMLSEESKADNSDE

SEQ ID NO: 16717 - protein, 239 aa, Oryza sativa Japonica Group; identical to SEQ ID NO: 11733

SEQ ID NO: 16718 - protein, 543 aa, Vibrio fischeri ES114
MSHVENGLGIVDIIVFALYVAIIIGVGLWVSRDKKGSQKSTEDYFLAGKSLPWWAVGSSLIAANISAEQFIGMSGSGFSIGLAIASYEWMAALTLIIVGKYFLPIFIDKGIYTIPEFVEKRFNKNLKTILAVFWICLYVFVNLTSVLYLGGLALQTILGIPLMYSIIGLALFALAYSIYGGLSAVVWTDVIQVFFLILGGLLTTYMAVDFIGGTDGWFSGLSKMATAAPGHFEMILDQSNPQYMNLPGIAVLIGGLWVANLYYWGFNQYIIQRTLAAKSIAEAQKGIIFAAFLKLLVPFLVVVPGIAAYVITTSPELMSQLGSIATSNVPTLAHADKAYPWLTQFLPVGFKGIVFAALAAAIVSSLASMLNSTATIFTMDIYKEFVGKKAGDHKLVNVGRISAIVALVVACLIAPMLSNLGQAFQYIQEYTGLVSPGILAVFLLGLFWKKTNSKGAVIGVIVSIPFALFLKFMPLNMPFMDQMLYTLLFTMAVIAFTSLSYSDHDDDPKAIALDSSMFATERNFNIAAYVVVIILAVLYSVFW

SEQ ID NO: 16719 - protein, 880 aa, Schizosaccharomyces pombe
MQLSGFSTNGSGSLNTIVCEKLLFKPNFVQDSFIIGMTILCSVILYGSGNLRYIDALLLASGSCTQTGLQPVDLTQISIYQQLTILLFGVLSTPITVNLGLTLFKLYFYNKRYDMVITNNKLRMTYTYHTVRRRDTPEPSKVGNRKIRVLLDQGNQMHRPVAPETKAEEAEHQENEKHHRHHFRLRKFANAIDRPSFFRGNTMPALPSYAGVRNSQENEDRTEALSPALGKRRMASIDNGSLSVVQNNARNNPVDFYIPSSFEESSFQTIPEDFEPQVHDHENQTQLNHHLDNNSSISSHNPSLETANDGNQETVSSSNSNYSTTRVDNDPHVASYSPQNSNFDHQAAATTNDAHQNVVRGSAITIAPTPVPRHNRRPIYFADDTNGAEQEKGAHRLDGRGRKRGKSFAVTPTLHRNERSMSVLPFQLAKSFTSALPRRLTFNRTHTKASTMSLPYLSYNATVGRNSAFYALTPVEREELAGIEYESLRILTVILVVYFLFWHILGLVAFLIFIYTAKTSGRVVTDGGINRGWWAAFTSSSLFDNLGYSLNSDSLNSFQKAIFPQVLGTILIFLGNTFFPIMLRFIIWIMIRTTRFSPNFQQALYFLFEHPRRSFTLLFPSKTTWVLFLNLTLLNFASFFFFMVLDLGNSYVDKIPVGYRIMNAIFQNAATRSAGFTVVDLSQIAPAVMVTYMFMMYISAYPIAMSIRQTNVYEERSLGIYAADTENDDDNNINNNNNDNNTPKRKNFLMDHIQRQLSHDLWYLFLGYFIITIVEGRRLESEAEPQFTLFAILFEVISGYGTVGLSLGYKNDPSLTAQFRKISKLVMVALQIRGRHRGLPSALDRAVLMPSDKNFDREEEDYMRRHGKKNTNRADPVPSS

SEQ ID NO: 16720 - protein, 151 aa, Debaryomyces hansenii
MVTNINMSDYPSSSGEDLSLPKATAQKIIGEILPKDIAISKEAREAITECSIEFIMILSTQSNDIAEKEAKKTIASDHVVKALEELGFHNYLEIINRILDEHKELLKGKEKKNNKFQNSGLTEEELLKQQEELFKKSRDRLHSTSEVKNES

SEQ ID NO: 16721 - protein, 498 aa, Wolinella succinogenes DSM 1740
MLKCPHQFTFSIRQSSSHSRRKDMADQSKVKEFFRFCQENEVEFVDFRFTDIKGVWHHVSYSMASIDEESFNGLPFDGSSIPAWQPINRSDMQLIPDPVSYFLDPFTADTTVVVFCDVWDIYKNQPYEKCPRSIAKKALKYLESTGLGDVAYFGPENEFFVFDSIKIQDSINCQSYEVDVEEGTWNSNRAYENGYNLGHRPGTKGGYFPVAPVDSMVDIRAEMVKVLNQVGLETFVVHHEVAQGQGEIGVRFGDLIKAADNVQKLKYVVKMVAHMNGKTATFMPKPLYGDNGSGMHTHISIWNKGENTFAGDAYQGLSETALHFVGGVLNHAKSAAAFTNASTNSYKRLIPGFEAPSILTYSAQNRSASVRIPYVQGAKAKRVEFRFPDSSANPYLAFSALLMAGIDGIQTKANPGEPMEMDLFELSLDEIREKGIKQMPHTLRSAVENMLADKDYLKKGDVFSEDFLQTYKAYKFETEIWPWEARPHPFEFISTYSC

SEQ ID NO: 16722 - protein, 162 aa, Zea mays
MSAAEGAVVFSEEKEALVLKSWAIMKKDSANLGLRFFLKIFEIAPSARQMFPFLRDSDVPLETNPKLKTHAVSVFVMTCEAAAQLRKAGKITVRETTLKRLGGTHLKYGVADGHFEVTRFALLETIKEALPADMWGPEMRNAWGEAYDQLVAAIKQEMKPSE

SEQ ID NO: 16723 - protein, 482 aa, Actinobacillus pleuropneumoniae serovar 1 str. 4074
MKINPLEGSPTMSVKRVFDLIKDNDIKFVMLKFTDIKGKEHGVSLPVSLIGDDLEDLFEEGKMFDGSSVEGWKAINKADMLLMPIAETAVVDPFARIPTLTLRCSIYDPNTMQSYDRDPRSIAIRAENYLKSTGIADSVMFGPEPEFFLFDDVRYNIGMNNVSYKIDDIEAAWNTNRKYEDGNTGYRPLKKGGYCAVAPIDSAHDIRSEMCLILEEMGLVVEAHHHEVATAGQNEIATKFNSLTLKADETQIYKYVVQNVALEHGKTACFMPKPFAGDNGSGMHCNMSLSKDGKNVFMGDKYAGLSETALYYIGGIIKHAKALNAFTNPSTNSYKRLVPGFEAPVLLAYSASNRSASIRIPAVTSPKATRVEARFPDPLANPYLCFAALLMAGLDGVVNKIHPGDAMDKNLYDLPPEELKEIPAVATSLEEALDSLAADYEFLTQGGVFTKEFVEAYINIRRKEVERLNMTPHPVEFEMYYA

SEQ ID NO: 16724 - protein, 433 aa, Azospirillum brasilense
  misc_feature (380)..(380): Xaa can be any naturally occurring amino acid
  misc_feature (431)..(433): Xaa can be any naturally occurring amino acid
MSDISNVFDLIKEHDVKYVDFRFTDPRGKLHHTVQHVSTIDEDVFEDGIMFDGSSIAGWKAINESDMILQLDPTTAVMDPFSAQPTLNILCDVYEPSTGQPHARCPRGIAKAAEKHMASAGIGDTAYFGPEAEFFVFDDVKFKVEMNKVSYEFDSEEGPYTSDKDYEDGNLGHRPGVKGGYFPVAPVDSGSDLRAEMLSVLAEMGVPVEKHHHEVAASQHELGIKFDTLVRTGDNMQYYKYVVHNVAHAYGKTATFMPKPVFGDNGSGMHMHQSIWKEGQPLFAGNQYADLSELALYYIGGIIKHAKALNAFTNPTTNSYKRLVPGYEAPVLLAYSARNRSASCRIPYVASPKGKRVEVRFPDPSANPYLAFAALLMAGXDGIQNKIHPGEAMDKNLYDLPAEELAKVPTVCGSLREALDSLKADSAFLQXXX

SEQ ID NO: 16725 - protein, 226 aa, Schizosaccharomyces pombe
MNRIGILSRSDGSSEWKQGSARVICGVNGPIDVKIRDERLNKATVEVLVQPVSGVAETLEKMISSRIVGILEDAIFLNTYPRTLIQVSIQIIEEDGTDTLAAVINGAVLALLDAGISLKYIPCAINCHWKNKITQDEPDVDGTINKLESIITICYSISSEPAKLIFLETAGPIPEEDFFRVLETAPLHAEEVSKKMKELLFETYNESDGHENEKNPKEDVEMDVVA

SEQ ID NO: 16726 - protein, 472 aa, Haemophilus influenzae Rd KW20
MPNANAIANVFKLIEENNVKFVLLRFTDIKGKEHGVSIPVSLVDEDMFEDGKMFDGSSVEGWKTINKADMLLMPMAETAIVDPFAQIPTLSIRCSVYEPTTMQSYDRDPRSIAIRAENYMRSTGIADQAFFGPEPEFFLFDDVRFNVSMNKASFSIDDIEAAWNTNKKYEEGNNAYRPLKKGGYCAVAPIDSAHDIRSEMCLILEEMGLVIEAHHHEVATAGQNEIATKFNTLTLKADETQIYKHVVQNVALEHGKTACFMPKPITGDNGSGMHCNMSLSKDGKNIFQGDKYAGLSETALYYIGGIIKHAKALNAFTNPSTNSYKRLVPGYEAPVLLAYSASNRSASIRIPAVTNPKAIRVEARFPDPLANPYLAFAALLMAGLDGVVNKIHPGDAMDKNLYDLPPEELKDIPAVASSLEEALNSLEKDYEFLTQGGVFAKDFIDAFISIKRKEVERLNMAPHPVEFEMYYA

SEQ ID NO: 16727 - protein, 1130 aa, Physcomitrella patens subsp. patens; identical to SEQ ID NO: 9799

SEQ ID NO: 16728 - protein, 262 aa, Glycine max
PTRPPTRPVTLLEANHCPGAALIHFNLPNGQRYLHTGDFRACKLMQAYHLLVNQRVNVLYLDTTYCNPKYRFPSKEEVLNYVVKITKNHLKIHPRTLVVVGAYSIGKECVYLAISKALGVKIYANASRRRILQAFGWPDLSDKLCTNGNNTLLHVLPMSSLRVETLKDYLKTYKEQFTAILAFRPTGWTFSEKISNDLELIKPVSKGNITIYGVPYSEHSSFSELQDFVQVLRPDKIIPTVNVGNAANREKMQSYFRDWLKG

SEQ ID NO: 16729 - protein, 1364 aa, Debaryomyces hansenii CBS767
MNISSMLSNDSNTASQDVGGNFDDSQRNNDKGGSQDANSKKMGTGEAEDHANGNASVEGNGIANHGSATNGNTKGTDDSSNVNIVESIIPKPIRPTRSSIESDEEDVGKNYNSIISNDLEHISQRYLENFEDKVNAINKIDQVLIKGNNMRVLNQEEENLNILIRNSGEIAENYIDRVVTEDISSKANILNGKDSVGKEFKWGSTRDMKKRELELEVDNASKADTAAKKGGNKSKQGATKSTPAKKAKAKPKRKPLATDDTSEESQLGKKRKTRAGSVSGASQNDEKLANGKVKLKLTLKDQAEEDSASADAASKVTTKEQKIITKQYDNTFVSIWKDLSRKDGPKVSRLMQQSTQAKMINLKKTSILAAREAKRWQLKNNRNQKDLTTKARRAMREMFNFWKRNERIERELRKKHEKEILDKAKKEEEERESKRQSRKLNFLITQTELYSHFIGKKIKTDEFEGTDSDPNANFKSANHHYDKYSNIDGEGKDFNSIDFDNEDEESLNKAAAVNAQIALEAAKTKAQAFDNDPLKNPDTNGEEMNFQNPTLLGDINISQPDLLKCTLKEYQVKGLNWLANLYEQGINGILADEMGLGKTVQSISVLAYLAETHNIWGPFLVVTPASTLHNWQQEISRFVPEFKVIPYWGNAKDRKVLRKFWDRKNFRYGKDAPFHVLVTSYQLVVADAAYFQKMKWQYMILDEAQAIKSSQSSRWKSLLSFSCRNRLLLTGTPIQNSMQELWALLHFIMPSLFDSHDEFSDWFSKDIESHAQSNTELNEQQLRRLHVILKPFMLRRIKKNVQSELGDKLEIDVFCDLTHRQKKYYQMLTSQISIMDLLDSANNSSDDSAQSLMNLVMQFRKVCNHPDLFERADVKSSFAFGRFAETSSFLRETNELEMSYSTENLIKYNMPRIVYEEILQPTFDNDVGSRKKINNMFNIYHPSNIANDELENFSWLRFVDQSPQEMNNLSKQNIIERAINNREYSDINYERINRLKYTYDEDNESFLPNSKLLLINELQNNHALISNSTYLKELYSIKKKVYEDMVINNMKPAAEPLVKAPPVAVVCDNISFVHDLQDSLFDPKIRSSLMPLPFNRELELLKSSIPITEYPKSNMLPNAINKFIDYSNIRMPSMNRFITESGKLSKLDELLVDLRQNDHRVLIYFQMTKMMDLMEEYLTYRQHKYIRLDGSSKLDDRRDLVHDWQTKPEIFVFLLSTRAGGLGINLTAADTVIFYDSDWNPTIDSQAMDRAHRLGQTRQVTVYRLLTRGTIEERMRDRAKQKEQVQQVVMEGKSAIANKEESGNKKKDVAFLLLGNDDSSAAALNDDSEEKQNLQDSKKSQAKNLEDMYHEGEGEFSGNVTPSL

SEQ ID NO: 16730 - protein, 653 aa, Physcomitrella patens subsp. patens
MNEIDRAFCINTLTSWRTFCVQGKGEVNVEEVTESCEHVYEVKNDVGRACSQCGLIKVDIKDMTFMWRRPCSVRKAFVRGERLDNWNDSGDGVLEEDVRLVGMAQLEAHPSLENAMHPHQLEGFKFLSRNLVEEDSGGCMLAFAPGTGKSFLIISFIQSFMVQVPNARPMIVAPKSMLRPWMQEFKKWEVEEMLVLNLYEADDHVKMLKQWMATPSVLLVGYSQFINPSGEVGKYLTEGPGMIVMDEGHLARTEETKILKSLTRVHTRRRVLLSGTPFNNNFEEFYTTLELVRPNFMSRANAQMFPTLNTFQQIVDTKMNSKQPVLDGQLLKRSTNAGRKAFQDVIGEKFESGKYSNIAKALQQLRVLIEPFVAWHKGQILNSLPGITDLTIMLELTAQQLELVRKNKQNEVRDSLQKRAAAIYVHPILEPVADGVKRSQRDPRLKGDVDVKAGAKLRWVLDMVQQCNDAKEKLLIFSEYLYSLALIENMAVQRMKWSKGLQILRLDGSLPPQERERVQHKFNTDPEVRVLCASIKACGEGISLVGASRVILLEVLWNPSVPRQAISRAFRIGQQRKVVVYRLIAAGTYEEMNMHAAATRKEWLSRLLFDPTIPCDDPNSILWDVTKDCSDSFLAYKQSKLREGVRSIYQREF

SEQ ID NO: 16731 - protein, 538 aa, Lophopyrum elongatum
MGYQVVAAQLARLSGALGTPDHASVVSINLFVALLCACIVLGHLLEENRWLNESITALIIGLCTGVVILMTAKGKSSHVLVFSEDLFFIYLLPPIIFNAGFQVKKKQFFRNFMTITLFGAVGTMMSFFTISLAAIAIFSKMNIGTLDVSDFLAIGAIFSATDSVCTLQVLNQDETPFLYSLVFGEGVVNDATSVVLFNALQNFDPNQIDAIVILKFLGNFCYLFVSSTFLGVFTGLLSAYVIKKLYIGRHSTDREVALVMLMAYLSYMLAELLDLSGILTVFFCGIVMSHYTWHNVTESSRVTTKHAFATLSFIAETFLFLYVGMDALDIEKWKFASDSPGKSIGISSILLGLVLVGRGAFVFPLSFLSNLTKKTELEKISWRQQIVIWWAGLMRGAVSIALAYNKFTRSGHTQLHGNAIMITSTITVVLFSTMLFGILTKPLIRFLLPASSNGAASDPASPKSLHSPLLTSQLGSDLEAPLPIVRPSSLRMLITKPTHTIHYYWRKFDDALMRPMFGGRGFVPYSPGSPTDPNVLVE

SEQ ID NO: 16732 - protein, 669 aa, Arabidopsis thaliana; identical to SEQ ID NO: 11003

SEQ ID NO: 16733 - protein, 1115 aa, Ipomoea nil; identical to SEQ ID NO: 9808

SEQ ID NO: 16734 - protein, 1150 aa, Burkholderia xenovorans LB400
MSSVFFDRDRIAEWLGEHTVAKARSVGPVTHVQWHGSTLSGEVQGTQPLPYKTRVRFRTDGGSPWAQGECSCPVGRNCKHVAALLFAELDYHDEMDHVTHVRLDDEGETARGLAREPMANPGSPAGVRPELVSWLERFRARAEAADADAQKASAPRTQTLAYRLTWSRFHMRHEVVLYRARCNPDGAIVDVAEPWGNVEAALLKQPKFVSDEDLSILRGLWLGRSREDFGQFILRGTSGAEMLQKLIATGRLFVDFTPGSGHDGPIPLSRGADRAGRIEWEPLADERLRPVLRTEPRASMVLPTEPVWYVDGIANEAGIVQSSLPFQQLPDYLAMPPISLAEAPLVASVLREIAPELPLPPTHDASAIRVIDVDPVPVLTLNSHALPSAASKAGLRQAAAVELAGVSFDYDGVSINVDSSVTLVPMPGGDVIHIRRRYEAEKKRLLELRKTGLQKVPTSRVHASRLLPDTMLGLPDAEAWSAFVNDSVPELVSKGWRVTMAPEFRYNVIEIDAIEGTAHQAGDGWFDLEMGIRIGERNVRLEPLLADLFRRDRRWLSGALESIRDDEPIELKTEENKRLRLRADRLKPVVRVLVDLFDALGGSLAEGAPLRVASVDAGRLEALNGTGRWQFRGEDSIRQLAQRLQAGPGLREVPVPRGLKAELRTYQQQGLNWMQFLREQDLAGVLADDMGLGKTVQTLAHILAEKEAGRLDRPALIVVPTTLVHNWREEARRFAPELRVLVLNGPQRKERFEQIGQHELILTTYALLWRDQKVLAEHDYHLLILDEAQYVKNATTKAAQAIRGLRARHRLCLTGTPLENHLGELWSQFDFLLPGFLGSQKDFTKRWRNPIEKNGDGVRRALLARRIRPFMLRRRKDEVARELPAKTTILCSVDLEGAQRDLYETVRTAMQEKVRAAVSAQGLARSHIIVLDALLKLRQVCCDPRLVRMLKAAGDAHETHDRTDRVEKGARAMRSAKLDLLLSMLPELIEEGRRVLLFSQFTGMLSLIAEALEEAAIPYVILTGDTADRVTPVERFQQGEVPLFLISLKAGGVGLNLTAADTVIHYDPWWNPAAENQATDRAHRLGQDKPVFVYKLIAAGSIEEKIVELQEQKAGLADSILSEDAAGAAKFSDDDLDALFAPMPEIESGR

SEQ ID NO: 16735 - protein, 162 aa, Physcomitrella patens subsp. patens
DIDGNDVELSKYKGKVLLIVNVASACGLTTTNYTELAGIYSKYKNQDFEILAFPCNQFGGQEPGSNAQIKQFACTRFKAEFPIFDKVDVNGPQEAPVYKFLKSQKRGSILGDTIKWNFAKFLVDKNGNVVDRYAPTTPPSKIEVVFLSQSYYHLYVLNNEIL

SEQ ID NO: 16736 - protein, 469 aa, Arabidopsis thaliana; identical to SEQ ID NO: 12207

SEQ ID NO: 16737 - protein, 334 aa, Arabidopsis thaliana; identical to SEQ ID NO: 15774

SEQ ID NO: 16738 - protein, 640 aa, Methylobacillus flagellatus KT
MGKIIGIDLGTTNSCVAVMEGGKPRVIENAEGARTTPSVIAYQEDGEILVGAPAKRQAVTNPKNTLFAVKRLIGRRFDEKEVQKDIGLMPYTITKADNGDAWVEVRGQKLAPPQISAEVLRKMKKTAEDYLGEEVTEAVITVPAYFNDSQRQATKDAGRIAGLEVKRIINEPTAAALAFGLDKQEGDRKIAVYDLGGGTFDISIIEISEIDGEHQFEVLSTNGDTFLGGEDFDNRLIDFLADEFKKENGIDLRNDLLAKQRLKEAAEKAKIELSSSTQTEVNLPYITADASGPKHLVVKITRAKFESLVEDLIERSIKPCEVALKDAGVKVSDIQDVILVGGQTRMPKVQEKVKEFFGKEPRKDVNPDEAVAVGAAIQGGVLQGDVKDVLLLDVTPLSLGIETLGGVMTKLIQKNTTIPTKASQVFSTAEDNQSAVTIHVLQGEREMASGNKSLGQFNLTDIPPAPRGMPQIEVTFDIDANGILHVSAKDKATGKENKITIKANSGLSDEEIKRMEEEAAKYADEDKKLRELVDARNSADSAIHSVKKSLAEHGDKLDAAEKGAIEKAVQELEDVIKGDDKAAIESKTNALIEASQKLGEKVYAAGETESSAAEPGEPQEKTVDAEVVDAEFEEVKDDKK

SEQ ID NO: 16739 - protein, 271 aa, Zea mays
RVRVDFSVFLKLTPKQKDIVHKLEMHDRFKRSAVGSALYIHPCLSGLSEVNAENRAHTLRDDSVDSLMDSINVRDGVKANFFMNILSLANSAGEKVLAFSQYILPMTFFERLLVKKKGWHVGREIFMISGDTSQEDREAAVDRFNISADAKVLFGSIRACGEGISIVGASRVVILDVHLNPSVTRQAIGRAFRPGQQKKVFVYRLVAADSDEVKVHETAFKKEVIQKLWFEWSEQCTTEDFKLGQVDIDDSGDELLDTRAIRQDIKALYRR

SEQ ID NO: 16740 - protein, 518 aa, Orychophragmus violaceus
MAQASRICHGIQSPYVISNLAKSNQPKSPLSISLKSQQPRAYPISSWGLKKSGMMLNDSVIRPVTVTASVSTAEKASEIVLQPIKEISGLIKLPGSKSLSNRILLLAALSEGTTVVDNLLNSDDINYMLDALKKLGLNVERDSENNRAVVEGCGGIFPASVDSKSDIELYLGNAGTAMRPLTAAVTAAGGNASYVLDGVPRMRERPIGDLVVGLKQLGADVECTLGTNCPPVRVNANGGLPGGKVKLSGSISSQYLTALLMAAPLALGDVEIEIIDKLISVPYVEMTLKLMERFGVSAEHSESWDRFFVKGGQKYKSPGNAYVEGDASSASYFLAGAAITGETVTVEGCGTTSLQGDVKFAEVLEKMGCKVSWTENSVTVTGPSRDAFGMRHLRAVDVNMNKMPDVAMTLAVVALFADGPTTIRDVASWRVKETERMIAICTELRKLGATVEEGSDYCVITPPAKVKPAEIDTYDDHRMAMAFSLAACADVPVTIKDPGCTRKTFPDYFQVLESITKH

SEQ ID NO: 16741 - protein, 555 aa, Atriplex dimorphostegia
MWSQLSSLLSEKMDALATSDHASVVSMNLFVALLCGCIVIGHLLEENRWMNESITALLIGLSTGVVILLISGGKSSHLLVFSEDLFFIYLLPPIIFNAGFQVKKKQFFRNFITIVLFGAVGTLVSFTIISLGALSIFKKLDIGTLELADYLAIGAIFAATDSVCTLQVLNQDETPLLYSLVFGEGVANDATSVVLFNAIQSFDLTRIDHRIALQFMGNFSYLFIASTILGAFTGLLSAYVIKKLYFGRHSTDREVALMMLMAYLSYMLAELFYLSGILTVFFCGIVMSHYTWHNVTESSRVTTKHAFATLSFVAEVFLFLYVGMDALDIEKWRFVSDSPGISVAVSSILLGLVMVGRAAFVFPLSWLMNLAKKSHGEKVTFNQQIVIWWAGLMRGAVSMALAYNQFTRSGHTQLRGNAIMITSTISVVLFSTMVFGLLTKPLIMFLLPHPKHFTSCSTVSDVGSPKSYSLPLLEGNQDYEVDVGNGNHEETTEQRTIVRPSSLRMLLNAPTHTVHHYWRKFDDSFMRPVFGGRGFVPFVPGSPTEQSTNNLVDGT

SEQ ID NO: 16742 - protein, 223 aa, Brassica napus
  misc_feature (154)..(154): Xaa can be any naturally occurring amino acid
MADSQAKSSGMSPGVGGGGSHESGGDQSPRSMNVREQDRFLPIANISRIMKRGLPANGKIAKDAKETMQECVSEFISFVTSEASDKCQREKRKTINGDDLLWAMTTLGFEEYVEPLKFYLTRYREMEGDNKGSGKGGESSAKRDGQPGQLSAAXQQGSFSQGPYGNAPGSHMMVPDAERRVVVEQYSSQSTERFIYSCSCFLRNLSDPLFIFLNWGYLWFMMG

SEQ ID NO: 16743 - protein, 507 aa, Porphyromonas gingivalis W83
MKEALRKLETAVYAISSLYVDSVDNNKLTEYAIRGVLSELDPHSVYSDAEETKSELEPLNAGFDGIGVQFNMLTDTVYVVQVIAGGPSEKAGLLAGDRIVSVDDTVIAGIKMKTNDVMKRLRGPRGSKVKLGVWRGNDRLNITVKRGLVPVHSREACYMVDERTGYIRLSRFSRTTYDEFAEGIALLRGRGMQQLVLDLRFNGGGILDQAVEMAGTFLPEGSTVLTVRNNRMPRISERMEATSNNLLPKDLPLVVLVNEFSASASEILAGAIQDWDRGVVIGRRTFGKGLVQRPLPFQDGSMIRLTIARYYTPSGRSIQKPYAKGNFKAYEQELIGRFKHGESIHSDSIRFPDSLRYKTLVTGRTVYGGGGIMPDLFIPTDTALFNKLHRELLNKGIFNRAVLKYVDAHRQKLRQRFPDRQSYATFSIPEELTESLKAFAEAEKITWSTELFAQAEELIKCQLHAYIARDILGENDFFYFFNRMDKEYIKALDLLNDPDEYKRLLGK

SEQ ID NO: 16744 - protein, 170 aa, Prochlorococcus marinus subsp. pastoris str. CCMP1986
MLSSIDKFLKLMVVDVQNTTVVSANGEAKKLGQYSGNVILIVNVASYCGNTAQYKDLQKLHDKYSKKGLRILAFPCNDFGNQEPDSLTEIKNFCSTKYGVEFEIMEKVHAKGNTSEPYTTLNNVEPKGDVEWNFEKFLIGKDSNVIARFKPGIQPFDENLIAAIEVAIDS

SEQ ID NO: 16745 - protein, 340 aa, Legionella pneumophila str. Paris
MPVIPVEEFDGFILKLGKNNYHFCKNETPFNNSCSANIAIDKYCTSKLLEKAGIPVPKAISLNCSEFQRNLHKDKIAQLNFPLVIKPIDGSLGIGVLCNIKTWEELESHLTKYFSSYQCLIIEEFHGKLNSYRVLVFNNRILGIVQRYPAAVTGDRVHPIHELIKQENLNRKRINEALGEITLDEEARIKLQELGITENYIPSFGEQIVLCYTSNATRGGSYVTINKKMCKQNRKLLLQAAKILDLQLVGIDVECSDIINVPIEQSKGVILEVNHKPSIRIHEFPMKGTPQKVTKKIMRSFITRHPLSYLYSIYNNQPTAFYVRSSILIIIMGLILLAVW

SEQ ID NO: 16746 - protein, 454 aa, Rhizobium leguminosarum bv. viciae 3841
MSSYTIDDLRKDVAEGRIDTVLACQVDMQGRLMGKRFQAEYFVESAWKETHSCNYLIATDMEMETVSGYKATSWEKGYGDYTMKPDLATLRRIPWLEGTALVLCDMLDHHTHEEVAHSPRAILKKQVKRLEDMGMKAYMASELEFFLFDQTYETAQASGYRNLKLASAYNEDYHIFQTTKEEEVMRAIRTGLQGAGIPVENSKGEASAGQEEINVRYADALAMADRHAIIKNGCKEIAWSKGKAITFLAKWNYNAAGSSSHIHQSLWSLEEKPLFFDHTGKYGMSPLMHNYVAGLLAHASEITYFLAPYINSYKRFMAGTFAPTKAIWSKDNRTAGYRLCGEETKGIRIECRVGGSDLNPYLAFAALLAAGIDGIENKLELEAPFVGDAYGGKGVREIPRTLRAATAAMTESAMLRKAFGDDVIDHYTRAGEWEQEEYDRRITDWEVARGFERA

SEQ ID NO: 16747 - protein, 554 aa, Yarrowia lipolytica CLIB122
MAPSQGDKKMFISAETGESLTTAQQWATVELFASKLYQLGIGHSLRPNSDAHLGDVVLLYVKNSIYIPAAHWALLDLGATVAPAAAVYKARDLVHQIELVKPKLIVCDADLKSEAVEALKILSKKMPIVTMEELRQPVKKLKQRQRFRLSRPEAAKRVAALVMSSGTSGGLPKAVRVTHHVVTSNAQCSAIVAPDLFDDPTNVISAVLPMSHIYGYFKFLFACFYTGETCVVHQSFDLKAVLDAQQKYGITSFFMVPPIIIALAKSPIVDEYIPSLQKLRFITSGAAPLGGNVIEDVKRRLGSHIAVTQMYGMTESILSTCFNPSDADVASRSVGKLCGNIEARIVGHDGVDQPAYNETDPDKIDAAFKRGDALPSGELWLRGPAIMAGYHGNCLANEESFVDASDAATVPHYHRKWLRTGDVAVIDVKGRIVIVDRTKEMIKSMGRAVAPAEIEALLLSHPQVMDCAVIGVHVPEKGTEAARAFLVLRDAQASVARDVAAWLNDQVPSYKRLHGGVVVFRGEVIPKNASGKILRRLLRQRKGDEVVFPERAKL

SEQ ID NO: 16748 - protein, 4247 aa, Oryza sativa Japonica Group
MASSQQVELEAAKLLQKLIQESKDEPAKLATKLYVICQHMKLSGKEQSLPYQVISRAMETVVSQHGIDMDALRSSRIPLAGGPQAGDSSGAMPKDKEIIGSQPPMVGTDASQSSAHAGLWNFPSGSADMARHSASISGRVPAGPNRSDVAGADIHQGSMSQKSGRSSGMESPASLQIEDTRSMNSHDSLKSDEKTSKKSSSKRKRVDPKAAGDLHSEDNSKSDAMSTGQNIRKGKQPGKAGTQGQLSRTVEHDPSHTLQVGNAQVPPLPSGAPFFRAHQEGPSASSARTIDKTKPSNPFTMAQISNFAEGLASGNIPAELQKSILGGANLLNASFGWNQNAQGPVMKNTQGSVPNLMRPGVNVEGKVNLGSQGTFNSMSASQMDYPTVPPYVSSSFGGGPQYLDKGKDLTSGNTGSELNSSKAGAQLGIMHMHFDTQMRYNFQGSPMQERHGIVRAPQRAGSSQMSQTSPSIPFKEQQLKQLRAQCLVFLAFRNNLQPRKVHLEIALGVGPPASEGGSAGQRGSESRMADGSGKENGNSQENPAIFGRQSDISRLQSTSTGSVADVDSASKDPEIVKKKIKIAEHEKSFEAENIQQTVPIQGTDSEMHSQETISPMPSGQLHYFQGDTRKTTPEIYKADAENLNRNLGWVGGQGPSPLGGNRHTSMEVGLLAKDEVSKEPFAVLRPHHMPVDGSNHNLSGKDQTPETAGNEIDNGSHMGEMIFERSADEGDEDLSEQDDLPLSPPKYTMTDKWILDHQKRRYEENKRKALELQKAHRRISASYEKLKENVSSSEDLSAKTKSVIELKKLQLLQLQRRVRSEFLQDFFKPNTTDLDRIKSVKKHRHGRRVKQLEKIEQKMKEERQKRIRERQKEFFADIEAHREKLEDSFKVKRERLKGFNRYVKEFHKRKERIHREKLDRIQREKINLLKNNDVEGYLRMVQDAKSDRVKQLLRETEKYLQKLGAKLQGSKSMDGRVSYASDSTANDIEDESYQPQEVVNDQPSYLQGGKLREYQMNGLRWLVSLYNNNLNGILADEMGLGKTVQVISLLCYLMETKNDRGPFLVVVPSSVLPGWESELNFWAPSINKIAYAGPPEERRKLFKEMIVHQKFNVLLTTYEYLMNKHDRPKLSKIQWHYIIIDEGHRIKNASCKLNADLKHYRSSHRLLLTGTPLQNNLEELWALLNFLLPNIFNSSEDFSQWFNKPFESNGDSSTEEVENELPEKIERLVRCWPSAYQKLLIKRVEENLGGIGAVKIEGYLPRHYLPSILRLCGKLEMLDRLLPKLKATGHRVLLFSTMTRLLDVMEDYLVWKKYKYLRLDGHTSGQERGALIDKFNNPNSQAFIFLLSIRAGGVGVNLQAADTVIIFDTDWNPQVDLQAQARAHRIGQKKEVLVLRLETVQTVEEQVRASAEHKLGVANQSITAGFFDNNTSAEDRREYLESLLRGGKKEEAAPVLDDDALNDLLARSEDEIDIFESIDKQRREEEMIYESSNIKSVKVVRRKGELGGLDTQHYGRGKRAREVRSYEDQWTEEEFEKLCQVDSPDSPQPGGISRDADVPKVVKLEVPPESSKEPEQAKKEPASSVGDSPPAKRRRGRPRRSDASLSPVTAPPNTGKQEAGTIIDGSSSAPTTTIHSVAPDVTIDSTALSATGNPDVGTEIKGTTPDGTIKPVICTDNKGTASIAVLEGSNAKEVGIPAHSVHEPVSSSAPHPPTPATSRGRKTQAGETPRRRGRKPKSLAASAGDVILSPVVAVGSGEAYASSVVSSYPQGNVSSSHANAMAGLQKDTIIYKPAALLPEGVKGTLTPSGGDKDEMVKTPLAEDIYAGTVTTSGNANSQLPMIAHNENAGLVQGGTDQNLSVATPTIPVVSEGSTKISEVVVADKPAEKQGARRRRKKTSGTGSEDTGVSTRQRAASRRLYGIGTADIAGTDMSTGEKIGIVKEIDGSCQDTSKGLPNIISPSYEKSGYDSQPSTPIAVPINEAALPSGFSEAHATHSELHPARESISSVGHEKLAGAHLEAPPSVSFQAPVQHETRKDYVGVHSEVATTHPETITTHSSVNPVIDHKLANVQFESHASLHTSGKDITTMPSEVDSGAPSKAPGRRRKGSAREPRTRSNSATAASERRARLAGSKQPDDIKMAEMSGNPSTAVCSSTQQQEDNTLKAAHATGSVGEEQNNAENRVREVSMPAGILEAKLELTKQTDQAGHNSEQEQEMVSAAKSASANDEEHKVHEVHQIIADHNALPSSAQYTLQDKIDSSADAGLVPCDKIASVVIAVDDQDPSNASDKDAPASTEDDGNGLQSECVHVDLVLAKQDNTKVEDTQKSNQPAEQGESLEMTGSKFRSETRLEKTEETVDKSGGDNLPTIEKNDDSPIERSSPSADKIAQVAYGGEAGTETTTVEAVSAMNSDGLQDVRNALSTHGLSTNDITVASEEHRDPESHLSGEVSMSGGSSELKLESLNQSESACQSGEVTLEDTHATLDIQIPALIESEEKKSPGGDVHGSEEQHMHEVLHNTVDGSISPSNREQDKLQVHIDTNTDVDIPSSDKDHSTDIVLAGCQAPCDASGKDKLSTCDASGKDMAAPTDDDLNCLQSEDTVIPVADAKDETMLVKAIQNDEMSMGSSHGLPATIQSTDSDRLAEEGESAEITGSKFSCGMEQEKMEEPLDKSVTDNQTSSQINDGSNNMDSQKVDSSLQAADGGDLLVSRGTSVETTTAINTDASDESISVSTQSVKEASTVEIGASTNDIAPACELRKDFESHVSGCVSKPVGLSELRLEELSQTKSVSQSIVANAEETSTRSDIETPAMDASESKSPESDVHELSERVEFMGPTPSANEKSNELHSQELVKMISAAETASTEGHREKDTCEVDHKIDCTIFSPIGDQDTRNRIDGDTDCGVPSCQRNAAFDSENEVSAEINLTGSQAPCDAPNKATPAPTEDDHNGQESEDTVIGAEQGTVEVEAMQIDGISKSYSSDSHATLQSSDSNQLVNSDSKFESSKKHDKTDETSNESRGDNPTHSCTNDDSHDKNLVGCSPSEDLNEDNSAQLADGDDLVGSKDTTAAHASGLKELTSGNYVASSSSHVVQDVTSISKMESVQAGSEEIYHGYSDETIHSARIKPVVGTEITENASVASAPVITIQPDIETEAGVTASLTVLEGSIAEEVDTQVESGHDLVTSTAPLSPAPLPGESHACTDVSCPVAVEVSETKLESANHTASQLGAACTETPNALLNTLIPALPESEETKLSGSDTDGKTIMAELASSSDEHDKVHEVGNETGDDNKLPSSVAEDAVQGEIDGSADMDSQIIAGSSEAEINNSTVATIADSQIPFDPSDKDTLAEDGNGLQREGTTVDVTGSKEDDMEAEEKQMDDSHLPAALQSTESSQPTEHAAPTQDDGNGLQCEGTTVDVSGSKEDIMEVEEKLIDDISGSPSSHLPVALKSTESNQPAEHAVPAEDDGDGLQSEGTAVDVVDSKKDDMEVEEKQIDISRGSSSFLPGALESAELNQPAEHTAPTEDHGNCLQSEGTAVDVPCSKEDNMEVEDQFDGISRGPSSFSPDTLESAELNQAAEHAAPTEDDGNGPQSEGTSVDVAGSKEDNIEVEEKIDDISRGSSSHLPDVLQSTPNQRAEQECLDNSDDVNTSVVSSHAPLSGPKFTCVKELEKADETLETSDAQVADEVCLQTNDGAHNMASGSCSTLEDKNEDSSAQIADCEDLLLRKGTTVDDLDGCVEGHSGLSTHSNDEVRNLVEIVKGMNDTTAGSEVHVDPESHVSDEVSMPVAPSELKVELKNQSEPACQFGAVIVEESNVSLGIQTPALAESEEMTSGGFMHGKEVCASEQTNIGAAAEPASTKDDHDMHEVDKEIVHCTISSPIGDQENLQGNIDGKMDVGLAACQTESDFVSGNDHSRETDLAGSQAPYDASDKEDTAADLIGPKQATLEIEKMQIDGIPEGPSSVPAVLQLTDSNQPAEQERLENSDSKFASTKDQGRVDGTSNLSGGDNAKCSLTNDDSQTVNLVGYSPSEDSNDDDSVQAADSDGVLGNKEGTDDVISAACTDDVSMLKTESIDRHGSDEVDHSTAPSAAIKQESGTEVTCDASVPVSESSISKEIGTSPECDDDQVATAAPHPPTPLSDATDVSADVQIPAGISEAKLEQPNETTSPSGAATEENNTVVSTQIPTLAESEDRTPADTAIQGTEVDSAEPASVSDDENKVTAADDSALPSTGPEDTADDKIDSSADASEK

SEQ ID NO: 16749 - protein, 195 aa, Brassica napus
  misc_feature (77)..(77): Xaa can be any naturally occurring amino acid
  misc_feature (161)..(161): Xaa can be any naturally occurring amino acid
MGRVKLKIKKLENTNGRQATFAKRKNGILKKANELSILCDIDLILLMFSPGGKASLCCGRRSSIEEVISKFSQVTPXERTKKKVESLETLKKTFLKLDHTVNIRELIASSNSTTEDLSTQASILQARISEIHGRLSYWTELDKINNFDHLGQLEISIRQSXDQLRAHKEHWDSSSNSMQIENANLLRWSTARADG

SEQ ID NO: 16750 - protein, 646 aa, Leptospira interrogans serovar Lai str. 56601
MSKEKIIGIDLGTTNSVVSVMEGGDPVVIQNSEGARTTPSIVAFTAKGETLIGQFAKNQAITNAVNTIRSAKRFIGRRLNECESEMKHVSYKVIRSGNEGVKFETSAGEFTPQEISARVLMKMKQTAEDYLGQKVTKAVITVPAYFNDEQRQATKDAGRIAGLEVERIINEPTAAALAYGFDKKNVNSKIAVYDLGGGTFDISILELADGVFEVKSTNGDTHLGGDDFDMAIMEWMISEFKNQTGIDISADKNTVQRLKEAAEKAKIELSGTMSTQINLPFITADASGPKHLDMTLTRAKFDQLTKSLVDRTRIPCENALRDAGLKASDINEVILVGGSIRIPAVQELVKQVFGKEPNKSVNPDEVVAIGAAIQGGVLAGEVSDVLLLDVTPLSLGIETLGGVMTKLIERNTTIPTKKSQVFSTAADNQSAVSIHVLQGEREMASANRTLGRFDLIGIPPAPRGVPQIEVTFDIDANGIVHVSAKDLGTGKEQKIRIESSSGLSEDEIQKMVKDAEAHAAADKAQREVIEAKNELDTLTYSLEKTVNEAGDKIGANEKQLATDEIKRAREAIESNDKARIESAKASISKIATDIASKVYSQSAPGAEQAAAGGPNGSAGSNDQGNSTNNGEKVVDADYTVVDDEKK

SEQ ID NO: 16751 - protein, 250 aa, Triticum aestivum
  misc_feature (44)..(44): Xaa can be any naturally occurring amino acid
  misc_feature (238)..(238): Xaa can be any naturally occurring amino acid
MEAETAAKRARENEGAAAADGAGEQAGISAVIPGWFSEISPMWXYQEMITHLPLCSIKDPKKVLVIGGGDGGVLREVSRHSSVEQIDICEIDKMVVDVSKQFFPHLALGFEDPRVSLHIGDGVAFLKNAPEGTYDAVIVDSSDPVGPAQELFEKPFFESVSRALRPGGVVCTQAESIWLHMHIIEDIVTNCRQVFKGSVNYAWTTVPTYPSGVIGFMLCSTEGPSVDFKHPVFSIKEXQYSKKSKGEVKF

SEQ ID NO: 16752 - protein, 471 aa, Ralstonia solanacearum GMI1000
MSQSIADVMKLVKENDVKFVDFRFTDTKGKEQHVSVPVSHFGEDKFESGHAFDGSSIAGWKGIEASDMLLMPDANTAHIDPFYEEPTLVMTCDVIEPSDGKGYDRDPRSIAKRAEAYLKSTGLGDTAYFGPEPEFFIFDGVTWNVDMQGSFVKIHSEEAPWSSGKEFEHGNSGHRPGKKGGYFPVAPIDTFQDIRSEMCLILESLGIPVEVHHHEVAGQGQNEIGTKFSTLVQRADWTQLQKYVIQNVAHTYGKTATFMPKPVVGDNGSGMHVHQSVWKDGQNLFAGNGYAGLSEFALYYIGGIIKHARALNAITNPGTNSYKRLVPGFEAPVKLAYSARNRSASIRIPYVANPKGRRIETRFPDPLCNPYLGFAALLMAGLDGVQNKIHPGEAADKNLYDLPPEEDAKIPTVCSSLDQALEYLDKDREFLTRGGVFTNSMIDAYIELKMEEVTRFRMTTHPVEFEMYYSL

SEQ ID NO: 16753 - protein, 384 aa, Zea mays
MAPRRLPGPGPGPGPGPPLIYGVASKPKTLAGRRQTRLLARRPSPTPTPQPPPARTAPPSRAQGFGMEAEAAAKRTRESGEDAAAAGISAVIPGWFSEISPMWPGEAHSLKVEKVLFQGKSDYQNVMVFQSSTYGKVLVLDGVIQVTERDECAYQEMITHLPLCSIKDPKKVLVIGGGDGGVLREVSRHSSVEQIDICEIDKMVVDVSKQFFPHLAVGFEDPRVSLHIGDGVAFLKNAPEGTYDAVIVDSSDPIGPAQELFEKPFFQLVARALRPGGVVCTQAESIWLHMHIIEDIVVNCRQVFKGSVNYAWTTVPTYPSGVIGFMLCSTEGPAVDFQHPVFNIEEDEHPMKSKGPLKFYNSEIHTASFCLPSFAKRVIESKAN

SEQ ID NO: 16754 - protein, 345 aa, Zea mays; identical to SEQ ID NO: 14176

SEQ ID NO: 16755 - protein, 685 aa, Vitis vinifera
MGFLCFLYFLFSLLLFLAFSGLPTVWGNSELRALMEMKASLDPVNRFLSSWTSDADPCSGSFEGVHCNEHRKVANITLQGKGLSGKVPPAVAGLKCLSGLYLHYNSLSGEIPREISSLTELSDLYLDFNNLSGAIPPEIGNMASLQVLQLCSNQLTGAIPSEIGFLKKLSVVSLQKNNLTGKIPPSLGNLGMLRMLNLSFNRLSGTIPANLAQAPALEFLDVRNNSLWGIVPSGLKKLKEGFQHANNSAGLCGVGFSSLRVCSYWDGMNINQSETFPATNTDFTPTIYPVSSNFRPHCNQTHCPNVSKFPRIVLVSGVTTVTVTLSAVGLLTFLCYRRRKQKIGSSFDTSECQLSTDRSIDCHRKIASPLVSLEYSTGWDPLADGRNGNVFSQEFCQNPRFNLDEIESATQYFSEVNLLGKSKFWSVYKGILRDGSLVAIRSISATSCKSEEADFLKGLNLLSSLRHENLVRLRGFCCSKGRGECYLIHDFVPNGSLSRYLDLEEGSSQVLNWSTRVSIIHGIAKGIGYLHSSEENKPSLIHRSISADKVLIDQWFNPLISESGLPKLLADDIVFSALKTSAALGYLAPEYITTGSFTEKSDIYAFGVIILQILSGKQQLTNSMRLAAEFCRFADFVDTNLKGEFSESEAAKLAKIGLACTHELPDNRPIMETVIQELSTSGTSS

SEQ ID NO: 16756 - protein, 180 aa, Oryza sativa Indica Group; identical to SEQ ID NO: 12595

SEQ ID NO: 16757 - protein, 450 aa, Vibrio sp. Ex25
MLQIESSMSVYHTLCFLSAAAMLIAFVNSKIGKMQTTIAITAGSMVLSLLILIAGQNNWFHLTEIATETVTRINFEDFLLKGILGFLLFAGGLGIKLPNLKDQKWEITVLALGATLFSTFFIGFALYGFCQLIGIQFDLVYCLLFGALISPTDPIAVLAIVKKLDAPKRISTQIEGESLFNDGFGLVIFVTLFTIAFGTEAPTVGSVTLLFIQEAIGGITYGFVLGLLFHYLISATDDHSMELLLTIGVPTAGYAFAEYIHVSGPLAMVVSGIMIGNWTRFIGFSKESEDHLDHFWELVDEFLNGVLFLLIGMSMLLFEFHKEDWIMMAISVPLVLAARYLSVFLSYIGFKRYRKYNPWSVRILTWGGLRGGLALAMALSIPSGIWVIQDKLIDVKEIILVMTYSVVVFSILIQGSTITPMIEKAKDEEKKMEENNQAITTPEHTEPVDS

SEQ ID NO: 16758 - protein, 160 aa, Marinobacter sp. ELB17
MAGIYDFEVADIRGNAQSMAVYQGKVLLIVNTASKCGFTPQFEGLQSLYSDLADRGLEVLGFPCNQFMNQDPGSNDSIGQFCSLNYGVSFPMFAKVEVNGDNTHPLYRYLKHEASGLLGSKQVKWNFTKFLVNRDGEVLKRYPPTTKPAEIRADIEKALG

SEQ ID NO: 16759 - protein, 1041 aa, Arabidopsis thaliana
MVKQLQEQEENDPVEKTKSLISALNYLSRDLLLPSHLYASVSSIYHASVSDLSPSPPLRGNSYTPNRGDLMSEFEDALLQQRLNYESGSRLAELKETRYKNRIHNRLSQLEGLPSNRGEDLQEKCLLELYGLKLQELQCRVRGEVSAEYWLRLNCADPERQLYDWGMMRLPRRMYGVGDSFVMEADDQFRNKRDAERLLRLEEEEKNLIETTQRKFFAEVLNAVREFQLQIQASHRRCKQRNDGVQAWHGKQRQRATRAEKLRIMALKSDDQEEYMKLAKEIQRQKDAKLSENTKLLKGSESDLSDVDAPEDVLPAQDIEIIDSDNNDDSNDLLEGERQFNLAIHSIQEKVTKQPSLLQGGELRSYQLEGLQWMVSLYNNDYNGILADEMGLGKTIQTIALIAYLLESKDLHGPHLILAPKAVLPNWENEFALWAPSISAFLYDGSKEKRTEIRARIAGGKFNVLITHYDLIMRDKAFLKKIDWNYMIVDEGHRLKNHECALAKTLGTGYRIKRRLLLTGTPIQNSLQELWSLLNFLLPHIFNSIHNFEEWFNTPFAECGSASLTDEEELLIINRLHHVIRPFLLRRKKSEVEKFLPGKTQVILKCDMSAWQKLYYKQVTDVGRVGLHSGNGKSKSLQNLTMQLRKCCNHPYLFVGADYNMCKKPEIVRASGKFELLDRLLPKLKKAGHRILLFSQMTRLIDLLEIYLSLNDYMYLRLDGSTKTDQRGILLKQFNEPDSPYFMFLLSTRAGGLGLNLQTADTIIIFDSDWNPQMDQQAEDRAHRIGQKKEVRVFVLVSIGSIEEVILERAKQKMGIDAKVIQAGLFNTTSTAQDRREMLEEIMSKGTSSLGEDVPSEREINRLAARTEEEFWMFEQMDEERRKKENYKTRLMEEKEVPEWAYTSETQEDKTNAKNHFGSLTGKRKRKEAVYSDSLSDLQWMKAMESEDEDASKVSQKRKRTDTKTRMSNGSKAEAVLSESDEEKEEEEEERKEESGKESEEENEKPLHSWKTNKKKRSRYPVMTSSPNSRGKGSSKGSKRN

SEQ ID NO: 16760 - protein, 297 aa, Chlamydomonas reinhardtii
MSTGVLVLLAALWSLFGHQLSARSRYLNESGTACLLGLAAGVGLLACRNRATAGLVDGLLRFNSAAFFTYLLPPVIFYAGLSVERRLFFSNLPSILSAALYSLAGTTFGLTAQDCLALGAVFAATDSVAVLGLLSPRSQPQLFSLVFGEGIVNDATSVVLLGALQRVARHRSGDAGESVLLLAWRLLTSFIYLLATSTCLGVAAGAGVAALLRSRIATQGAHHEVALVGLLSYLAYLGAEGLIFIYVGMDSLDPLRWAASYPGEVIWLVGVLLLFLLVGRPRRLRCAAVHAAQPVRA

SEQ ID NO: 16761 - protein, 506 aa, Borrelia turicatae 91E135
MNMNKKMLNNVLSKLDKNFVKEIKGSCEVEILGLTYDSRCVLSHFVFFALPGLHFDGQEFINSAIEQGSNVIVHTNDINFYDPNVTYIKIDSCNIKKFMSNFAHIFYNEPSKNLKIIGVTGTDGKSSVCFYIYTLLKSMGVKVGFISTVFFEDGSGTLVKNPYRQSTPESTEIHLVLSKMVENNVEYAIVESTSHGLDIRTSRLIDIAYFVAVLTNVSHEHLEFHGTMQHYLNAKLNLFSSADANGGFGIINMDDKNFSTFLNTINRAYTYSLENKNADFFVSKINEQMGFTEFEFYHKNVKYDARVNLTGSFNVENVMAALIVVSQVMNVDVSELIDKLVNIEGLFGRMQGVDFGQDFSLIIDYAHTPGAFLKIFPIFKRLSKNRLISVFGSAGERDVLKRKLQGEIADRYSDIIILCDEDPRGEDSMQIIRDIAEGISGKTLNRDLFFIPDRKSAIEKAINIAHTDDLVVTLGKGHENSIIYKDRSIFWDEQAVVKDIISRNRS

SEQ ID NO: 16762 - protein, 523 aa, Zea mays
TRPCPLCGSDISDLSEELRQLHTNNCLDEPAKESSPNHKKEPSVGQNVETGRVVEWLRNLGLSKYEEVFIREEVDWETLQWLTEEDLLGIGISSLGPRKKIIHALGELLKKHDDPSEMEAVLNSGNTKKTKLPMNGNKLITEYFQCSSFDQRQRRVCKANKPSNLNEKKISSAKVPTRRTAGKGKIKDTPLWCCIPGTPFRVDAFRYLRGDCSHWFLTHFHVDHYQGLTRSFCHGKIYCSSITASLVHHKIGIPWDRLHVLTLNEKLNIAGVNLICFDANHCPGSIIILFEPPNGKAVLHTGDFRFSSKMANNPVLQSSCVHTLILDTTYCNPRYDFPSQEIVIQFVIEAIQAEAFNPKTLFLIGSYTIGKERLFMEVARLLQKKVYVGAAKLQILKHLELPQEIMHWFTANEAESHIHVVPMWTLASFKRMKYLSNQYAGRYDLIVAFCPTGWAFGKGRKKTPGKRWQQGSIIRYEVPYSEHSSFTELQQFVKFISPEHIIPSVNNDGPESANAMLAQLLNE

SEQ ID NO: 16763 - protein, 958 aa, Oryza sativa Japonica Group
MYYRRQRKASSEANANVFMPGGPNDISFPASNRDHDWGYGGVGKEWEASYARKLQLMNFLSSLHQRTANPLVTTRMDANMDTPLEQKQKDSSAIIVLDSDDEDGYTEGCEQLTSENNKQQAPSGLTSPYTTWIVSSAKDQVNGTLHVDGVQSTQIVPYYGQNAPLINQFPLQTSWQPSIQYERVILQKRPEEQRVQDLVAASHAEKIAETQVLLTLPTLPNERKRRKTEPTTLVDVDGGTNLGKRKRKNHQNQAAVDSNLDLQQNDVPSQSYRTMIEEEKPVKESDGLEDLWKDFSLAAECTKLDTNEDMSNEKDVDDENEMDDDCNHDIRIHEDLGHVCRICGMIVRKAETIIDYQWKKASRTRTNYYESRSKDADEIDTGAVKVSEDFIVSDIAIHPRHAKQMRPHQLEGFSFLVKNLVGDKPGGCILAHAPGSGKTFMLISFIQSFLAKYPSARPLVVLPKGILGTWKREFQRWQVEDIPLYDFYSVKADKRVEQLEVLKSWEAQMSILFLGYKQFSRIICGDGDGNIAAACRDRLLMVPNLLILDEGHTPRNRETDVLASLKRVQTPRKVVLSGTLFQNHVSEVFNILDLVRPKFLKMESSRPIARRIMSQVAISGIRSLKGVHDSAFTESVEDTLLNDDNFTRKAHVIRSLRELTKDVLHYYKGDILDELPGLVDFSVFLKLSTKQKEIVHKIEAYEKFKRSAVGTALYIHPCLSEISEGDAADRASNLTDATVDSLIESIIIKDGVKAKFFFNILSLANSAGEKLLAFSQYILPMKFLERLLVKRLGWHVGKEIFMISGDTSADDREVAMDQFNNSADAKVLFGSIKACGEGISLVGASRVIILDVHLNPSVTRQAIGRAFRPGQQKKVFVYRLVAADSPEVKFHETAFKKEVIPKLWFEWSELCTTEDFKLNQVDIDDSEDELLEANAIRQDIKALYRRSAISFSRCACAS

SEQ ID NO: 16764 - protein, 536 aa, Myxococcus xanthus DK 1622
MHFELAFVLIFAIATAVAIAARYFKIPYTVALVVAGLLLGTFKAFEPPHLTKELLFAIILPGLLFEAAFHVEFRKFWKNKMAIHALAIPGLLASAGLTAFILTRVVDGLDFVHGFGMLSALVFASVIVSTDPIAVVALFKSLGAPKRLLILVEGESLLNDGSAVVLFTLIVAVATGGQFTVGGALFDFIKVFGMGVLMGSAVGFAVAQVIKRVDDAMVEITLTVIAAYGSFVLAEHFHYSGVIASVVAGMLCGNWATHEGMSPATRIAVESFWEYLAFALNSVVFLLIGLEVQLSSLLASWKPILAAYVAVMVARAVVVYGVSALLRFTKEKMPWTWSAVLTWSGLRGAISMVLVLGLPTDFPHRELLVNMTFGVVVLSIIFQGLTMAPLLRKLRITGLKDAFQEQYELARGRLGAIHAAQAALESMRRAREIPGDVVTQLEKDYQEKEVVAEKELTALKQQSMRFHEEEHQEAVRRVLIVEKAALLKAYQSATIGKEAFARLTADLDERIAAADAAENHVPPEGETPAVAGAASA

SEQ ID NO: 16765 - protein, 140 aa, Arabidopsis thaliana
  misc_feature (59)..(59): Xaa can be any naturally occurring amino acid
  misc_feature (102)..(102): Xaa can be any naturally occurring amino acid
  misc_feature (108)..(108): Xaa can be any naturally occurring amino acid
MASSMLSSATMVASPAQATMVAPFNGLKSSAAFPATRKANNDITSITSNGGRVNCMQVXPPIGKKKFETLSYLPDLTDSELAKEVDYLIRNKWIPCVEFELXTDLCTXVSTVTHPDTMMDGTGQCGKLPLFGLHPTPLKC

SEQ ID NO: 16766 - protein, 523 aa, Nocardia farcinica IFM 10152
MRAGTRTRNPVAPSPVRARTARIALLLIAFVCAACGLVYELSLVTLGSYLLGDTAAQASITLSVMVFAMGIGALIAKPLRGHAAAAFVAVELALALLGGLSVLLLYAAYAWLNLYTTALIAAASVIGMLVGAEIPLLMELLQRIRRQAPGAAVADLFAADYVGALLGGLAFPFLLLPVFGQIRGSLLVGVLNAAAGLALVFVLFRDRLTRPARLLFTALTALVALVLGGSYVYADRFEATAQQALFAHPIVRHEQTRYQSIVLTESLSPFATPDVRLYLNGDLQFSSVDEYRYHEALVHPVLAGPRARVLVLGGGDGLALREILRYPDVAEVTLVELDPGMIHLARTEPRLLALNRHAFDDPRVRVINEDAFAWLRGQSGRFDAIIVDLPDPDQTSIAKLYTKEFYAMVAQVLAPGGTVAVQSGSPFFAPRSFWCIAATIRAGGLRVLPYHVDVPSFGDWGFVLATRDVEPVLRLDPPAPPRSIDAESLRAAAVFAPDRRDPGAPVSTLMHPVIVDLELREWR

SEQ ID NO: 16767 - protein, 620 aa, Porphyra purpurea
MGKVVGIDLGTTNSVIAVMEGGKPTVIPNAEGFRTTASVVAYTKSGDKLVGQIARQAVINPENTFYSVKRFIGRKQNEISQEIRQTSYNVKTSGSSIKIECPALNKDFAPEEISAQVLRKLVEDASTYLGETVTQAVITVPAYFNDSQRQATKDAGKIAGLDVLRIINEPTAASLSYGLDKQNNETILVFDLGGGTFDVSILEVGDGVFEVLSTSGDTHLGGDDFDQQIVEWLIKDFKQSEGIDLGKDRQALQRLTEASEKAKIELSNLTQTEINLPFITATQDGPKHLEKTVTRAKFEELCSRLIDKCSIPVNNALKDAKLEASSIDEVVLVGGSTRIPAIQQMVKRLIGKDPNQSVNPDEVVAIGAAVQAGVLAGEVKDILLLDVTPLSLGVETLGGVMTKIIPRNTTIPTKKSEVFSTAVDNQPNVEIQVLQGERELTKDNKSLGTFRLDGIMPAPRGVPQIEVTFDIDANGILSVKAKEKATGKEQSITISGASTLPKDDVERMVKEAEENFDVDQKRRKNIDIRNQAESLCYQSEKQVKEFEDKIDEELKNRITNLISELRSNLEKEELDSIEANSEKLQNALMEIGKNATSAEKDTQNASNDDTVIDTDFSEAK

SEQ ID NO: 16768 - protein, 892 aa, Chlamydomonas reinhardtii
MAQLEAPPPEAAPPESGGKDLSLSEVLLIELSILIVSFVAGRALERIRFKWMGEAGAALLLGLVVGLIMKAGGVEHTVAHAVEFRGDIFFYVLLPTIMFDAGYGLDAKVFLRNVGSVCSYAFLGTTISTFVVGLIMWVCGGQQRVTVLAVFQRLGAQPDLYINVFGESVLNDAVGLVLFQVITKFLEGKAVTGPNVMAGIGLFIGIFAASVAIGLAVGFLASLIFRSRFFYSGAVHDPVTGKELAPAGNSVFEVGVAVTFAYGAYLVADVAHCSGIVAVVTNGMVMNLYVRPNLSHEAEVKIEYLFKVLAALFELFVFCYIGTTLFLGPQHYNVWSYAVGAVADARLAGSVDAGSVGAGADVDSVDEGSVGEGSVDVGSALCLIALAASRAANIYPLSLLVMKTVTFYIIFITVLWNGGSASYLLEVLRLRATDPLPNKYGRALAAKHEADRLRTMNNGHRIVGGFERMHTKLAKLLVHPHAHSQHGAASPSAHTPAGPPTAAAAMAVGAGRATDFGGYFGGTADLRAAGFMQGGEFDPGEFMGDDALKANAVRARQAGWYLGWANYVMQGVDFYTRQDIQKYLPHDLDIILLENIDARAAVCEYGEMGPGLERLLVEFEEHGNGTLPAVLIWNSGIMLWDGFGCWDGEPQCRSGDICREPKFINTDGEVVRARNEDVTYRLGAWCVLIADTIMNLLVHAQNHLANHPAHGPPGRPPTRLFLEPASRAAVSANLTVTRGSAQFFSATDGDAATQLQVLPATSGWNFSQYQLHGNTSKVKPGWAALRSGARLAVRLPGLQLWRYRRHMASLRVSYLTSYLHMGSALLRCLPPSVASGSASPGGGAAPGAKQEQQPQQPLRGGCLCDMTLLQGAIDGGGEWRDRHRVSVVAEAV

SEQ ID NO: 16769 - protein, 157 aa, Oryza sativa; identical to SEQ ID NO: 15920

SEQ ID NO: 16770 - protein, 260 aa, Silene conica
KVEKILFQGKSKYQDVMVFQSSTYGKVLILDGVIQLTERDECAYQEMISHLPLCSIPNPKKVLVIGGGDGGVLREVARHSSVEHIDICEIDEMVVTVSKEFFPEVAVGYDDPRVNLHIGDGVAFLKAAPEGSYDAVIVDSSDPIGPAKELFEKPFFESVAKALRPGGVVCTQAESIWLHMHIIEDIVSNCREIFKGSVNYAWTTVPTYPSGVIGFMVCSTEGPAVDFKNPVNPIDKTEDEKRPLKFYNAEIHSAAFCLPS

SEQ ID NO: 16771 - protein, 73 aa, Oryza sativa
ADNIGMLMHIIENIPTCCPQVCNSSKNYAWTAVPTYPSGDIGPMLCSTAGASEGCPRHIFHTVDNDVLSLFYG

SEQ ID NO: 16772 - protein, 178 aa, Zea mays; identical to SEQ ID NO: 11041

SEQ ID NO: 16773 - protein, 492 aa, Thermodesulfovibrio yellowstonii DSM 11347
MILKELLRSDFNVKGDINKNIDYITYNSKDVKEASLFFAVSGQKADGHFFIEEAIKKGAKAVVYETGHFMPSEYADVTWIGVNDSRDALSWISSKFYGNPSERLKIIGITGTNGKTTTSYLIREILKRYDKKTGVIGTIKYLIDNEEKVAVHTTPEAPEFQELLHEMLVKGVEYVITEVSSHALALKRVDYTKFDIAVFTNLSRDHLDFHKDMEDYFNAKKRLFTELLKNEGVAVINFDDVYGRRLAEQLNTKKITYSIENPQADIYVKNYRLNFKETEINLHIKKEKELVVKTHLLGIPNIYNVISAVSVAVALNIPFDIIESAISDAHSPDGRFERVDEGQDFLVFVDYAHSPDALERLLISVRKLKEEISKNGKIVTVFGCGGNRDRGKRPQMGKIATELSDYVILTSDNPRWEEPREIIKEIEEGILKDNYIVVPDRTMSLYIGTKICKKGDILIVAGKGHEDYQEIKGKRYPFSDREILVKALRELR

SEQ ID NO: 16774 - protein, 469 aa, Herminiimonas arsenicoxydans
MTAAEVLKMVKDNEVKFVDFRFADTRGKEQHVTVPVSHFDMDKFESGHAFDGSSIAGWKGIESSDMLLMPDPNTANIDPFFEETTLFMQCDVIEPSDGKGYDRDPRSIAKRAEAYLKSSGMGDTAYFGPEPEFFIFDSIRWKIGMDGCFVKIESEEASWSTGEKFEGGNTGHRPTVKGGYFPVPPVDSFQDMRSEMCLILESLGIPVEVHHHEVAGAGQNEIGSKFSTLVERADWTQNMKYVIWNVAHTYGKTATFMPKPIVGDNGSGMHVHQSVWKDGKNLFAGDGYAGLSDFALYYIGGIIKHAKALNAITNPGTNSYKRLVPGFEAPVKLAYSARNRSASIRIPHVSNPKGRRVEARFPDPLANPYLCFSALLMAGLDGVQNKIHPGEAASKDLYHLPPEEDALIPTVCASLEEALDALNKDREFLTRGGVFSDAMIDAYIELKMQEVQRFRMTAHPVEYDMYYSL

SEQ ID NO: 16775 - protein, 428 aa, Arabidopsis thaliana
MTTTDKSAGIVTDSEAGPETSLLLNPHEGSTKKAPSDSYHFAYIIYFTLGVGFLLPWNAFITAVDYFSYLYPSTAVDRIFAVIYMLVALVCLFVIVVFYAHKSLASFRINLGLLLFVIALLVVPVLDLVYVKGQVGLYAGFDVTSAAVALSGLGDALMQGGLIGVAGEMPERYMQAVVAGTAGSGVLVSLLRILTKAVYPQDPDGLRKSANLYFAVGIVVMVICAVFYNVAHKLPVIKFHEERKNEELIREKSEEKGSLTGLAWRTTLWDIVTKVKSHGFGIVLLYMVTLSIFPGYITEDVHSELLTDWYPILLIAAYNVFDLVGKCLTAVFMLEDEKIAVGGSIARLLFYPLFWGCLHGPMFLRTEIPVTILTCLLGLTNGYLTSVLMILAPKSVPLRHSETAGIVTVMFLVVGLASGSVIAWFWVI

SEQ ID NO: 16776 - protein, 856 aa, Gibberella zeae PH-1
MPSLPSSIFIWWQGISQTSTTTSQAFIDQIRSIWEQRKFRYGLLIISATSNAAFSSPLVATPLAGKNKTPGKRMPTPSSIDRLHKPFKCPGAAGRSPAVDRPSRKRRKVDYGGADGEADSDKPYSNDDRLAITTRDNNRYPVFEPKDKLLVFRKSFSVPLKNKDSTAYNPNRAPPTLGLRQGAVFVAKPLHDPSGEFSIVLYDPTIDDKPKDMPKAIEPTKAETLEEKLDAPLVHKSLAEILGIKKKTDDEHPRVPVVIDPRLAKILRPHQVEGVKFMYQCVTGLIDEKANGCIMADEMGLGKTLQCISLMWTLLKQSPDAGKSTIQKAIVVCPASLVKNWANELTKWLGANAINPFAIDGKASKEELTRQLRQWANATGRSVTRPVIIVSYETLRLNVEELKNTKIGLLFCDEGHRLKNSDSNTFNALNSLNVSRRVILTGTPIQNDLTEYFSLTSFANPDLLGTRLEFRKRYEIPILRGRDADASEADRKKGDECTAALLGVVNKFLIRRTNDILSKYLPVKYEHVVFCNLAPFQFDLYNYFIKSPEIQALLRGKGSQPLKAINILKKLCNHPDLLNMSDDLPGSEKCYPDDYVPKEARGRDREVKSWYSGKMAVLDRMLARIRQDTNDKIVLISNYTSTLDLFEKLCRSRQYGSLRLDGTMNVNKRQKLVDRFNDPEGDEFIFLLSSKAGGCGINLIGANRLVLFDPDWNPAADQQALARVWRDGQKKDCFVYRFIATGTIEEKIFQRQSHKQSLSSCVVDSAEDVERHFSLDSLRELFQYRSDTKSDTHETFKCKRCKPDGKQYIKAPAMLYGDTSTWNHFVNEGLKPIQDLLLRQECGEAEVSAVFQYISH

SEQ ID NO: 16777 - protein, 461 aa, Mesorhizobium sp. ZJ15B7
VMFDGSSIAGWKAINESDMVLMPDPDTVHMDPFFAQSTMVILCDILDPVSGESYNRDPRGTAKKAEAYMKSEGIGDQIFVGPEAEFFVFDDVKYKADPYNTGFKLDSTELPSNDDTDYETGNLGHRPRIKGGYFPVPPIDSAQDMRSEMLTVLAEMGVRVEKHHHEVAAAQHELGIKFDTLVRNADKMLIYKYVVHQVANAYGKTATFMPKPIFGDNGSGMHVHQSIWKGGKPTFAGNEYAGLSESCLFYIGGIIKHAKAINAFTNPLTNSYKRLVPGYEAPVLLAYSARNRSASCRIPFGSSPKAKRVEVRFPLGANEQVVEIETVPTGSLGLDIALGVGGLPRGRIIEIYGPESSGKTTLALHTVAEAQKKGGICAFVDAEHALDPVYARKLGVDLENLLISQPDTGEQALEICDTLVRSGAIDVLVVDSVAALTPRAEIEGEMGDSLPGLQARLMSQA

SEQ ID NO: 16778 - protein, 394 aa, Ammophila arenaria; identical to SEQ ID NO: 9862

SEQ ID NO: 16779 - protein, 394 aa, Anisopogon avenaceus; identical to SEQ ID NO: 9865

SEQ ID NO: 16780 - protein, 394 aa, Anomochloa marantoidea; identical to SEQ ID NO: 9868

SEQ ID NO: 16781 - protein, 304 aa, Aristida purpurea var. longiseta; identical to SEQ ID NO: 9870

SEQ ID NO: 16782 - protein, 220 aa, Zea mays
MPDSDNDSGGPSNAGGELSSPREQDRFLPIANVSRIMKKALPANAKISKDAKETVQECVSEFISFITGEASDKCQREKRKTINGDDLLWAMTTLGFEDYVEPLKHYLHKFREIEGERAAASAGASGSQQQGELPRGAANAAGYAGYGAPGSGGMMMMMMGQPMYGGSQPQQQPPQPQPPQQQQQQHQQHHMAMGGRGGFGQQGGGGGSSSSSGLGRQDRA

SEQ ID NO: 16783 - protein, 393 aa, Arundinella hirta; identical to SEQ ID NO: 9872

SEQ ID NO: 16784 - protein, 193 aa, Primula vulgaris
MGRGKVEIKRIENSNIRQVTYSNRRNGILKKAKEISVLCDAQVSLIIFSSSGKMHDYCSPNSSLINILDAYQKQSGIRLWDARHENLSNEIERVKKENDNMQIELRYLKGEDIQSLHHKELMSIEDALENGLTRVRERQMEIYRMAKDNFADKERLLEDENKRLGYKFQQVMDMQMPCSYRVQPLQPNLHDQF

SEQ ID NO: 16785 - protein, 130 aa, Triticum aestivum
  misc_feature (28)..(28): Xaa can be any naturally occurring amino acid
  misc_feature (42)..(42): Xaa can be any naturally occurring amino acid
  misc_feature (46)..(46): Xaa can be any naturally occurring amino acid
SEKKWFKKNLIQDMFFNFWEVKKGGLHXTWEIFPKYSKGVMXILLXAKNGQPVKFLIPLNPIEKIEGATKDGREMKFYNSKIYRAVFILQTFVKRELEENNTSTEKEKPEKPRAKPVKIKVIRERAINAF

SEQ ID NO: 16786 - protein, 153 aa, Thalassiosira pseudonana CCMP1335
MNTEKKIGHITSFFELQAQDIDENVVKFDQFKGQVTVVANVASYCGYTESHYKGLTKLHRKYKSSPTKLNILAFPCNQFGEQEPETCSTIKRFATTKYGVEFTMMNKVDVNGLDASDVYLWLKKVAGPPRITWNFGTYFVVTPDGTVASFSGV

SEQ ID NO: 16787 - protein, 162 aa, Bradyrhizobium sp. BTAi1
MASPTASIYDFTAASLTGEEVPLKRFAGQVLLIVNTASACGFTPQYRGLEALHRAYADRGFAVLGFPCNQFGAQEPGTAEEIGAFCSTKYDVTFPLFAKIDVNGAEAHPLYKFLKGEKTGLLGSAIKWNFTKFLVDRQGNVVSRHAPTTTPEALKKEIEALL

SEQ ID NO: 16788 - protein, 432 aa, Bradyrhizobium sp. ORS278
MSSSLHAVACERGIKYFLISYTDLFGVQRAKLVPAAAIDGMVKTGAGFAGFATWLDMTPADPDVFAMPDPASLIQLPWKPEVGWLAADPWMNGKPVAHAPRNLLKHMIADAAAQGYELKSGVECEFFLISPDGTELSDAADRQSKPCYDQQALMRRYEVIAEICDAMLALGWKPYQNDHEDANGQFEMNWEFDTALKTADRHAFFKYMVRSIAEKHGLRATFMPKPFVDLTGNGCHAHVSVWKDGRNLFEDEAGELGVSKLGYQFLGGIMHSADALAALFNPTVNSYKRINAARTTSGATWAPNSVTYSGNNRTHLIRIPEAGRFEVRLADGAANPYLLQAGLLAAGLDGIAHERHPGTRLDINMYTDGHTVTTGKKLPLNLLDAIRALEASTVLGEKLGDFIPCYVKLKTEEWNAYARHLTQWERDTTLDC

SEQ ID NO: 16789 - protein, 858 aa, Aspergillus fumigatus
MDELEQGSPMSGVENGKREQVEDVEEMDVKSKALMHLLNTSEVFVAIMADKMKKQQEEARLEAAKQQQQRQQKLTEDQKKPTATRSVARRETRARAKQPSADETTPAVSEQADEKTATSSRRGRGKKGASAMNGNSIASYFKKVDMEDPEDKPTVQEALEHAADEYEANPSALGGQDLVATQQPELVTGGRMRKYQLEGLEWLKSLWMNGLCGILADEMGLGKTVQAISLIAFFKEKNVSGPFLIAAPLSTVSNWVDEFAKWTPSIKTVLYHGSKDERATIRRNLMKLKDQRSADFPVVCTSYEICMNDRKFLAQYQWRYIIVDEGHRLKNMNCKLIKELLSYNSANRLLITGTPLQNNITELWSLLHFLLPEIFNDLNSFQSWFDFSSMLDSSGQTDVIERRKRTLVSTMHSILKPFLLRRVKSDVETALPKKREYILYAPLTAEQKDLYREILNGTGRQYLEDKAAERLLAKNERLSRSASLKRSAESSNASTPNKSLKSSRDSTPASVASSTRRRRAPQNYKELSDREFNAQLRRLEQGLEDDLDIQQSPTDTEQEEIERANTIKLAKKEIAQKKLQNPVMQARLACNSPHNFYWPWSDDPAAIDETLVTASGKMLLLDRLVPCLLKKGHKILIFSQFKTQLDILQDWATQLRGWNCCRIDGAISQTDRQAQIKAFNSDPGYKIFLLSTRAGGQGINLVAADTVILYDSDWNPQQDLQAQDRAHRIGQTKPVIVYRLATKGTVEQTLLEKADSKRRLERLVIQKGKFRSLLDSSSVNHSDVEELKKALGEDEFERFETGADPTALLSQKDLEILTDRSEEAYARAEKGLEHTGRAFKAVETKKEGNSLMAQITGK

SEQ ID NO: 16790 - protein, 600 aa, Yarrowia lipolytica CLIB122
MHLLRVLKSLFRVVAYRTKMGISELGTQLAYAGLNQLLKRDSTDADPDIPDDDVNNPVENEIFSSWALFILIMLLIGSLWTSYYLQQKRIQAIHETVVSIFAGMIVGLIIRISPGHYIQDVVTFKYSWFFNLLLPPIILNSGYELNQANFFRNIGSILTFAIAGTFFSALVLGLILYIWTAIGLEGLNMSLVDAISVGATLSATDPVTILSIFNTYKVDPKLYTIIFGESLLNDAICIVMFETAQKFHGQKVYFSSLFKGMGMFFMTFTISLMIGALVGVMTALVLKHSHVRRFPQIESCLVLLFAYGSYFFSTGCHMSGIVSLLFCGITLKHYAYYNMSRRTQIATKYIFQLLAQLSENFIFIYLGLSLFTEVELVYKPMLILVTTAGICVSRWAAVFPFSRLINFVSRARTSHLGLHQTTEEIPPPYQMMLFWAGLRGAVGVALAAGLEGEHSNALRATVLVVVVLTVIVFGGTTARMLEILGIRTGVIEETESDDEFDIESRGAAAAIPLSNSSGSMPAGRMRRSTSYHDDDSEFGSGDDDGLPPMHPSQQDQARASSTSLSNILSRTVDNPGQWFKEFDDQVLKPVFLDNPSNDRH

SEQ ID NO: 16791 - protein, 159 aa, Exiguobacterium sibiricum 255-15
MLQEQTFQRIDGTEATLKDYPGQAWLIVNTASKCGLTPQFEGLEQLHQDYRKQGLVVLGFPCNQFAGQDPGTDEEIQSFCQMNYGVTFPVFSKIEVNGKGTHPLFAELKALAPNTTGEQDVEWNFTKFLVTRDGEVTRFAPKTNPTDLVAAIERIVVPV

SEQ ID NO: 16792 - protein, 392 aa, Rhynchophora phillipsonii; identical to SEQ ID NO: 9885

SEQ ID NO: 16793 - protein, 392 aa, Rhynchophora phillipsonii; identical to SEQ ID NO: 9888

SEQ ID NO: 16794 - protein, 314 aa, Thermus thermophilus
MDYGMYFFEHVTPYETLVRRMERVIASGKTPFQDYFLFESKGFGKVLILDKDVQSTERDEYIYHETLVHPAMLTHPEPKRVLIVGGGEGATLREVLKHPTVEKAVMVDIDGELVEVAKRHMPEWHQGAFDDPRAVLVIDDARAYLERTEERYDVVIIDLTDPVGEDNPARLLYTVEFYRLVKAHLNPGGVMGMQTGMILLTHHRVHPVVHRTVREAFRYVRSYKNHIPGFFLNFGFLLASDAFDPAAFSEGVIEARIRERNLALRHLTAPYLEAMFVLPKDLLEALEKETMVSTDQNPFYVTPEGEARQAPYKG

SEQ ID NO: 16795 - protein, 392 aa, Microsteira sp. Davis et al. 38-01; identical to SEQ ID NO: 9891

SEQ ID NO: 16796 - protein, 382 aa, Salmonella enterica subsp. enterica serovar Paratyphi A str.
MKALHFGAGNIGRGFIGKLLADAGIQLTFADVNQVVLDALNARHSYQVHVVGENEQVDTVSGVNAVSSIGDDVVDLIAHVDLITTAVGPVVLERIAPAIAKGLVKRKAQGVDAPLNIIACENMVRGTTQLKGHVMNALPEDAKAWVEEHVGFVDSAVDRIVPPSASATNDPLEVTVETFSEWIVDKTQFKGALPNIPGMELTDNLMAFVERKLFTLNTGHAITAYLGKLAGHQTIRDAILDESIRAVVKGAMEESGAVLIKRYGFDADKHAAYIQKILGRFENPYLKDDVERVGRQPLRKLSAGDRLIKPLLGTLEYGLPHVNLVKGIAAAMHFRSDEDPQAQELAALITEKGPQAALAQISGLDANSDVVAEAVNAYNATK

SEQ ID NO: 16797 - protein, 392 aa, Mascagnia sepium; identical to SEQ ID NO: 9892

SEQ ID NO: 16798 - protein, 394 aa, Brachypodium pinnatum; identical to SEQ ID NO: 9896

SEQ ID NO: 16799 - protein, 586 aa, Zea mays
  misc_feature (28)..(28): Xaa can be any naturally occurring amino acid
KGPIPREIGKLSELTDLYLDVNHLTGPXPVEIAAIANLQVLQLGYNQLTGSIPPQLGNLNKLTVLAMQSNQLAGAIPATLGELTQLRRLDLSFNSLFGSIPSKIAEVPLLEVFDVRNNTLSGSVPVGLRRLNGGFQYMNNKGLCGAGFSLLELCLSSEDGLKPSKPEPFGPDGTVKTRQVPQSANPDGCSGASCSKSANASQGVLIVAVVAAVISYVGPPPGAAFCGLFAFSWYRRQKQKIGSSLEVSDSRLSTDHFQQKEACRRSASPLISVEYSNSWDPLSAGGAGVGSPGQVVGDSFRFNLEEVECATQYFSDMNLLGKSGFAAATYKGILRDGSVVAVKSLSKTSCKQEESDFLRGLKMLTLLQHDNLVSLRGFCCSRGRGECFLVYDFMVNGCLSRYLDVKDGSSGATVLDWPTRVSIIRGIAKGIEYLHSKKGSKPPVVHQNISADKILLDHHLAPRLSVPGLHKLLADDVVFSALKASAAMGYLAPEYAATGRFTDKSDVFAFGVVVLQVLTGRRDVSQLKVGAAAVSDLGGLVDANLDGAFSRTEAARLAAVAAYCTSETPGQRPTMEAVVQQLSSTQ

SEQ ID NO: 16800 - protein, 412 aa, Coccidioides immitis RS
MGKKAVHFGGGNIGRGFVGEFLHESDYEVVFVDVMDSIIDALQGASSYKVTEVSNEGEHTKTVTNYRAINSKHNLDQVISEISTADVVTCAVGPNILKFIAPPIAKGIDARTIERPLAVVACENAIGATDTLHKFVKENTDPSRVESLSSRARFANSAIDRIVPTQDPDSGLDVKIEKFYEWVVEKTPFGEWGHPDIQAILWVDNLDPYIERKLYTVNTGHATAAYYGYNMGKKTIYESMSDEKIRGHVRDALSETSTLIVDKYGIPAQEQRKYVDAIVARISNPHLEDVVERVGRAPLRKLGRKERFVGPASQLAERGKKVDALLGAMEQALRFQNVLEDDESFELAKILKTESAEDATAKLTGLESDHPLFARVVERVAKVQKGPNVMISICRRLVSLYSAAYESLMKSR

SEQ ID NO: 16801 - protein, 394 aa, Buergersiochloa bambusoides; identical to SEQ ID NO: 9898

SEQ ID NO: 16802 - protein, 386 aa, Oryza sativa Japonica Group
MAAAADSGSPPFPPSPLALFSGGGVPGRGRRRGGGTFWGVGDCGMYYRRQRKASSEANANVFMPGGPNGISFPASNRAHDWGYGGVGEEWETSYARKLQLMNFLSALHQRAANSLEKGKRKNHQNQAAVDSNLDLQQNDVPSQSYRTMIEEEKPVKESEGLEDLWKDFSLAAECTKIEYHCAQTGNHLSNMKGLYCRKDLRSNAFKIWCLIPMKTMSHEKDVDDENEMDDDCNPDIRIPEDLGHVCRICGMIVRKAETIIDYQWKKASRTRTNYYESRSKDADEIDTGAVKVSEDFIVSDIAIHPRHAKQMRPHQLEGFSFLVKNLVGDKPGGCILAHAPGSGKTFMLISFIQSFLAKYPSARPLVVLPKGIGSSYIYGAIFFNKN

SEQ ID NO: 16803 - protein, 393 aa, Capillipedium parviflorum; identical to SEQ ID NO: 9899

SEQ ID NO: 16804 - protein, 386 aa, Chasmanthium latifolium; identical to SEQ ID NO: 9900

SEQ ID NO: 16805 - protein, 393 aa, Chusquea oxylepis; identical to SEQ ID NO: 9901

SEQ ID NO: 16806 - protein, 231 aa, Brassica napus
  misc_feature (102)..(102): Xaa can be any naturally occurring amino acid
  misc_feature (114)..(114): Xaa can be any naturally occurring amino acid
  misc_feature (187)..(187): Xaa can be any naturally occurring amino acid
MGSAGKPADDISTDPESGPETSLLGSTPKSPPDSFHLAYIIYFTLGVGFLLPWNAFITAVDYFSYLYPSTSVDRIFAVVYMLVGLFCLLVIIVFYAHKSLAXSFRINLGLLLFXVSLLVIPVLDLVYVKGRVGLYVGFDITSVAVGLSGVADALMQGGLIGVAGEMPERYTQAVIAGTAGSGVLVSXLLRILTKAVYPQDPDGLRKSANLYFAVGIVVMVICAVSYNLAHK

SEQ ID NO: 16807 - protein, 461 aa, Mesorhizobium sp. HB5A4
VMFDGSSIAGWKAINESDMVLMPDPETVHMDPFFAQSTMVILCDILDPVSGESYNRDPRGTAKKAEAYMKSEGIGDQIFVGPEAEFFVFDDVKYKADPYNTGFKLDSTELPSNDDTDYETGNLGHRPRVKGGYFPVPPIDSAQDMRSEMLTVLAEMGVRVEKHHHEVAAAQHELGIKFDTLVRNADKMLIYKYVVHQVANAYGKTATFMPKPIFGDNGSGMHVHQSIWKNGKPTFAGNEYAGLSESCLLYIGGIIKHAKAINAFTNPLTNSYKRLVPGYEAPVLLAYSARNRSASCRIPFGSSPKAKRVEVRFPLGANEQVVEIETVPTGSLGLDIALGVGGLPRGRIIEIYGPESSGKTTLALHTVAEAQKKGGICAFVDAEHALDPVYARKLGVDLENLLISQPDTGEQALEICDTLVRSGAIDVLVVDSVAALTPRAEIEGEMGDSLPGLQARLMSQA

SEQ ID NO: 16808 - protein, 393 aa, Danthoniopsis dinteri; identical to SEQ ID NO: 9903

SEQ ID NO: 16809 - protein, 811 aa, Schizosaccharomyces pombe
MKRRATFQCPLIESTIKHQSTNYTKTETATTSHEVSENANEHKGKSNIDINKIAYYNVVWRKITMKKHKTWEGDGFLVREDSNLTLYNSDFTRLGSCHSRVPQIKEGELLRISGKEISIEKEISAESYEAGTHIDDSLRDVHMPEMKRKFKPPLRPNTMYQTISALPKPRHDPTVLGALVMSRPKTWDPRTHVDVVIDPFLSKHLYSHQREGVSFLYDCLLGMEGKCGYSAILADEMGLGKTLQTITVVWTLLKQSYYANRSSTINNAMVVAPVTLLKNWENEFYNWLGHERIHVYIARCAEDFQEFTSNKTYSIIITGYETVCTYLRNYGCGIDIDLLICDEAHRLKSMSSQTWITLNKLKTRKRLLLTGTPLQNDLSEYFSMVNFIIPGSLGTPNSFKAQYERPILRSRSMNASSRDISLGAARLQRLFEFTSNFTLRRKANILAKHLPPRTDIVLFIKPTHQQENVYGHVLDGFKSSVDQKGYYLKILTRLSKICNSTILLRNEKENFLSTELQDKHVFEQENMLLSSSKLQILAALLKSFQRGCQKAVIVSQYKETLELIELFLSILHVRFCKLLGSTPFSERDLIVHNFNTSSFKEFSVLLLSSKAGGCGLNLTGSTRLIIYEPSWNPAQDLQALSRIYRSGQKRPVCIYTFLSSGMLDERIFIRQNTKQGLSSSFIDSDASQKKNFFTGEDIKTLFSYSKTETCLTYELAFDSDEIDSLTKKKDPLTKIDHTIDSPNTKEKDKEISSWKKASEYMDTNLGKKCPENAFQGWTWQFPNDLSIMNGVEDYIPLEPLPINCLMHKKFE

SEQ ID NO: 16810 - protein, 491 aa, Bacillus cereus ATCC 10987
MKLHTLVSCLHDFPVVPKENPEITSIEADSRKVKEGSLFVCMKGYTVDSHDFAKQAAAQGAAAIVAERPIDVDVPVVLVKNTFRSLAVLADYFYGQPTHKLHLIGITGTNGKTTTSHIMDEIMRAHGHKTGLIGTINMKIGDETFEVKNTTPDALTLQQTFAKMVEHGVDSTVMEVSSHALDLGRVHGCDYDVAVFTNLTQDHLDYHKTMEEYKHAKGLLFAQLGNSYNHNREKYAVLNNDDAVTAEYMRSTAATVVTYGIDTTSDVMAKDIVMTSGGTTFTLVTPYESVNVTMKLIGKFNVYNVLAATAAGLVSGVSLETIIDVIKELAGVPGRFEVVDGGQNYTVIVDYAHTPDSLENVLKTAKQFAKGDVYCIVGCGGDRDRTKRPIMASVATRYATHAIYTSDNPRSEEPGAILDDMVHGANGNNYEVIIDRKEAIYHAIANAKAEDIIIIAGKGHETYQIIGKDVHHFDDREIAKEAITERLNNEE

SEQ ID NO: 16811 - protein, 394 aa, Diarrhena obovata; identical to SEQ ID NO: 9904

SEQ ID NO: 16812 - protein, 394 aa, Ehrharta erecta; identical to SEQ ID NO: 9905

SEQ ID NO: 16813 - protein, 394 aa, Elymus sp. Kellogg s.n.; identical to SEQ ID NO: 9906

SEQ ID NO: 16814 - protein, 161 aa, Ostreococcus tauri
MGSITSPKPRADSYDAIIVDSSDPIGPASVLFEEKFFRQIYRVLKPGGVLCSQAECAWLHLDLIVDLAKMCKEIFVNGSVQYGYTSIPTYPSGQIGFMLCCKPDEDGSTVDFTKPKRYPTPVEGSDLKPMRYYNAQVHAAAFVLPEFAREALEPHLVRGKE

SEQ ID NO: 16815 - protein, 432 aa, Francisella tularensis subsp. holarctica
MSEYFLFSLLTVVAALMSYINTKFLKLPKAIGLTILSITFSALCASFLSPSNFLVVALSSFDFKKTVLDGMLSFLLFANALHFNMIDLKKELKAIFGLASIGLLLSALTTAILIYGFCLLVGFEISLGYCLVFGALISPTDPIAVISTLAGNKSIPKHIKTRVVGESLFNDATGIVLFVVLSNIVFFSSGGEFGQAINGHGIEYIWIIAKQIGSEAGGGILLGYIFARVALIFLKTNQDSETSIFVTLAVASMGYVIAHSLNVSGPIAMVVAGLFIGNNLSDRKKTSPDQVEKLDNFWMVIDNMLNSFLFILIGLELTSIPFNHGAFWVGAAGIFIVTFARLVSISIPITVIDKKLTRASAKDNLLVAWSGVRGGISLALALSLPDEGNVIVSITYTVVILSILAQGSTLKIVLNMIYPHNITKKAANTVDN

SEQ ID NO: 16816 - protein, 323 aa, Oryza sativa Japonica Group; identical to SEQ ID NO: 11144

SEQ ID NO: 16817 - protein, 414 aa, Synechococcus sp. PCC 7002
MLRKRLQAGLCSLLLVLVLVFGPMERAIAFTDEQDLLLQAWRYVSQAYVDETFNHQNWWLIRQKFLKRPLKTRDEAYEAVGEMLALLDDPYTRLLRPEQYRSLKVSTSGELSGVGLQINVNPEVDVLEVILPLPGSPAEAAGIEAKDQILAIDGIDTRNIGLEEAAARMRGKKGSTVSLTVKSPKTDTVRTVKVTRDTIALNPVYDKLDEKNGEKVGYIRLNQFSANAKTEIIKSLNQLQKQGADRYVLDLRNNPGGLLQAGIEIARLWLDQETIVYTVNRQGIFESYSAVGQPLTDAPLVVLVNQATASASEILAGALQDNGRAMLVGEKTFGKGLIQSLFELPDGAGMAVTVAKYETPLHHDINKLGIMPDEVVPQEPIGYAMMGSETDLQYQAALDLLTQDQAIAQISQAS

SEQ ID NO: 16818 - protein, 209 aa, Brassica napus
MERGGFHGYGKFSLNTTTNPGKLLMAESGMQLPEPNQPTKTANGGQEECTVREQDRFMPIANVIRIMRRILPAHAKISDDSKETIQECVSEYISFVTGEANERCQREQRKTITAEDVLWAMSKLGFDDYIEPLTLYLHRYRELEGDRGVNCGVGSVSMTNGMVLKRPNGTMAEYGPYGTMAPYRYHHQNGFAYSGNDPNSKMGGSSSSF

SEQ ID NO: 16819 - protein, 131 aa, Rhodobacter capsulatus
MSAVKKALDLMKAEEVEYVDIRFCDPRGKLQHVTLIADLVDEDFFEEGFMFDGSSIAGWKSIDQSDMKLIPDASSVYIDPFYAEKTMCVHCNVVEPDTAEAYSRDPRIALKAEAYLKASGIGDVAYFGPEA

SEQ ID NO: 16820 - protein, 173 aa, Silicibacter pomeroyi DSS-3
MVRIIFLIVLLLVGRSVQAGAVSGSFPSIDGGTLSLEEWRGQPVLVVNTASQCGFTGQYAGLQALWERYQSAGLVVLAVPSDDFNQELATAAEVKEFCALNYALTLPMTNILHVKGADAHPFYKAVKAETGFEPAWNFNKVLVAPDGSIAATFGSAVKPDSARMQREIEALLN

SEQ ID NO: 16821 - protein, 469 aa, Mesorhizobium sp. BNC1
MTTAQDILKQIKDNDVKFVDLRFTDPKGKLQHVTMDVVAVDEDMFADGVMFDGSSIGGWKAINESDMVLMPDPETAHVDPFFAQSTMVVYCDILDPISGEAYNRDPRGIAKKAEAYLRAEGIGDTVFIGPEAEFFVFDDVKYKADPYNTGFKLDSSELPSNDDTDYETGNLGHRPRVKGGYFPVPPVDSLQDMRSEMLSVLTEMGVVVEKHHHEVAAAQHELGLKFDTLVRNADKMQIYKYVVHQVANAYGKTATFMPKPIYGDNGSGMHVHLSIWKDGKPTFAGNEYAGLSESCLYFIGGIIKHAKAINAFTNPTTNSYKRLVPGFEAPVLLAYSARNRSASCRIPFGTSPKSKRVEVRFPDPTANPYLCFSALLMAGLDGIKNKIHPGQAMDKDLYDLPPKELKKVPTVCGSLREALMSLDKDRGFLKAGGVFDDDQIDAYIELKMAEVLRFDMTPHPVEFDMYYSV

SEQ ID NO: 16822 - protein, 189 aa, Oryza sativa
MADAGHDESGSPPRSGGVREQDRFLPIANISRIMKKAVPANGKIAKDAKETLQECVSEFISFVTSEASDKCQKEKRKTINGEDLLFAMGTLGFEEYVDPLKIYLHKYREMEGDSKLSSKAGDGSVKKDTIGPHSGASSSSAQGMVGAYTQGMGYMQPQSNFHILVVLQSFAFPYMYQVAQIYCKYPSIE

SEQ ID NO: 16823 - protein, 206 aa, Chlamydomonas reinhardtii
MCCVDARTMSMPSLPASCSAWAPAAGASEQEAVDIDGKSRSLSEYAGKVTLVVNVASACGYTDENYKGLTKTYNKYRDHGLEILGFPCNQFGKQEPGDEKEIKHFCSTKYHVDFPMFSKVDVNGAHTHPVYQFLKRELPVSEGGGGGSGAGKDLIWNFQKILVDHEGRPIRLFYHNWDQGDVEGAIYKALHDARAVGALKTGRTTH

SEQ ID NO: 16824 - protein, 562 aa, Pseudomonas fluorescens Pf-5
MCVCFEVSDREARFMQTAYTVLILLMLVSLSRLVGRVIPLPLPLVQIAAGALLAWPTLGLHVALDPELFLFLFLPPLLFSDGWRMPKREFWRLRGPILTLAVGLVLFTVVGAGYFIHWLLPSIPLPVAFALAAVLSPTDAVAVSAISQNRLPTPLMHMLQGEALMNDASGLVTFKFALAAAVTGVFSLANASLTFVLVAVGGLAVGVALSWLVGRLRAWMIARGWDDPATHVVFMLLLPFAAYVLAERLGASGILSAVAAGMMQSWLDLLPRQTSTRLLNRSVWSLLEFAFNGLIFLLLGLQLPDIIKAVVSHETSLWPILFYRCLDVVAIFLVLLVLRFIWVQSIWRLSGLLRRWRGKGELTLVPTARSCWLLTVGGVRGAVTLAGVMSVPLFLGAGEAFPERDLLIFIAAGVILLSLVAACIALPLLLRGIVKSPDDKRRGEVRDAWRKTAEAAIHALEAEEVADTGETPDAAQAALATELKGRLMAEYRHQLEVYNDSAEAQALAFQMDLLERRLRIKALRAQRLELYRLSRQHQIGDDVLREVLADLDMSEANLGQVK

SEQ ID NO: 16825 - protein, 1402 aa, Pseudoalteromonas tunicata D2
MIINAQTSQKTAALYHAYLALNLPEQWLLKILAVIYKPVSSGNINRLLRLYQQHFLFEWPEGFISLKPEMKKQLIAEGFISSSHKGMHISPYLAARLTRESLADNHFLTILDIAEQVVPVLNMYEWERTEEDEQRLARDFYFIGNFKHLEKILAFHKNPQTVNHVRNQVLVECCFIEFDLNHFVTLPPDIQYQAFASWFYLIRQHGEPAHFALDLLNNVQRLQPEHELLALLLAEQYLYAGQLTQSAALLAPLKSTCYHLALQASLALMNNQPEQAQQLFSQALAAKQKYGKRKQPHLSGPLGILHTLTLLIRGNTVDASIFEQARAHIEGELQEKKPFDNSLYVAQFLLGTLRSLSHACQYFSHAHTLDFLNEQHPFYAHIVNWLDALSQHWINHQISAPSQVLLMQAIDFFKQAELFLFARLAQQLLATPAIDSQDVDEPLLFNIAGIIEPKHSWDIALEQLLALNPEAIDNVVEKPTRLIWEITLNPYEVSFSAREQKQSASGWSKGRTVSLKRLRENPQQISYLTEQDRALCHAISVAQGWYSNQKEYYLSGAKALLAAKNAPNLYLENALAAPISLSQKEPELLVTQQGSHYILSIANVPSIDDSQSAQPFSIYESAAGHYEFTLFDAQHLKIAKIIGEEGLAIPIAAKDKVLASVNAIAPLLNIHSDLAELDTGLATVLADEHLYINVQPFHEGLEFNCYTMPFGEQGPAFKPSIGSAKITTEINQTRIATTRDLMKEQQQLDQLDTLCPAFLNMHDNQLALPDLQSALEALEQLELTCTDPNSPLAIKLRWPKGKKFHLSKPLQSQHMQLAMTKKNQWFNLNGSLQVNDEKVIELKALLALIDNQQGRFIALDNQQILALSDELKQRLVSLNQATDQGQFHPLASLQVQEAITPMRMKTLDAWDEQTKKMHQANAITPTIPSTLQASLREYQLQGFDWASRLAHWGAGACLADDMGLGKTLQALALLLARAKDGPSLVIAPTSVCFNWQQEAKKFAPTLNLHLFSDTAAGEARQALLSGLGPFDCMIISYGLLQRESELLQQFTWHTIVADEAQALKNPLAKRTQAACALKAPFKIITTGTPIENNLTELWSLFRFINPGLLGNLKRFNQRFSIPIDNAKQDPTAAHKARAGLKTLIKPFMLRRMKHQVLTELPPRTDINLTVTLSEDEHAFYEALRQTAITKLTEASNHSNAAEQRIRMLAELTKLRQACCHPALIMPDTTLTSSKLAALNTLLIELQQNNHKALIFSQFVGHLALIKQHLDAQDISYQYLDGSTPTKERQQRVNAFQRGEGDVFLISLKAGGSGLNLTAADYVIHMDPWWNPAVEEQASDRAHRMGQQRPVTVYRLIAKGTIEEQIVAMHQHKRDLADTLLAGNEMATKLSVDDMLGLLKDTF

SEQ ID NO: 16826 - protein, 188 aa, Podocarpus neriifolius; identical to SEQ ID NO: 9926

SEQ ID NO: 16827 - protein, 182 aa, Novosphingobium aromaticivorans DSM 12444
MPDTLAAIPLTRIDGTADSLANHAGKVLLVVNVASKCGLTPQYEGLEALYKARKDEGLEVLGFPANDFGAQEPGSHEEIAEFCKLNYGVSFPLFAKADVTGPGKQPLYAALTEAAPTKQGPAQEFRDRLKGYGMTPTEDPEVLWNFEKFVIGRDGEVAARFAPGVTPDDPALLAAIDAELAK

SEQ ID NO: 16828 - protein, 231 aa, Brassica napus
MERGAPLSHYQLPKSNSGLNLDQHNNSIPTMTGSIGACDDKNKTILPQQQPSMPREQDQYMPIANVIRIMRKILPPHAKISDDAKETIQECVSEYISFVTGEANERCQREQRKTITAEDILWAMSKLGFDDYVGPLNVFINRYREFETDRGCSLRGESSFKPVYGGSGMGFHGPPPPGSYGYGMLDQSMVMGGGRYYHNGSGPDGSVGGGGGSSSSMNGMPVNYDQYGQYK

SEQ ID NO: 16829 - protein, 394 aa, Eremitis sp. Clark and Zhang 1343; identical to SEQ ID NO: 9929

SEQ ID NO: 16830 - protein, 209 aa, Brassica napus; identical to SEQ ID NO: 16818

SEQ ID NO: 16831 - protein, 394 aa, Glyceria grandis; identical to SEQ ID NO: 9930

SEQ ID NO: 16832 - protein, 620 aa, Campylobacter lari
MAKVIGIDLGTTNSCVSVYERGESKVIPNKEGKNTTPSVVAFTDKGEVLVGDSAKRQAVTNPEKTIYSIKRIMGLMINEEAAKEAKNRLPYHITERNGACAIEIAGKIYTPQEISAKVLMKLKEDAEAFLGEKVEDAVITVPAYFNDAQRKATKEAGQIAGLNVLRIINEPTAAALAYGLDKKESEKIVVYDLGGGTFDVTVLETGDNVVEVLATGGNAFLGGDDFDNKLIDFLANEFKDETGIDLKNDVMALQRLKEAAENAKKELSSANETNINLPFITADASGPKHLTKTLTRAKFESMIDGLVAETISKINEVVKDAGLDKSEVKEIVMVGGSTRVPLVQEEVKKAFGKELNKSVNPDEVVAIGAAIQGAVIKGDVKDVLLLDVTPLSLGIETLGGVMTKIIEKGTTIPTKKEQVFSTAEDNQSAVTINVLQGEREFSRDNKSLGNFNLEGIPPAPRGMPQIEVTFDIDANGILTVSAKDKATGKAQEIKITGSSGLSEEEINNMVKDAELHKEEDRKRKEAVEARNAADSLVHQVEKSLSELGDKVGDDDKANIQKALGELKETLKNANASKEEIESKMKALSEVSHKLAENMYKKEEPNAQKKKDDDVIDAEVE

SEQ ID NO: 16833 - protein, 393 aa, Hakonechloa macra; identical to SEQ ID NO: 9931

SEQ ID NO: 16834 - protein, 474 aa, Zea mays
RRPGIVGYLPFSSRFAAFYLSHLPSTALSLPLLSRGNWAIAATPTQVFVGRFASRQVFVGPSPGLRPSILRRRAPTRGWELQRGTGSMAGGAGNGSNEAVQAKGSGGDSSAAKPLPPCCVKARAAAPESEAKCHATVVSGWFTEPRSHCGKASKVQYYNNPMWPGEAHSLKVENILYQGKSPYQEVLVFESSTYGKVLVLDGIVQLTDKDECAYQEMITHLPLCSIPSPKKVLVIGGGDGGVLREISRHSSVESIDICEIDQLVIDICKEFFPHLSVGFEDPRVQLHVGDAVEFLRNAPEGTYDAIIVDSSDPIGPAQELVEKPFFETIARALRPGGVLCNQAESMWLHTHLIQDMLSICRETFKGSVRYAWASVPTYPSGVIGFLLCAKDGPPVNFLTPVNPIEEVEGATKAGREIRFYNSEMHMAAFVLPTFAKRELEAYCASTETEQAEEVAATAPQKLTAAPKRGITTAS

SEQ ID NO: 16835 - protein, 392 aa, Lithachne pauciflora; identical to SEQ ID NO: 9932

SEQ ID NO: 16836 - protein, 392 aa, Lolium perenne; identical to SEQ ID NO: 9934

SEQ ID NO: 16837 - protein, 230 aa, Zea mays
NKFHWVPRGRPGTIAPTRSASSSPASDPHSPPLLPPPPAPAPFSPLLASPRARFYKGFGGGARSLAMADDGGSHEGSGGGGGVREQDRFPPIANISRIMKKAVPANGKIAKDAKETLQECVSEFISFVTSEASDKCQKEKRKTINGDDLLWAMATLGFEEYVEPLKIYLQKYKEMEGDSKLSTKAGEGSVKKDAISPHGGTSSSSNQLVQHGVYNQGMGYMQPQYHNGET

SEQ ID NO: 16838 - protein, 394 aa, Lygeum spartum; identical to SEQ ID NO: 9935

SEQ ID NO: 16839 - protein, 503 aa, Arabidopsis thaliana
MVIGLSTMLEKTEALFASDHASVVSMNLFVALLCACIVLGHLLEETRWMNESITALIIGSCTGIVILLISGGKSSRILVFSEDLFFIYLLPPIIFNAGFQVKKKQFFRNFMTIMLFGAIGTLISFVIISFGAKHLFEKMNIGDLTIADYLAIGAIFSATDSVCTLQVLNQDETPLLYSLVFGEGVVNDATSVVLFNAIQRFDLTNINSAIALEFAGNFFYLFILSTALGVAAGLLSAFVIKKLYIGRHSTDREVALMMLLAYLSYMLAELFHLSSILTVFFCGIVMSHYTWHNVTDKSKVTTKHTFAAMSFLAEIFIFLYVGMDALDIEKWDVVRNSPGQSIGVSSILLGLILLGRAAFVFPLSFLSNLTKSSPDEKIDLKKQVTIWWAGLMRGAVSMALAYNQFTTSGHTKVLGNAIMITSTITVVLFSTVVFGLLTKPLVKHLQPSSKQSSTTALQITLRSSFHDPILHEPLLSTQGQSEYDPEQHVSFRMFWKSPSRFTH

SEQ ID NO: 16840 - protein, 394 aa, Melica cupanii; identical to SEQ ID NO: 9936

SEQ ID NO: 16841 - protein, 393 aa, Miscanthus sinensis; identical to SEQ ID NO: 9939

SEQ ID NO: 16842 - protein, 769 aa, Oryza sativa Japonica Group
MSGSGNSLDTVALIVGGGSDSSGIVGRKRRRCDLIRERWCCLCPVWCKEAQEVVVPGRGRNGARQRDGGGCALGTTEVLGRICNSSVEKAEERETVIPAISNTEKMGEKQQKSIPRDRKRKGELDPAADYVKDLWDAFYVTAESTHLDTSEVNNKKQLDNCNHDIHVYEDLGHVCHECGLVVRKADSLFHYQWKKASRKRTNVNEVCLKKVGSDAISLSEDFIFSDIAIHPRHAKNIRPHQLEGFKFLVNNLVTDEPGGCILVHAPGSGEIFMLISFIQGFMARHFTARPLVVLPEGILGTWKREFQQWQVEDIPLYDFDSIKADNRVEQLEVLKSWSSKRSILFVGSKHFTQIVCDDRDENAVAECRDTLLMVPSLLILDEGHTPSIDETDMLQSARKVQTPCKVVMSGTLFHNHVKEVFNTLDLVRPGFLKTETFWPIVTRMMGQLEISSARSITEISESMEDTLLNDDNFTRKVNVIRSLGELTKDVLHYCKGEDLNEFPVLLDFSVFLELSPKQKDILCKLEEDHGMLKTSAVGAALYVHPCLSEISEANDVDRDDRVDSLVNSINLGDGVKARFFLNILALANSAGEKLVAFSQYTLPMKFLERLLVKEMGWHVGKEIFVINGDTSMEDGQLAMDQFNGSADAKVLFGSIKAFGEGISLVGASRIVILDVHLNPSVTRQAIGSTFRPGQKKKVFVYRLVAADSPEEKAHETAFNKEVIPKLWFQWSGRCTTEDFKLNQVCIDGSRDELLETDVIRQDIKALYQR

SEQ ID NO: 16843 - protein, 388 aa, Molinia caerulea; identical to SEQ ID NO: 9940

SEQ ID NO: 16844 - protein, 387 aa, Nardus stricta; identical to SEQ ID NO: 9941

SEQ ID NO: 16845 - protein, 901 aa, Nostoc punctiforme PCC 73102
MRILKIQTLRGPNYWSIRRHKLIVMRLDLETLAETPSNEIPGFYEGLVEALPSLEGHYCSPGCRGGFLMRVKEGTMIGHIVEHVALELQELAGMHVGFGRTRETATPGIYQVVIEYQNEEAGRYAGRAAVRLCQSIVDRGRYPKAELEQDIQDLKDFTRDASLGPSTEAIIKEAEKRGIPWMPLEARFLIQLGYGVNQKRMQATMTDNTSILGVELACDKEATKRILAAAGAPVPRGTVINFLDDLEQAIEYVGGYPIVVKPLDGNHGRGITIDIRTWEEAEAAYEAARQVSRSIIVERYYVGRDHRVLVVNGKVVAVAERVPAHVIGNGRSTISELIEETNLDPNRGEGHDNVLTKIELDRTSYQLLERQGYTLNSVPPKGTICYLRATANLSTGGSAVDRTDEIHPENLWLAQRVVKIIGLDIAGLDIVTTDISRPLREVDGVIVEVNAAPGFRMHVAPSVGIPRNVAGAVMDMLFPNEQSSQIPILSVTGTNGKTTTTRLLAHIYKQTGKVVGYTTTDGTYIGDYLVEAGDNTGPQSAHVILQDPTVEVAVLETARGGILRSGLGFEAANVGVVLNVAADHLGIGDIETIEQLANLKSVVAEAVFPDGYAVLNADDHRVAAMSEKTKANIAYFTMNPDSELVRKHIQKGGVAAVYESGYLSIVKGDWTHRIERAENIPLTMGGRAPFMIANALAASLAAFVQNVTIEQIRSGLKTFRASVSQTPGRMNLFNLGNYHALVDYAHNAASYEAVGSFVRNWTTGQRIGVIGGPGDRRDEDFVTLGKLAAQIFDYIIVKEDDDTRGRLRGSAAQLIIQGITQVKPDSRYESILDETQAINKGLDMAPDNSLVVILPESVTRAIKLIKLRGLAKEETHQQNTGTAIADSQNGIAPSSVVNTLL

SEQ ID NO: 16846 - protein, 488 aa, Oceanobacillus iheyensis HTE831
MKLSKKQIVLILVGALLLGFAGAYGGFQLAQDNNQQSSQSSVENSSTNEDDSNGQSELTGDLSKVSQAYDIIKENYLEDVEDKQLVEGAIEGMLATLEDQHTSYLDVEMMQQFNEQIESSFEGIGAEVSMVNGNVTIVSPMKGSPAEESGLRPNDQVLKVDGESLEGLNLNEAVAQIRGEKGSEVVLEIQRSGVTEPFEVTIVRDTIPVETVYSETKEVDGKLTGIIEITNFSEKTGDEFDQQLTELENQGIEGLVIDVRGNPGGLLNVAEDILKHLVPKDLPILQIEDGEGQVEEVYSDLEEKKEYPISVMIDEGSASASEILAVAMKDLGYDIVGETSYGKGTVQQAVPMGDGSSIKLTTLKWLSPKGEWINEEGVEPTIEEKQPEYYYSIPIQVEEPFSLDETSEEIANMQVMLTGLGYDTGRTDGYFDEQTAEAVKDFQADNDLEATGEVDSETGGLIETQLVEKIRNGEDDQQLDTSLEELYQ

SEQ ID NO: 16847 - protein, 287 aa, Nostoc punctiforme PCC 73102
MPQLQAKSLEMRTPQATKTAVLVIGGAEDKVHGREILRTFFGRAGASKAYITIIPSASREPAIIGGRYIRIFEEMGAQKVEILDIREREQCEASQIKASLEACSGVFLTGGDQLRLCGVLADTPAMEIIRQRVRAGQLTLAGTSAGAAVMGHHMIAGGGSGESPNRSLVDMATGLGFIPEVIVDQHFHNRNRMGRLISAIAAHPDRLGIGIDEDTCAVFERDGWLQVMGKGSVTIVDPTEATHTNEPHVGANEPLTVHNLRLHILSYGDRFHLYQRTVLPAVHRISS

SEQ ID NO: 16848 - protein, 448 aa, Streptococcus suis 89/1591
MVVTTADIKRDIKEKNVTFLRLMFTDIMGVMKNVEIPATEEQVEKVLSNKVMFDGSSIEGFVRINESDMYLYPDLNTWTIFPWGDENGRVAGLICDIYTTEGEPFAGDPRGNLKKSLRRMEKEGFSSFNLGPEPEFFLFKMDEQGNPTLEVNDKGGYFDLAPTDLADNTRREIVNVLTEMGFEVEASHHEVAVGQHEIDFKYADVLKACDNIQIFKLVVKTIARKHGLYATFMAKPKFGIAGSGMHCNMSLFDKDGNNAFFDPEDPRGMQLSETAYHFLGGLIKHAYNYTAITNPTVNSYKRLVPGFEAPVYIAWAGKNRSPLVRVPASRGMGTRLELRSVDPTANPYLAMAVLLEVGLDGIEHKIEAPAPVESNIYAMSDEERREAGITDLPSTLHNALKALRKDDVVRSALGDHIYTNFLEAKKIEWASYATYVSQWEIDNYLDMY

SEQ ID NO: 16849 - protein, 495 aa, Haemophilus somnus 129PT
MKKLTALWDIDEQLDSVHRDIELQEMILDSRLANTGCLFVAIKGHRVDGREFIMQAIQNGASAVLFETDLVEQHLTVSFEQNIPLIAYYELSKHLSHIADRFYSSPSQRLTLVGVTGTNGKTTIAQLLAQWTQILGHTSAVMGTIGNGLFGQIKEASNTTGSAIEIQSSLDKFIRQGADFAAIEVSSHGLVQHRVEALTFRAGIFTNLSRDHLDYHHTMENYAQAKKRLFSELNCQHKILNVDDEIGATWLIELSKDDPDVVAVSCRADYQPDTKNWLKATALSFHSKGTTIEFASSWGNGILSSPLIGGFNVSNLLLVLATLLSLGYDIGKLLATVRQLTGVCGRMEMLSAKHKATVIVDYAHTPDALENALQSAAVHCQGKLWCIFGCGGDRDRGKRPLMAAIAEKFADSVIVTDDNPRTENPEQIMQDILTGFQQSSAVQIIHQREQAIKTALQSAVENDVVLIAGKGHENYQIIGTTKYHFSDQEIVKKYF

SEQ ID NO: 16850 - protein, 474 aa, delta proteobacterium MLMS-1
MVKRVRTAIIVMGFSGLVAEILLLRELLIVFAGNELSIGIILANWLILEAFGCYFAGGRAAESPRRVEVFTVITILFSLFLVAAVVATRLLKEMLGVSIGENVGFLPMFYSSFLILLPVSVLHGALFTSGCRIYADCAPAAGPDASPAGRVYVYETVGTIIGGIACTYLLIPYLDAMHTTAWLALLNFVVCLALLAPHRRRRRLTGMVAAALGGLILLTGTLLATGQVERLHWYTVAGQWQNLNVVEYRNSPYGNICVIENEGQYIYFLDGIATILTPIPDIPFVEEFVNVPLLTHRQPEKILILSGGAGGIINEALKHPSLAAVEYAEQDPLLFELLRKFPTELTESELDDPRVKIHHTDGRLLLQTTPRQYDLIFIGILEPSSLQTNRYFTREFFTLARERLNPGGILVFGLPGSMTYLNDELKNLNSSVFHTVKSVFPHVRVIPGDGHNLFLSSDAPDVAAVDAHQIMARL

SEQ ID NO: 16851 - protein, 169 aa, Capsicum chinense
MASQSNRPQSVYDFTVKDAKGKDVDLSIYKGKVLIIVNVASQCGLTNSNYTDMTELYRKYKDKGLEILAFPCNQFGGQEPGSIEDIQQMVCTRFKAEYPVFDKVDVNGDNAAPLYKFLKSSKGGFFGDGIKWNFSKFLIDKEGNVVDRYSPTTSPASMEKDIKKLLGVA

SEQ ID NO: 16852 - protein, 419 aa, Triticum aestivum
  misc_feature (157)..(157): Xaa can be any naturally occurring amino acid
MAGGDEEATTALLPPPAGSAEAERPPPPPADRLGVGYLIFFTLGAGFLLPWNAYITAVDYFSYLYPGAPVDRVFSVSYMLSCLLPLLLIVLVFPKSSAPARINTGLTLFTLALLVVPVMDAVYVRGTPRLYGAFDVTVAATVMCGVADALVQGGAIXGFAGELPERYMQAVVAGTAASGVLVSALRVITKASFPQDPNGLRQSAILYFMVGMVVMIICIVCYNVARRLPVVVYYKNIKQRAQKAEVGGGMTGPAWRSTLWSIVGTVKWYGIGVVLIYAVTLSIFPGFITEDVHSEALKDWYPIMLISAYNVFDLIGKCLPAIYLLQNSNVAVAGSFARLLFYPLFYGCLHGPSYFRTEIPVTVLTCLLGLTNGYLTSVLMILAPKAVPIHHSETAGIVIVLFLVVGLVLGSFVAWFWVI

SEQ ID NO: 16853 - protein, 454 aa, Halobacterium sp. NRC-1
MTNGDSSSSALTDNERAVLDDIEAQGIDFLRLQFTDILGTVKNVSIPAHQAEKAFTEGIYFDGSSIEGFVRIQESDMRLDPDPETFAVLPWRSNGDGGSARLICDVVDREGNAFAGGPRQVLKNVLARADDMGYSVSIGPEPEFFLFEKDDDGNATTTAHDQGGYFDLAPKDLASDIRREIIFTLEAMGFEIEASHHEVARGQHEINFKYDDALTTADNIATFRAVVRAVAEQHDVHATFMPKPIGEINGSGMHSHISLFDEDGENVFADNDDEFNLSETAYQFMGGVLEHAPAFTAVTNPTVNSYKRLVPGYEAPVYIAWSGVNRSALIRVPDAAGVSARFEIRSPDPSCNPYLALAAVIAAGLDGIDTDADPGDAVREDIYEFDEDKRDAYGIDTLPGHLGDAVTALESDPVMQDALGEHVCEKFAEAKRHEYAEYKASVSEWETDRYLEKF

SEQ ID NO: 16854 - protein, 159 aa, Listeria monocytogenes str. 4b F2365
MNVHDFSEKAMNGKEIALSDYKGKVLLIVNTASKCGLTPQLEGLEAMYKKLGGANFEILGFPCNQFLRQDPGSDEEILEFCQMNYGVTFQMFSKIKVKGKDASPLYKYLTEQTGGKKVEWNFAKFLIDENGEVVERFPSKMKPADFEDKVEALVAKVNN

SEQ ID NO: 16855 - protein, 492 aa, Shewanella violacea
MQLNDLLAPWLHYSGSESFNGMSLDSRAITVGDLFIAVPGHLVDGRKFIQAAFEQGAVAALVHTDEPTEHGQVLSEASASLQILFFQLNQELSAIGAQAYPLAPQRLKLIGVTGTNGKTSITQLMAQLVALQGKQASLMGTLGNGLWGDLVESGNTTADPITIAAQLQDFDLAGADLCAMEVSSHGLIQNRVAAVPFDVAVFTNLSRDHLDYHGTMQAYGDAKKRLFKFSSLQSSLINLDDEVGRQWLSEEQEAKHLGFSICSAHADAASIYTQDNHLHHQGVMAMLVWPEGRAKLASPLLGSFNLSNLVAALGALYLIGYDMQALVASVPLLTPVAGRMERFTTANGVTIVVDYAHSPDAIEQALKALRGHCEGQLWCLFGCGGDRDKGKRPLMAQAAETYADKVMITSDNVRSESPEAIIEDILVGLEAPERVLTQVNREQAIRQVVALAKPGDLVLLAGKGHETYQEVAGVRFEYDERALAKSLAGEQI

SEQ ID NO: 16856 - protein, 336 aa, Atropa belladonna
MEVNHNNGSTTKIILKNGSICNGDVNGNSHTHKKIENKLVECTNSIKPGWFSEFSALWPGEAFSLKIEKLLFQGKSDYQDVMLFESATYGKVLTLDGAIQHTENGGFPYTEMIVHLPLGSIPSPKKVLIIGGGIGFTLFEVSRYPTIDTIDIVEIDDVVVDVSRKYFPYLAAGFDDPRVTLIIGDGAAFVKAAQPGYYDAIIVDSSDPIGPAKDLFERPFFEAVAKALRPGGVVCTQAESIWLHMHLIKQIIANCRQVFKGSVNYAWTTVPTYPTGVIGYMLCSTEGPEVNFKNPVNSIDKDTSHVKSKGPLKFYNSDIHKAAFILPSFARDLVEF

SEQ ID NO: 16857 - protein, 717 aa, Ustilago maydis 521
MASTPPPLSQGVGYGVVVGLGALFAIVVVGISRSLVRYAGISKDAEEFSVARRSLGTGLIAAAVISSWTWSTTLLSSVSTAYNYGVAGAMLYASGNCTQIVLFSTLAIQLKRRAPSVHTYLELVRIRFGTLPHLTYIFFALATNILVCSSVLLGGAAAINSITGMNTYAALFLLPASVVAYTLRGGLRSTILADYLHTVIIFVILFVFWLRAYATFPEIGSPAAMYDLLINASKNINIDGNYDGSPLTLKTEGGQYFAWLSAFEYTGVVFLDASFHQKGVAAMPEAAFPGYLIGGLAWFSIPFCLATTAGLAALALETTYPGFPTYPNRIPKADVSAGLVLPYAAQALLGKGGSAAVLLLMFMSCTSAISAQMVGVSTVVSYDIFKTYFKPTISADNLLRTNQYVVAGFGLFAAAFGSLLHGIGLDLGIIYNLTGIFTCAGLSPLIFTFFDTRLHPAVVFPGIWINFASGVAVWLSVAYHTSGVINLASVGGVVPCLAGSGTGIGVGLVLSTLSVLFFPREFAWSRIPEILEQQHKEQVEKIAKHHHSLPSSVGDSSPEEKPSSISSTDPRLQLEIIENDPSYNRARLDRAFRTAVAASLTIFVVITIIWPFSLYRDYIFSRTFFQGWVIVSFIWAIAAFTGVGIFPLIQGIPVAKVILANIRSKVSSSGQLDTTPAQRADDRRGSAGTTTNTSSGHASPEKANNNLQSQTNAAYIA

SEQ ID NO: 16858 - protein, 293 aa, Candida glabrata CBS 138
MSEITHPTIVDGWFREISDTMWPGQAMTLKVEKVLHHEKSKYQDVLIFKSTNYGNVLVLDNVIQATERDEFSYQEMITHLAMNSHPNPKKVLVIGGGDGGVLREVVKHECVEEAWLCDIDEAVIRLSKEYLPDMAGVYSHPKVKTHIGDGFQFLRDYQNTFDVIITDSSDPEGPAETLFQQSYFELLRSALTDKGVITTQAESMWLHLPIIKDLKKACSQVFPVAEYAYTTIPTYPSGTIGFMVCSKDASANVKKPLREMTEEQEKKLLRYYNKRIHESSFVLPTWVAKELEL

SEQ ID NO: 16859 - protein, 358 aa, Triticum aestivum
NKFVQKSRLVPVRNSRDIVDPRVRPYRIFGSSPPMSNFDPAKMLTDSGKLHTLDKLLRQLRAENHRVLLFAQMTKMLDILEDYMNFRKFKYFRLDGSSAISDRRDMVRNFQNRNDIFVFLLSTRAGGLGINLTAADTVIFYEIDWNPTQDQQATDRTHRLGQTKEVTVYRLICKDTIEEKILQRAKQKNAVQELVMKGKQVQDDHLMRQEDVVSLLLDDTQIAHKLKELSMQAKDRLKRRRAKAIKVDKEGDLKLEDLDDPTEEPVEQDNPTGKKKRRVHKKPPKSQDNNGADGDVPKSGPVEDEEHIASLRPKRSKRLVRSTGEDKESVAACDVEKPADAAENNDNNDAEELQYPSA

SEQ ID NO: 16860 - protein, 1249 aa, Vitis vinifera
  misc_feature (556)..(556): Xaa can be any naturally occurring amino acid
  misc_feature (955)..(955): Xaa can be any naturally occurring amino acid
  misc_feature (985)..(985): Xaa can be any naturally occurring amino acid
MDCNASEDDGNIRKIRSVSGFDSLESDSLHAFRQCNNDPDAALNFDRDAPPVTVKRTITSTGARILTQIKQEKSDEVEGAEFLHGLKTKIKVKEEPDLNVDGIFEKEVGSNPPQVDRTWALVPHKEIMKMSFDEFLRATDAHVERKDLERSEEGQGHHGLKDKIKVKEELDVGLLGSDSIRSLVKRPPDGFLESYDDFVKPKRTKDEHRKENSQWHPGLKEKIQIKEELDATLLGTDSARNENSGMRGDSFVQSRNGKVISDGNGRNTQSVPYHNPQKPFNVKKETAQFLPYGNPQKNFNVKQGKIEDRPVTSVLVEDGDFPEEPDWFLVGRTPIIGLSTTKGRKLVDNEIVHFSFPSADLRNKCNSKWVAKAASAASAIVRFSTKRSGEIGRLPMEWTKCIIPLVNSSKVKVLGRCVAAPIILRLMQEIVLYVSFYIHQSVFTEGNKSSWRLDAAPNIDSTVYPLPTLFKLLQIKPFQEAEFTPEELDSRKRKLNLEGDTDEAPSMLPIVKQKKGCQQYPEQNNDEQALSESSLNKLVGAADQYNLEEMESPSTXMCDLRPYQKQALYWMSELEKGSDAEQAPKTLHPCWAAYQICDEVWHIGFGEIALTMLHGRRASAIYVNIFSGEATTQLPTAIHMARGGILADAMGLGKTVMTIALILARPGRRSSGVHKLLTEAADDTEEAEKNTDSHTKAPLNVKGGTLIVCPMALLSQWKDELETHSKPESISIFIHYGGDRTNDPKVISEHDVVLTTYGVLTSAYKNDENSSIFHRVEWYRVVLDEAHTIKSSKTLSAQAAFALPSHCRWCLTGTPLQNNLEDLYSLLCFLHVEPWCNWAWWYKLIQKPYECGDQRGLRLIKAILRPLMLRRTKDTKDKEGRPILVLPPTDIQVIECEQSEAEHDFYDALFKRSKVRFDQFVEQGRVLHNYASILELLLRLRQCCNHPFLVMRCSXLRMCSRGDTQQYADLSKLARKFLENNPCSXTSNHSIPTRAFVEEVVGGIRRGENTECPICLESADDPVLTPCAHLMCRECLLSSWRTPLSGLCPICRKLLKKTDLITCPSENRFRIDVEKNWKESSKISELLHCLERISQSRIGEKSIVFSQWTSFLDLLEIPLRRRGIGFLRYDGKVVQKQRERILKEFSETEEKMVLLMSLKAGGVGLNLTAASNVFLMDPWWNPAVEEQAIMRIHRIGQERTVRVRRFIVKDTVEERMQQVQARKQRMITGALTDEEVRTARIEELKMLFR

SEQ ID NO: 16861 - protein, 260 aa, Silene diclinis
KVEKILFQGKSKYQDVMVFQSSTYGKVLILDGVIQLTERDECAYQEMISHLPLCSIPNPKKVLVIGGGDGGVLREVARHSSVEHIDICEIDEMVVTVSKEFFPEVAVGYDDPRVNLHIGDGVAFLKAAPEGSYDAVIVDSSDPIGPAKELFEKPFFESVAKALRPGGVVCTQAESIWLHMHIIEDIVSNCREISKGSVNYAWTTVPTYPSGVIGFMVCSTDGPAVDFKNPVNPIDKTEDEKRPLKFYNAEIHSAAFCLPS

SEQ ID NO: 16862 - protein, 649 aa, Lilium longiflorum
MAGKDEVPAIGIDLGTTYSCVGVWQHDRVEIIANDQGNRTTPSYVAFTDTERLIGDAAKNQVAMNPTNTVFDAKRLIGRHFSDPSVQADMKLWPFKVISGTRDKPMIVVQYKGEEKQFAVEEVSSMVLVKMREIAVAYLGRSINNAVVTVPAYFNDSQRQATKDAGAIAGLNVLRIINEPTAAAIAYGLDKKATSPSEKNVLIFDLGGGTFDVSLLTIEEGIFEVKATAGDTHLGGEDFDNRMVNHFAQEFKRKHKKDISGNPRALRRLRTACERAKRTLSSTAQTTIEIDSLCDGIDFYSTITRARFEELNIDLFRKCMDPVEKCLTDAKMDKSSVHDVVLVGGSTRIPKVQQLLQDFFNGKELCKSINPDEAVAYGAAVQAAILSGERNEKVQDLLLLDVTPLSLGLETAGGVMTILIPRNTTIPTKKEQVFSTYTDNQSGVLIQVYEGERTRSKDNNLLGKFELLGISPAARGVPQITVTFDIDANGILNVSAEDKTTRQKNKITITNDKGRLSKEEIEKMVKEAERYKSEDEKHKKQVAAKNALETYIYNMRNAVNDERITSKLPAEVKKKIDDAMEGAIQWLEANQLAEVDEFDDKRRELEGICKPVIEKLCQGIGVIADRMGMNEDGTASRTGGAGPKIEEVD

SEQ ID NO: 16863 - protein, 609 aa, Mycoplasma suis
MVAKKEIILGIDLGTTNSCVAVIESGAPKVLETPEGKRTVPSVVSFKGKEIIVGDSAKRQMVTNKNTIFSIKRLIGTDQKVTAQGKEYSPEEISAYILAYIKEYAEKRVGEKVQKAVITVPAYFNDSQRQSTKNAGKIAGLEVVRIVNEPTAAALAYGLDKKEEEKKILVYDLGGGTFDVSLLEVSDGTFQVLATSGDNNLGGDDWDQRIIKWLLESIQKEHSVDLSKDNLVMQRLKEAAEKAKIELSSVQQTQIMLPFLSMVRGEPLNVDFSLTREQFQLFTKDLLERTIAPVKDAIAESKLSLSDINEVLLVGGSTRMPAVQELVEKLTGKKPNLSINPDEVVALGASVQAGILAGDIKDILLLDVTPLTLSIETLGGVATPLIPRNSTIPIDKKQLFSTAVDNQPSVDIHVVQGERPMANQNKSLGTFTLQGIKQAPKGMPKIEVSFSIDANGILTVKAEDKDTGKQNNITINQASGLSEEEINKIIREAEENLEQDKKVKEEIEIKNEAESWISMLENQMKDDSSKIPEASIEETKKLIEEFKKLLEEKKYDELKAKMNQLKEMSQKMMQEVYQQQQAAGGQAASEEKGPEGEDIKEVELNEESN

SEQ ID NO: 16864 - protein, 688 aa, Streptococcus thermophilus CNRZ1066
MHLSLALLVLLFSLILSNVINRIFPRLPLPLIQIIFGVGIGFLLKGEVFELETELFLAFIIAPLLFREGEESDITSILRNWRLILFLIFPVIFVSTLGIGYLAKAVLPASVPLSACLALGAALGPTDFVAYSAISKRFSFPKWISYILQGEGLLNDASGLVAFRVAVTALTTGSFSLLDASWNLVISVIGGFLVGLITALLNRLFLTILDNMDAADVTGALLLELVLPISSYFVAEEIHVSGIIAVVVAGISLASRFKKITVFDAKLDSVSHTIWGTITFVLNGMVFFLLGTELPTLATPVLSSSTYDTLWMLLAIVLLTAIMFGIRFVMISAVFAQRAWRTKRSLKKIWKVATILTFSGVKGTVSIATILLLPVANMTALEHSLLTFTVAGVTLLSFLIGILILPRLATGPAHTTNHYMQIAILNDVVRELEKDLKQSANQGAVYATIDNYNQRLEDLILEQESNDVKEELANIRIMIMEIESEGLEYAYKKGKISELEYNLYQRYIKGLERRINRGFVSSLSYASAVFVLGLRRILHLAFTFKFRFEQEENRRGPQLTEENRDHMTELYLTNTEQVLEALSNLEGVYHSDLLSYLKRSRIREAEIIQSGAFVERVITHLNPDYVDEMLRGYFLERKIIIEYEQAGRISSRYAKQLRKEVNTLENYSLKETSNTLIYDMINLARRGA

SEQ ID NO: 16865 - protein, 694 aa, Arabidopsis thaliana; identical to SEQ ID NO: 14875

SEQ ID NO: 16866 - protein, 620 aa, Campylobacter lari
MAKVIGIDLGTTNSCVSVYERGESKVIPNKEGKNTTPSVVAFTDKGEVLVGDSAKRQAVTNPEKTIYSIKRIMGLMINEEAAKEAKNRLPYHITERNGACAIEIAGKIYTPQEISAKVLMKLKEDAEAFLGEKVEDAVITVPAYFNDAQRKATKEAGQIAGLNVLRIINEPTAAALAYGLDKKESEKIVVYDLGGGTFDVTVLETGDNVVEVLATGGNAFLGGDDFDNKLIDFLANEFKDETGIDLKNDVMALQRLKEAAENAKKELSSANETNINLPFITADASGPKHLTKTLTRAKFESMIDGLVAETISKINEVVKDAGLDKNEVKEIVMVGGSTRVPLVQEEVKKAFGKELNKSVNPDEVVAIGAAIQGAVIKGDVKDVLLLDVTPLSLGIETLGGVMTKIIEKGTTIPTKKEQVFSTAEDNQSAVTINVLQGEREFSRDNKSLGNFNLEGIPPAPRGMPQIEVTFDIDANGILTVSAKDKATGKAQEIKITGSSGLSEEEINNMVKDAELHKEEDRKRKEAVEARNAADSLVHQVEKSLSELGDKVGDDDKANIQKALDELKETLKNANASKEEIESKMKALSEVSHKLAENMYKKEEPNAQKKKDDDVIDAEVE

SEQ ID NO: 16867 - protein, 1171 aa, Oryza sativa Indica Group; identical to SEQ ID NO: 9963

SEQ ID NO: 16868 - protein, 394 aa, Nassella viridula; identical to SEQ ID NO: 9964

SEQ ID NO: 16869 - protein, 160 aa, Borrelia hermsii DAH
MSVYGFRARLASGPEISLSDYIRKVLLIVNVASDCSYTNQYQDLEVLYKIYKRRGFLILGFPCNQFGFQEPGSNNEILKFCRTVYNVSFPIFSKIDVNGENAHPLYRYLREKSPEEFKGDIRWNFTKFLINREGNVVGRYTPKIAPIKMKDDIEKWLSVI

SEQ ID NO: 16870 - protein, 394 aa, Olyra latifolia; identical to SEQ ID NO: 9966

SEQ ID NO: 16871 - protein, 550 aa, Chrysanthemum x morifolium
MVFDSGLLLGKLGSTSLGTSEYSSIVSMNLFVALLCACIVIGHLLEENRWMNESITALVIGICTGVIILLISGGTNSHILVFSEDLFFIYLLPPIIFNAGFQVKKKHFFRNFMTIMLFGAVGTMISFTIISIGAINIFSRMNIGSLELGDYLAIGAIFSATDSVYTLQVLNQDQTPLLYSLVFGEGVVNDATSVVIFNAVQNFDLSQFNTTVVFQLIGNFFYLFLTSTLLGAGAGLLSAYVIKKLYFGRHSTDREVAIMILMAYLSYMLAELFYLSGILTVFFCGIVMSHYTWHNVTEKSRVTTKHAFATLSFIAELFIFLYVGMDALDIEKWRYVKDSPGTSVEVSAILLGMVLVGRVAFVFPLSFLSNLTKKGHQEKIDFRQQVLIWWAGLMRGAVSMALAYNQFTKEGHTTLQGNAYMITSTITVVLFSTMVFGLITQPLVRLLLPAPKGLNRMISSEPTTPKSFLVPFLGNGQDSEADLGHHIARPTSLRMLLSTPSHTVHHYWRKFDNAFMRPVFGGRGFVPFVPGSPTEQSTHHLVDEEDEERN

SEQ ID NO: 16872 - protein, 393 aa, Panicum capillare; identical to SEQ ID NO: 9969

SEQ ID NO: 16873 - protein, 394 aa, Pariana radiciflora; identical to SEQ ID NO: 9970

SEQ ID NO: 16874 - protein, 469 aa, Arabidopsis thaliana
MSEEVPQQFPSSKRQLHPSLSSMKPPLVAPGEYHRFDAAETRGGGAVADQVVSDAIVIKSTLKRKTDLVNQIVEVNELNTGVLQTPVSGKGGKAKKTSRSAKSNKSGTLASGSNAGSPGNNFAQAGTCRYDSSLGLLTKKFINLIKQAEDGILDLNKAADTLEVQKRRIYDITNVLEGIGLIEKTLKNRIQWKGLDVSKPGETIESIANLQDEVQNLAAEEARLDDQIRESQERLTSLSEDENNKRLLFVTENDIKNLPCFQNKTLIAVKAPHGTTLEVPDPDEAGGYQRRYRIILRSTMGPIDVYLVSQFEESFEDIPQADEPSNVPDEPSNVPDEPSNLPSTSGLPENHDVSMPMKEESTERNMETQEVDDTQRVYSDIESHDFVDGIMKIVPPDLDMGVDYWFRSEVGEVSITDMWPDESGPDWNQMITFDQDHAGPSDNKILEQPQTPSSPTPEESTATRSPTGS

SEQ ID NO: 16875 - protein, 157 aa, Mesorhizobium septentrionale
MFADGVMFDGSSIAGWKAINESDMVLMPDPDTVHMDPFFAQSTMVILCDILDPVSGESYNRDPRGTAKKAEAYMKSEGIGDTIYVGPEAEFFVFDDVKYKADPYNTGFRLDSTELPSNDDTDYETGNLGHRPRIKGGYFPVPPIDSAQDMRSEMLTV

SEQ ID NO: 16876 - protein, 353 aa, Pennisetum alopecuroides; identical to SEQ ID NO: 9973

SEQ ID NO: 16877 - protein, 350 aa, Physcomitrella patens subsp. patens
MGGHNNSDVGEQQQQAAKKPAGSSLNAAELIAQSANATPAPSTARANLSSIVPGWFSEISAMWPGEAHSLKVEKVLFEGKSDYQDVVVFESATYGRVLVLDGVIQLTQRDECAYQEMITHLPLCSIPNPKKVLVVGGGDGGVLREIARHKSVDQIDICEIDKMVVDVAKEFFPDVAVGFEDPRVNLHIGDGVAFLREVPEGTYDAIIVDSSDPVGPAQALFERPFYRTLDQALRPGGVICTQAESLWVHMPIIKNIVSACRHTFKGSINYAWTSVPTYPSGLIGFMLCSKAGPAVNFLEPCNPIDQAIDPEKSSRRPMKFYNSAMHAAAFSLPQFAKVELEHLLTPPPSS

SEQ ID NO: 16878 - protein, 395 aa, Peridictyon sanctum; identical to SEQ ID NO: 9975

SEQ ID NO: 16879 - protein, 159 aa, Burkholderia vietnamiensis G4
MSTLYSFSAETLAGEPVSLDAYRGKVLLIVNTASECGFTPQYAGLQKLYDRYAARGFSVLGFPCNQFGKQEPGDATQIGAFCERNYGVTFPMFAKIDVKGDHAHPLYRYLTDEAPGILGLKAIKWNFTKFLIGRDGRIVKRYAPSTKPEEIAADIDKLL

SEQ ID NO: 16880 - protein, 76 aa, Arabidopsis thaliana
  misc_feature (15)..(15): Xaa can be any naturally occurring amino acid
ALDIDKWRSLSYTPXTSIAGSGILMGLGMVGRAAIVFLVSFLSNLAKKNQSEKINFNMHVVFLWTGLMRGSVSIAL

SEQ ID NO: 16881 - protein, 509 aa, Geobacillus kaustophilus HTA426
MSKIIGIDLGTTNSCVAVLEGGEVKVIPNPEGNRTTPSVVAFKNGERLVGEVAKRQAITNPNTIISIKRHMGTDYKVEIEGKQYTPQEISAIILQYLKSYAEDYLGEPVTRAVITVPAYFNDAQRQATKDAGRIAGLEVERIINEPTAAALAYGLDKEEDQTILVYDLGGGTFDVSILELGDGVFEVKATAGDNHLGGDDFDQVIIDYLVNQFKQEHGIDLSKDKMALQRLKDAAEKAKKELSGVTQTQISLPFISANENGPLHLEMTLTRAKFEELSAHLVERTMGPVRQALQDAGLTPADIDKVILVGGSTRIPAVQEAIKRELGKEPHKGVNPDEVVAIGAAIQGGVIAGEVKDVVLLDVTPLSLGIETMGGVFTKLIERNTTIPTSKSQVFTTAADNQTTVDIHVLQGERPMAADNKSLGRFQLTGIPPAPRGVPQIEVTFDIDANGIVHVRAKDLGTNKEQSITIKSSSGLSEEEIQRMIKEAEENAEADRKRKEAAELRNEAD

SEQ ID NO: 16882 - protein, 394 aa, Phalaris arundinacea; identical to SEQ ID NO: 9977

SEQ ID NO: 16883 - protein, 394 aa, Pharus lappulaceus; identical to SEQ ID NO: 9980

SEQ ID NO: 16884 - protein, 388 aa, Phragmites australis; identical to SEQ ID NO: 9982

SEQ ID NO: 16885 - protein, 394 aa, Pseudosasa japonica; identical to SEQ ID NO: 9983

SEQ ID NO: 16886 - protein, 208 aa, Alpinia hainanensis
MGRGKIEIKRIENSTNRQVTFSKRRNGIIKKAREISILCEAQVSVVIFSSSGKMSEYCSPSTTLPKILERYQTNSGEKLWDAKHESLSVEIERVKKENDNMQIELRHLKGEDLNSLYPKELIPIEEALQIGLTSVREKQMEIWKMHKKNEKLLEEENKQLTYMLHHQQLAMDGSVQGLELGYKDREFAPQMTLAFRVQPIQPNLHESK

SEQ ID NO: 16887 - protein, 483 aa, Lactobacillus johnsonii NCC 533
MAEVEPNNSHQNKEISNNKKKHLPKYAQFLLTGIAGAAIGAGLTFGIMEVKELKSPFYQVEKVYEQLQGSYYKKVSPQTLRQGAINGMLNSLNDPFSEGLSGANQEQVNNILEGSSFGGVGIQMAVRNNKVVVDSIVADSPASKSTIKPGDEIVAVNNKKVSAAQFSKVAPLVRGKIGTKVTLKLRRANSTFNVTLKRAKISQSSLTKRTEGNATIITITQFDVNTAKDLKSALKSIDTKKYPKLIIDLQDNPGGAMDAALKSASYFLPNNKIIMQYQDRKQKEVIRSDKKLSGGFHTNLKPIILINANTASASEIFTAALVQNHRAVSVGQTSYGKGTVQEVGQTQDSEYKYTIAKWLTPDGTWINQKGLKPTYPVPESSLAKLPQFQSMSILKKSMTGVDVATLQQYLTALGYMPKHVTGVFNDETKNAVIEFQKAHGLTADGIVNGQVQAQLYLAVAQKLQDDNPALKKAMSLNLKEMED

SEQ ID NO: 16888 - protein, 469 aa, Pseudomonas aeruginosa PAO1
MSYKSHQLIKDHDVKWVDLRFTDTKGKQQHVTMPARDALDDEFFEAGKMFDGSSIAGWKGIEASDMILMPDDSTAVLDPFTEEPTLILVCDIIEPSTMQGYERDPRNIAKRAEEYLKSTGIGDTVFVGPEPEFFIFDEVKFKSDISGSMFKIFSEQASWNTDADIESGNKGHRPGVKGGYFPVPPVDHDHEIRTAMCNALEEMGLVVEVHHHEVATAGQNEIGVKFNTLVAKADEVQTLKYCVHNVADAYGKTVTFMPKPLYGDNGSGMHVHMSISKDGKNTFAGEGYAGLSETALYFIGGIIKHGKALNGFTNPSTNSYKRLVPGFEAPVMLAYSARNRSASIRIPYVSSPKARRIEARFPDPAANPYLAFAALLMAGLDGIQNKIHPGDAADKNLYDLPPEEAKEIPQVCGSLKEALEELDKGRAFLTKGGVFTDEFIDAYIELKSEEEIKVRTFVHPLEYDLYYSV

SEQ ID NO: 16889 - protein, 719 aa, Yarrowia lipolytica CLIB122
MALKHELPQGAGYGMVIGIGFVFAAGIVITMRIAKRYLNEHAQTSEMFMVANRSVGVGLTASAVFSSWMWATETLWGSVVGYNFGVSGPFWFSVGLAFHISLMCVVGIQVKLKAPNGHTMLEIVKFRYGVVGHVVFMALCLINNIMSCSWMILSAAAGIASLTGMHIVASCMLIPFGVILYTVAGGLRATFLTDYVHTVIALVLLIYFSLAILLHKEIGGIHQLYDMVIQYGESTKILGNYQGSLMTFKSEEAIYFAIVHTIGNLGLVIMDTAFWQKSLAANLEATVPGYMIGSICIFCVSWALGTICGLSARVIENLPIFPNYPNGFSAADIGNGLVLPYTVAALLGKGASAGIVIMLFMTVTSTTSAEMIAVSSIISFDLYRTYINPNASDRAIIAVSHAGVIFFGLFAAGFAVMLHYVGTDLNWLGYFLGIVITPGVFPAILTLLWKRQSRAAATLAPVLGLGTGMGLWLGTAKYYSGHISVETLGASLPNVWGNIGSMFGSLLYSVVITLLRPEDFDWAKFQKITLVNEDKIADSESHTEGELVNTEKGDESGTHTPEFPLDKNESSPETSIHEHSATIPTLTNENFFQPRLVIPPEIRGFKRFLWYIGWEVAPTDYSNHPLGQDALPIIFKWYKVAVIFSTTIFLITWVVWPFPMYRNWVWGKSFFTGWVVVAIFWNFLAFVCVCIFPLWNGRHTLYKVFNGLYQDIFHRKRKE

SEQ ID NO: 16890 - protein, 183 aa, Escherichia coli CFT073
MQDSILTTVVKDIDGEVTTLEKYAGNVLLIVNVASKCGLTPQYEQLENIQKAWADRGFVVLGFPCNQFLEQEPGSDEEIKTYCTTTWGVTFPMFSKIEVNGEGRHPLYQKLIAAAPTAVAPEESGFYARMVSKGRAPLYPDDILWNFEKFLVGRDGKVIQRFSPDMTPEDPIVMESIKLALAK

SEQ ID NO: 16891 - protein, 128 aa, Brassica napus
  misc_feature (15)..(15): Xaa can be any naturally occurring amino acid
  misc_feature (36)..(36): Xaa can be any naturally occurring amino acid
  misc_feature (47)..(47): Xaa can be any naturally occurring amino acid
  misc_feature (59)..(59): Xaa can be any naturally occurring amino acid
  misc_feature (72)..(72): Xaa can be any naturally occurring amino acid
  misc_feature (87)..(87): Xaa can be any naturally occurring amino acid
  misc_feature (98)..(98): Xaa can be any naturally occurring amino acid
  misc_feature (110)..(110): Xaa can be any naturally occurring amino acid
  misc_feature (114)..(114): Xaa can be any naturally occurring amino acid
  misc_feature (116)..(118): Xaa can be any naturally occurring amino acid
  misc_feature (121)..(123): Xaa can be any naturally occurring amino acid
MANTATSPGGDGGEXSGGSVREQDRYLPIANISRIXMKKALPPNGKXIGKDAKDTVQEXVSEFISFITSEAXSDKCQKEKRKTGMGXGILLWAMSTLXEFEDYLEPLKVXLARXRXXXEGXXXGLRGN

SEQ ID NO: 16892 - protein, 1129 aa, Phragmites australis
MGEPDDAVLFVGVSLVLGIASRHLLRGTRVPYTVALLVLGVALGSLEYGTQHGLGKLGSGIRIWANINPDLLLAVFLPALLFESSFSMEIHQIKRCMAQMVLLAGPGVIISTFLLGTAVKLTFPYNWSWKTSLLLGGLLSATDPVAVVALLKELGASNKLSTIIEGESLMNDGTAIVVYQLFYRMVLGRTFDAGSIMKFLSQVSLGAVALGLAFGIVSVLWLGFIFNDTIIEIALTLAVSYIAFFTAQDSLEVSGVLTVMTLGMFYAAFAKTAFKGDSQQSLHHFWEMVAYIANTLIFILSGVVIADGVLQNNVHFERHGTSWGFLVLLYVFVQISRVVVVGVLYPLLCHFGYGLDLKEATILVWSGLRGAVALSLALSVKRTSDAVQPYLKPEVGTMFVFFTGGIVFLTLILNGSTTQFLLHMLGLDKLSATKLRILKYTRYEMLNKALEAFGELRDDEELGPADWVTVKKYITCLHDLGDEPEHPHDVSDKDDRMHTMNLRDIRVRLLNGVQAAYWGMLEEGRINQATANILMRSVDEAMDLVSRQPLCDWKGLQSSVQFPNYYRFLQMSKLPRKLITYFTVERLESGCYMCAAFLRAHRIARRQLHDFLGDSEVARIVIDESNAEGEEARKFLEDVRITFPQVLRVLKTRQVTYSVLTNLSGYIQNLQKTGLLEEKEMVHLDDALQTDLKNLKRNPPLVKMPRVSELLNNHPLVGALPAVSRDLLLSNTKETVRGHGTNLYREGSRPTGIWLVSIGVVKWTSQRLSSRHSLDPILSHGNTLGLYEVLIGKPYICDMITDSVVHCFFIEAEKIEQLRQSDPSIEVFLWQESALVIARLLLPQIFEKMAMHEIRVLIAERSTMNISIKGEDIELEQNYIGILLEGFLKTKNQNLITPPGVLLPSNTDLNLFGLESSAMNHIDYCYTAPSYQVEARARIIFFEIGRVSETQPDLQRTVSLLAQTHEPPRTLSKEHSGLLSWPESFRKSRGPHNVSFAEMRNQPGSLSARALQLSMYGSMINDMHSGQGHRRLRHRMQATNQKRSSSYPRVPSRPSNARPLLSVQSEGSNMKRMATPKEAGEAPAPATSAGQRRRKAMEANNSSDDESAGEEVIVRIDSPSMLSFRQPSK

SEQ ID NO: 16893 - protein, 1129 aa, Phragmites australis
MGDPDDAVLFVGVSLVLGIASRHLLRGTRVPYTVALLVLGVALGSLEYGTQHGLGKLGSGIRIWANINPDLLLAVFLPALLFESSFSMEIHQIKRCMAQMVLLAGPGVIISTFLLGTAVKLTFPYNWSWKTSLLLGGLLSATDPVAVVALLKELGASNKLSTIIEGESLMNDGTAIVVYQLFYRMVLGRTFDAGSIIKFLSQVSLGAVALGLAFGIVSVLWLGFIFNDTIIEIALTLAVSYIAFFTAQDSLEVSGVLTVMTLGMFYAAFAKTAFKGDSQQSLHHFWEMVAYIANTLIFILSGVVIADGVLQNNVHFERHGTSWGFLVLLYVFVQISRVVVVGVLYPLLRHFGYGLDLKEAAILVWSGLRGAVALSLALSVKRTSDAVQPYLKPEVGTMFVFFTGGIVFLTLILNGSTTQFLLHILGLDKLSATKLRILKYTRYEMLNKALEAFGELRDDEELGPADWVTVKKYITCLHDLGDEPEHPHDVSDKDDRMHTMNLRDIRVRLLNGVQAAYWGMLEEGRINQATANILMRSVDEAMDLVSRQPLCDWKGLQSSVQFPNYYRFLQMSKLPRKLITYFTVERLESGCYMCAAFLRAHRIARRQLHDFLGDSEVARIVIDESNAEGEEARKFLEDVRITFPQVLRVLKTRQVTYSVLTHLSGYIQNLQKTGLLEEKEMVHLDDALQTDLKKLKRNPPLVKMPRVSELLNNHPLVGALPAVSRDLLLSNTKETVRGHGTNLYREGSRPTGIWLVSIGVVKWTSQRLSSRHSLDPILSHGNTLGLYEVLIGKPYICDMITDSVVHCFFIEAEKIEQLRQSDPSIEVFLWQESALVIARLLLPQIFEKMAMHEIRVLIAERSTMNIYIKGEDIELEQNYIGILLEGFLKTKNQNLITPPGVLLPSNTDLNLFGLESSAMNHIDYCYTAPSYQVEARARIIFFEIGRVWETQPDLQRTVSLLAQTHEPPRTLSKEHSGLLSWPESFRKSRGPHNVSFAEMRNQPGSLSARALQLSMYGSMINDMHSGQGQRRQRHRMQATNQKHSSSYPRVPSRPSNARPLLSVQSEGSNMKRMAAPKEAGEAPAPATSAGQRRRKAMEANNSSDDESAGEEVIVRVDSPSMLSFRQPSK

SEQ ID NO: 16894 - protein, 495 aa, Magnetococcus sp. MC-1
MRHTLKSLAANIDQLTVLGDGETVITQLCNDSRLCEPGSLFAALPGSRVDGRDYIPQALELEAAAILHDGSLSLDPNTPQLIHPDPRRALAHVAAAFYGQPQKKLKSIVITGTNGKSTVASMCATILRHSGQRVGLISTVGIDIEGQKLATSHTTPDAITLYGLLADMVQANCRWLVMEASSHALDQHRLVGIQPDVALFTNLSRDHLDYHGDMGAYFQAKAKLFREYHPKLALLPSSDAHAQALNSICREQGVAVQTYGRVARQGVYAKQISAAIDCTRFVLQQKNQSAPVTLMAPGRFNLDNALAAASACLGMDLDLETVAEGLNRFQSVAGRVQAIHEGQNFAVLVDFAHTPDALDRLLSSLRPLTPGKLWVVFGCGGDKDSGKRPHMGECAGRLAHFPIITDDNPRSEDPAAIRAQIMRGCRNRNAQEMDDREDAITYALVNAQPGDTVVIAGKGHEQSQIGAHGATPFSDAEVARQALRGRAAMSRDFSA

SEQ ID NO: 16895 - protein, 340 aa, Atropa belladonna
MAFRNGSTTTTITTINHPNDASTIPKNGTNITTTLLKNGSTNEFGCIKPGWFSEFSQLWPGEAFSLKIEKLLFQGKSDYQDVMLFESATYGKVLTLDGAIQHTENGGFPYTEMIVHLPLGSIPSPKKVLIIGGGIGFTLFEVFRYPTIENIDIVEIDNVVVDVSRKFFPYLAAGFDDPRVTLVLGDGAAFVKAAQAGYYDAIIVDSSDPIGPAKDLFERPFFEAVAKALRPGGVVCTQAESIWLHMHIIKQIIDNCRQVFKGSVNYAWTTVPTYPTGVIGYMLCSTKGPQVDFRNPVNPIDKKTSHIKSKGPLKFYNSDIHKAAFILPSFARNLMESELD

SEQ ID NO: 16896 - protein, 338 aa, Hyoscyamus niger
MEVISNHNNGSTTKIILKNGSICNGNVNGNSHSNEKTENKLVECTNSIKPGWFSEFSALWPGEAFSLKIEKLLFQGKSDYQDVMLFESATYGKVLTLDGAIQHTENGGFPYTEMIVHLPLGSIPSPKKVLIIGGGIGFTLFEVSRYSTIEKIDIVEIDDVVIDVSRKYFPYLAAGFDDPRVTLIVGDGAAFVKAAQPGYYDAIIVDSSDPIGPAKDLFERPFFEAVTKALRPGGVVCTQAESIWLHMHLIKQIIANCRQVFKGSVNYAWTTVPTYPTGVIGYMLCSTEGPEVNFKNPVNSIDKDTTHVKSKGPLKFYNSDIHKAAFILPSFARDLVEF

SEQ ID NO: 16897 - protein, 160 aa, Bacillus cereus E33L
MTVYDFSAKTITGEEKSLKDYEGKVLLIVNVASKCGFTPQYKGLQEVYDKYKGQGLEILGFPCNQFGGQEPGTEADITSFCELNYGVNFPMFAKIDVKGDKAHPLYTYMTEQAPGLLGMKAVKWNFTKFLIGKDGKVVGRFAPQTKPVDLEVEIEKVLGE

SEQ ID NO: 16898 - protein, 435 aa, Photobacterium sp. SKA34
MIENNFAITATFVAYLLGMLAIGYIAYKRTSSSSDYFLGGRSLGPWPSAISAGASDMSGWLLLGLPGYAYLAGFESLWLAGGLLLGTWLNWLICAKRLRTYSITADNSLTLPEFLSRRFDDNSKLIQTISAFFILLFFLFYTSAGLVAGGKLFETVFGLDYTLALFIGTLCVVTYTLFGGFLAVSWTDLVQGLLMSAALLIVPIAAMNADPVQLMETLHNKNPELLTLWTDIKGQPLSFMVILSLLGWGLGYFGQPHILARFKATRSNKDIGTARRIAVIWTALSMIGALLVGLTGIIYVDGNLGGELADSEKVFMLLVNAIFHPVMAGILLAAILAAIMSTADSQLLVSSSALAEDFYKQVFRPQASSKEIVMVGRIAVIALSIVAFILALNPDSSVLGLVSYAWAGFGAAFGPVLLLSLYWSGMNRYGAIAVS

SEQ ID NO: 16899 - protein, 179 aa, Ostreococcus tauri
MGAFQSKRPSSVIDACDTFDQLPSEPLHDGTAFDFASTRGGVVLVVNVASYCGLTTKNYEDFKLLQDRFGDDLTILAFPCNGFMFQEPFGAKSACAFARKRGFKGMVFQKVKVNGSGASETFKWLKSRAGVRRIEWNFGKFLIDRDGKVRGYYPPQTRPRVFEGDVEALIGEKATEALA

SEQ ID NO: 16900 - protein, 478 aa, Bifidobacterium longum DJO10A
MTELKSKEDVEALINKEGIEYVSVRFTDLIGVQQHFTVPASEFLKDAFTDGMPFDGSSVQGFQAINESDMKLVPDVETSFVDPFRKHKTLDVAFSIVDPLTDEPYSRDPRQVAGKAEAYLKSTGIADTASFAPEAEFFIFDKVRFENSMQRSFYEVDSIEAPWNSGVDVEEDGTPNIGFKNRVKKGYFPVPPIDHTQDLRDDMVANLQKVGLILERSHHEVAGAGQQEINYRFNTLQHAGDDLMKYKYVVHETAALAGKAATFMPKPIADDNGTGMHCHQSLWKDGKPLFYDEKGYAGLSDLARWYIGGLIKHSSSVLAFTNPSLNSYHRLVPGFEAPVNLVYSARNRSAAIRIPLAGTSPAAKRIEFRAPDPSCNPFLAFSAQLMAGLDGILNHIEPPEPVDKDLYELPPEEHAGIKQVPSSLAEAMDALEEDHDFLTAGDVFTDDLIETWIGLKRDEIDQARLAPTPLEYELYFHI

SEQ ID NO: 16901 - protein, 1410 aa, Arabidopsis thaliana
MECIGKRVKSRSWQRLQAVNKRKKMETVAPVTSPPKKRRQKKPKNYDSDIEDITPTCNDSVPPPQVSNMYSVPNNSVKESFSRIMRDLNVEKKSGPSSSRLTDGSEQNPCLKERSFRVSDLGVEKKCSPEITDLDVGIPVPRFSKLKDVSEQKNTCLMQKSSPEIADLDLVISVPSSSVLKDVSEEIRFLKDKCSPEIRGLVLEKSVPGEIEILSDSESETEARRRASAKKKLFEESSRIVESISDGEDSSSETDEEEEENQDSEDNNTKDNVTVESLSSEDPSSSSSSSSSSSSSSSSSSSDDESYVKEVVGDNRDDDDLRKASSPIKRVSLVERKALVRYKRSGSSLTKPRERDNKIQKLNHREEEKKERQREVVRVVTKQPSNVVYTCAHCGKENTGNPESHSSFIRPHSIRDEIEDVNNFASTNVSKYEDSVSINSGKTTGAPSRPEVENPETGKELNTPEKPSISRPEIFTTEKAIDVQVPEEPSRPEIYSSEKAKEVQAPEMPSRPEVFSSEKAKEIQVPEMPSIPEIQNSEKAKEVQANNRMGLTTPAVAEGLNKSVVTNEHIEDDSDSSISSGDGYESDPTLKDKEVKINNHSDWRILNGNNKEVDLFRLLVNSVWEKGQLGEEDEADELVSSAEDQSQEQAREDHRKYDDAGLLIIRPPPLIEKFGVEEPQSPPVVSEIDSEEDRLWEELAFFTKSNDIGGNELFSNVEKNISANETPAAQCKKGKHDLCIDLEVGLKCMHCGFVEREIRSMDVSEWGEKTTRERRKFDRFEEEEGSSFIGKLGFDAPNNSLNEGCVSSEGTVWDKIPGVKSQMYPHQQEGFEFIWKNLAGTIMLNELKDFENSDETGGCIMSHAPGTGKTRLTIIFLQAYLQCFPDCKPVIIAPASLLLTWAEEFKKWNISIPFHNLSSLDFTGKENSAALGLLMQKNATARSNNEIRMVKIYSWIKSKSILGISYNLYEKLAGVKDEDKKTKMVREVKPDKELDDIREILMGRPGLLVLDEAHTPRNQRSCIWKTLSKVETQKRILLSGTPFQNNFLELCNVLGLARPKYLERLTSTLKKSGMTVTKRGKKNLGNEINNRGIEELKAVMLPFVHVHKGSILQSSLPGLRECVVVLNPPELQRRVLESIEVTHNRKTKNVFETEHKLSLVSVHPSLVSRCKISEKERLSIDEALLAQLKKVRLDPNQSVKTRFLMEFVELCEVIKEKVLVFSQYIDPLKLIMKHLVSRFKWNPGEEVLYMHGKLEQKQRQTLINEFNDPKSKAKVFLASTKACSEGISLVGASRVILLDVVWNPAVERQAISRAYRIGQKRIVYTYHLVAKGTPEGPKYCKQAQKDRISELVFACSSRHDKGKEKIAEAVTEDKVLDTMVEHSKLGDMFDNLIVQPKEADLVEGFSILMP

SEQ ID NO: 16902 - protein, 494 aa, Archaeoglobus fulgidus DSM 4304
MIEENLVEFIEILMLATAVAVTVKFIRLPYTIALVLAGLFVGLAGLLPEVPLSREIVFFIFLPPLLFEAAMNMDLKELRENFGPIALIAFLGVVVTTTVVGFSLNWILGIPLALALIFGAMVSATDPVSVLATFKSISAPKKLSILIEGESVLNDGAAIVVFAIALEMMLKGVFDPLNAALDFAVVCVGGAAVGLAVGYLAYRILAKIDDALVEIAVTIVAAYLGFVLAERFHFSGVIAVVAAGLILGNYGRDFSMSPTTRVIMLDFWSVIVFLVNSIIFILIGVNTHITIFSAWKEILVAIAAVILARAFVVYPVMTYYRFPNLWKHVVFWGGLRGVIPVALALSFGNQLLSAMAFGVVLFSLLLQGISLEIFVKRKFVSESERELEEIIARYIAARSAKFELMKAVEQGRIVEPVAREMLPNLDAEIEELRSKLEEKIRGGMGSKLRKAAVKYVIDAKKSAVVDAMAGGLVSQEVALEIMRELDSKTAELME

SEQ ID NO: 16903 - protein, 958 aa, Saccharomyces cerevisiae
MAVISVKPRRREKILQEVKNSSVYQTVFDSGTTQMQIPKYENKPFKPPRRVGSNKYTQLKPTATAVTTAPISKAKVTVNLKRSISAGPTLNLAKKPNNLSSNENTRYFTIMYRKPTTKKHKTWSGDGYATLKASSDKLCFYNEAGKFLGSSMLPSDSDSLFETLFKAGSNEVQLDYELKENAEIRSAKEALSQNMGNPSPPTTSTTETVPSTKNDGGKYQMPLSQLFSLNTVKRFKSVTKQTNEHMTTVPKTSQNSKAKKYYPVFDVNKIDNPIVMNKNAAAEVDVIVDPLLGKFLRPHQREGVKFMYDCLMGLARPTIENPDIDCTTKSLVLENDSDISGCLLADDMGLGKTLMSITLIWTLIRQTPFASKVSCSQSGIPLTGLCKKILVVCPVTLIGNWKREFGKWLNLSRIGVLTLSSRNSPDMDKMAVRNFLKVQRTYQVLIIGYEKLLSVSEELEKNKHLIDMLVCDEGHRLKNGASKILNTLKSLDIRRKLLLTGTPIQNDLNEFFTIIDFINPGILGSFASFKRRFIIPITRARDTANRYNEELLEKGEERSKEMIEITKRFILRRTNAILEKYLPPKTDIILFCKPYSQQILAFKDILQGARLDFGQLTFSSSLGLITLLKKVCNSPGLVGSDPYYKSHIKDTQSQDSYSRSLNSGKLKVLMTLLEGIRKGTKEKVVVVSNYTQTLDIIENLMNMAGMSHCRLDGSIPAKQRDSIVTSFNRNPAIFGFLLSAKSGGVGLNLVGRSRLILFDNDWNPSVDLQAMSRIHRDGQKKPCFIYRLVTTGCIDEKILQRQLMKNSLSQKFLGDSEMRNKESSNDDLFNKEDLKDLFSVHTDTKSNTHDLICSCDGLGEEIEYPETNQQQNTVELRKRSTTTWTSALDLQKKMNEAATNDDAKKSQYIRQCLVHYKHIDPARQDELFDEVITDSFTELKDSITFAFVKPGEICLREQ

SEQ ID NO: 16904 - protein, 423 aa, Gloeobacter violaceus PCC 7421
MEANLDKPNDARPVRLRRHAVWAAALASAALAGCSAEVLSSTAGPAPKEVLTETWTYINNEYVDPKFNGQDWWSVRQTYLEKPAETSEQVYEQIASMLKTLDDPYTRFLNPKQFKSLQTTTSGELSGVGLQITLDTESELPVVIAAVEGSPAFRGGVKARDLIVEIDGRPTKGQALDDVADRLRGKIGSQVNVGLRRGERTFDVTLTRETIQVNPVTSQLKRLDGRPIGYIRLSQFNGNAAQQVRQAIEKLEAQDAAGYILDLRSNPGGLLEAGVEIARYWLTPGQTVVYTVNRQGERDQARAQRAPLTARPLVVLIDGGSASASEILAGALQDNRRAQLVGTKSFGKGLIQAIHPLKDGSGLAVSIARYQTPSRRDIHKQGIEPDVKVELPKSFSLEQLATDADSQYQAGAKALSRALASSQ

SEQ ID NO: 16905 - protein, 392 aa, Asarum canadense; identical to SEQ ID NO: 10002

SEQ ID NO: 16906 - protein, 620 aa, Campylobacter lari
  misc_feature (155)..(155): Xaa can be any naturally occurring amino acid
MAKVIGIDLGTTNSCVSVYERGESKVIPNKEGKNTTPSVVAFTDKGEVLVGDSAKRQAVTNPEKTIYSIKRIMGLMINEEAAKEAKNRLPYHITERNGACAIEIAGKIYTPQEISAKVLMKLKEDAEAFLGEKVEDAVITVPAYFNDAQRKATKXAGQIAGLNVLRIINEPTAAALAYGLDKKESEKIVVYDLGGGTFDVTVLETGDNVVEVLATGGNAFLGGDDFDNKLIDFLANEFKDETGIDLKNDVMALQRLKEAAENAKKELSSANETNINLPFITADASGPKHLTKTLTRAKFESMIDGLVAETISKINEVVKDAGLDKSEVKEIVMVGGSTRVPLVQEEVKKAFGKELNKSVNPDEVVAIGAAIQGAVIKGDVKDVLLLDVTPLSLGIETLGGVMTRIIEKGTTIPTKKEQVFSTAEDNQSAVTINVLQGEREFSRDNKSLGNFNLEGIPPAPRGMPQIEVTFDIDANGILTVSAKDKATGKAQEIKITGSSGLSEEEINNMVKDAELHKEEDRKRKEAVEARNAADSLVHQVEKSLSELGDKVGDDDKANIQKALDELKETLKNANASKEEIEGKMKALSEVSHKLAENMYKKEEPNAQKKKDDDVIDAEVE

SEQ ID NO: 16907 - protein, 193 aa, Taxus baccata; identical to SEQ ID NO: 10003

SEQ ID NO: 16908 - protein, 620 aa, Campylobacter lari
MAKVIGIDLGTTNSCVSVYERGESKVIPNKEGKNTTPSVVAFTDKGEVLVGDSAKRQAVTNPEKTIYSIKRIMGLMINEEAAKEAKNRLPYHITERNGACAIEIAGKIYTPQEISAKVLMKLKEDAEAFLGEKVEDAVITVPAYFNDAQRKATKEAGQIAGLNVLRIINEPTAAALAYGLDKKESEKIVVYDLGGGTFDVTVLETGDNVVEVLATGGNAFLGGDDFDNKLIDFLANEFKDETGIDLKNDVMALQRLKEAAENAKKELSSANETNINLPFITADASGPKHLTKTLTRAKFESMIDGLVAETISKINEVVKDAGLDKSEVKEIVMVGGSTRVPLVQEEVKKAFGKELNKSVNPDEVVAIGAAIQGAVIKGDVKDVLLLDVTPLSLGIETLGGVMTKIIEKGTTIPTKKEQVFSTAEDNQSAVTINVLQGEREFSRDNKSLGNFNLEGIPPAPRGMPQIEVTFDIDANGILTVSAKDKATGKAQEIKITGSSGLSEEEINNMVKDAELHKEEDRKRKEAVEARNAADSLVHQVEKSLSELGDKVGDDDKANIQKALDELKETLKNANASKEEIEGKMKALSEVSHKLAENMYKKEELNAQKKKDDDVIDAEVE

SEQ ID NO: 16909 - protein, 475 aa, Oryza sativa Japonica Group
SKLRSLLNNFHRPTWTNMRLMDSLDKLFKWHAHPSVLLMTYSSFLGMTKQDSKVRNRYREFIAEVLMNNPGLLILDEGHNPRSNKSKLRKLLMKVKTEFRILLSGTAFQNNFEEYFNTLCLARPRFIGDIMSELVPERKRETVGRRAKHQEAVARRAFVEKVGQKIESDNKHIRSDGISLLNKLTRGFIDSFEGAKLINLPGIHVYTVFMKPTDIQEEMLAKVTMPKLGSSRFPLEVELLITIGSIHPWLIKTTKAVSTFFSPAEVKKVERYKRDFAAGCKAKFVIDLLHKSSFRGERVLIFCHNVSPITFLVKLIEMVFGWRLGEEVLVLQGDQELPVRSDVMDKFNGDSAGKRKVLIASTTACAEGISLTGASRLVMLDSEWNHSKTRQAIARAFRRGQERTVYVYLLVASGTWEEEKYNSNRRKAWMSKMVFLGRYVDDSSQNRVTDIDDEVLKELADEDHTGTFHMIVKQD

SEQ ID NO: 16910 - protein, 607 aa, Streptococcus thermophilus LMG 18311
MSKIIGIDLGTTNSAVAVLEGTEPKIIANPEGNRTTPSVVSFKNGEIIVGDAAKRQAVTNPDTVISIKSKMGTSEKVSANGKEYTPQEISALILQYLKGYAEEYLGEKVTKAVITVPAYFNDAQRQATKDAGKIAGLEVERIVNEPTAAALAYGLDKTDKEEKILVFDLGGGTFDVSILELGDGVFDVLATAGDNKLGGDDFDQKIIDYMVEEFKKENGIDLSTDKMALQRLKDAAEKAKKDLSGVTSTQISLPFITAGEAGPLHLEMTLTRAKFDDLTRDLVERTKTPVRQALSDAGLSLSDIDEVILVGGSTRIPAVVEAVKAETGKEPNKSVNPDEVVAMGAAIQGGVISGDVKDVVLLDVTPLSLGIETMGGVFTKLIERNTTIPTSKSQVFSTAADNQPAVDIHVLQGERPMAADNKTLGRFQLTDIPAAPRGVPQIEVTFDIDKNGIVSVKAKDLGTQKEQTIVIQSNSGLTDEEIERMMKDAEANAEADAKRKAEVELRNEVDQAIFATEKTIKETEGKGFDTERDAAQSALDELKKAQESGNLDDMKAKLEALNEKAQALAVKLYEQAAAAQQAQAGAEGAQATDNSGDDVVDGEFTEK

SEQ ID NO: 16911 - protein, 444 aa, Bacillus subtilis subsp. subtilis str. 168
MAKYTREDIEKLVKEENVKYIRLQFTDILGTIKNVEIPVSQLGKALDNKVMFDGSSIEGFVRIEESDMYLYPDLNTFVIFPWTAEKGKVARFICDIYNPDGTPFEGDPRNNLKRILKEMEDLGFSDFNLGPEPEFFLFKLDEKGEPTLELNDKGGYFDLAPTDLGENCRRDIVLELEEMGFEIEASHHEVAPGQHEIDFKYAGAVRSCDDIQTFKLVVKTIARKHGLHATFMPKPLFGVNGSGMHCNLSLFKNGVNAFFDENADLQLSETAKHFIAGIVKHATSFTAVTNPTVNSYKRLVPGYEAPCYVAWSAQNRSPLIRIPASRGISTRVEVRSVDPAANPYLALSVLLAAGLDGIKNKLEAPAPIDRNIYVMSKEERMENGIVDLPATLAEALEEFKSNEVMVKALGEHLFEHFIEAKEIEWDMFRTQVHPWEREQYMSQY

SEQ ID NO: 16912 - protein, 163 aa, Herminiimonas arsenicoxydans
MNTQTVYDFSSHSLSGAAVDLAQYRGKVLLIVNTASKCGFTPQYEGLEAVYRQFRERGVEVLGFPCNQFGGQEPGDAAAIGTFCEKNYGVTFPLFAKIDVNGDNADPLYQYLKHAAPGLLGSEAIKWNFTKFLIRKNGTVYKRYAPQTKPEELIEDINTLLAE

SEQ ID NO: 16913 - protein, 1117 aa, Adiantum capillus-veneris; identical to SEQ ID NO: 10006

SEQ ID NO: 16914 - protein, 386 aa, Oceanobacillus iheyensis HTE831
MKTAVHFGAGNIGRGFIGLLLYQSGYQTIFIDVNNQVIDEINKQKSYHVYLAGKEKQELTVNHITGINSIKEPDAVTEAIVKADVVTTAVGPTILPVIAKAISKGLQERTKQNNSPLNIIACENMVGGSSLLKEHVFESLEAHKIGEFDRLYGFPDAAVDRIVPNQTNKNLLDVMVEPYYEWVVEKKKIVGEVPPIFGITYVDDLAPYIERKLFTVNTGHAIPAYLGTHLGYDTIVEAMKDLRIDDTIYGALAESGEALIHAYGFNREMHQEYVSKIIQRFQNPYISDDVKRVARGPIRKLGAKDRLVKPALMYIEYTGKIPVYLAKTIAAALLFNNDEDREAIELQKKISATGYQQAFVEVSGCDSDSILTKKVIEQLRLLQNKK

SEQ ID NO: 16915 - protein, 403 aa, Halobacillus dabanensis
MHGFHDVFIQILLLLAISVSVIAIAKLLKEPDSIALVLVGLVLGLTELPIIEDAERYITQSEVFQATIISLFLPILLGDATLKLPFHHLFSQKKTVLGLAFVGTFVSSICIGTAAYFLLDLPLAVAFTFAALMSATDPISVLSIFKSLGVPQKMSTVMEGESLFNDGIAVVLFKIASIYLLTYMEMGWAGLGSGVFLFLKFAIGGALVGLVLGYFFSQVIRVFDDYPLEVAFSALLFFGSYFIAEHFHTSGVIAVVVGGFVFGDYGAKIGMSKETKTNINTFWDSVTLIANALIFLMVGLEIRNIDLAGNWGVIVGAILIVLVGRTIAVYLGTGWVQELSSKERLLINWGGLRGSLSVALALSLPMDFAGRDQVLLLTFSVVLFSLIVQGLTLKPLIKKLGMI

SEQ ID NO: 16916 - protein, 468 aa, Oceanobacter sp. RED65
MSENTLKLIKDNDVKWVDLRFTDTKGKEQHVTIPAKDVDEEFFEVGQMFDGSSISGWKGINESDMILLPDDTTPFLDPFTEDATLCLRCDIIEPSTMQGYERDPRSVAKRAEEYLQSTGLGDTAFFGPEPEFFIFDDVRWGADMSGTFYKINSEEAAWNTEAVMEGGNMGHRPSVKGGYFPVPPVDSSHDMRAAMCNTMMAIGLDVEVHHHEVATANQNEIGVKFNTLVKKADEVQMLKYVVHNVAHAYGKTATFMPKPVVGDNGSGMHVHQSFWKDGENQFAGDSYSGLSETALYYIGGIIKHAKALNAFTNPSTNSYKRLIPGFEAPVMLAYSARNRSASIRIPYVASPKGKRVEARFPDPTANPYLAFAAMLMAGIDGVKNKIHPGDAADKDLYDLPAEEAAQIPQVAGSLREALGALEADMDFLVEGGVFTKDMIEAYIELKMEDVYRVEHTTHPAEFDMYYSL

SEQ ID NO: 16917 - protein, 117 aa, Streptococcus constellatus subsp. pharyngis
MTKIYDFSIFDQNNRSISLEIYKGNVLLIVNTATGCGLTPQYKGLQHLYTRYQNQGFEILDFPCNQFMGQAPGTAEEINRFCSLHYQTTFPRFAKVKVNGKEADPLYIWLKEQQAGP

SEQ ID NO: 16918 - protein, 547 aa, Prosthecochloris aestuarii DSM 271
MSRIFQALVMIAVLSFGILLGSRLQNDSLGPVFGYQKKLFDVINLISSRYVDDVDPDSLAESGIKGMVESLDPHTVYLSQDKVSYSKAEFKGNFEGIGIEFDIIRDTLVVVAPLTSGPSQDAGIMAGDRILAIDSVSAIGIASSAVVASLRGEKGSSVHLDLYRPFSKRFLHLDVKRDRIPTYSIDASFLLDDRTGYIRLSRFVSTTSDEFVQSLSDLKSRGMKGLVVDLRGNPGGYLEEAVEIADEFLAPDSLIVYTKSRHGGPDEIKYRSTADGDYQSGPLVILVDRGSASAAEILAGALQDSRRAPVVGELTFGKGLVQRQFDLYDGSAIRLTIARYYTPLGRQIQRDYDNGARGREDYYEDHSSLLASESFFDDREDLAVATDVDGVRVYRTDAVSLGEVADSAAVKAFGGVGGIIPDFWVLDDRPGEYFVMLQEKGVIEETALAVLDDSASRVRELGGSLDLFLEKYAENQRVERYLEMVCRRKNMTIDALELEREKTRIMIAVKSRIARQLFGIGGQIRVLVEEADKVLLVAREQLYKEVL

SEQ ID NO: 16919 - protein, 1129 aa, Phragmites australis
MGDPDDAVLFVGVSLVLGIASRHLLRGTRVPYTVALLVLGVALGSLEYGTQHGLGKLGSGIRIWANINPDLLLAVFLPALLFESSFSMEIHQIKRCMAQMVLLAGPGVIISTFLLGTAVKLTFPYNWSWKTSLLLGGLLSATDPVAVVALLKELGASNKLSTIIEGESLMNDGTAIVVYQLFYRMVLGRTFDAGSIIKFLSQVSLGAVALGLAFGIVSVLWLGFIFNDTIIEIALTLAVSYIAFFTAQDSLEVSGVLTVMTLGMFYAAFAKTAFKGDSQQSLHHFWEMVAYIANTLIFILSGVVIADGVLQNNVHFERHGTSWGFLVLLYVFVQISRVVVVGVLYPLLRHFGYGLDLKEAAILVWSGLRGAVALSLALSVKRTSDAVQPYLKPEVGTMFVFFTGGIVFLTLILNGSTTQFLLHILGLDKLSATKLRILKYTRYEMLNKALEAFGELRDDEELGPADWVTVKKYITCLHDLGDEPEHPHDVSDKDDRMHTMNLRDIRVRLLNGVQAAYWGMLEEGRINQATANILMRSVDEAMDLVSRQPLCDWKGLQSSVQFPNYYRFLQMSKLPRKLITYFTVERLESGCYMCAAFLRAHRIARRQLHDFLGDSEVARIVIDESNAEGEEARKFLEDVRITFPQVLRVLKTRQVTYSVLTHLSGYIQNLQKTGLLEEKEMVHLDDALQTDLKKLKRNPPLVKMPRVSELLNNHPLVGALPAVSRDLLLSNTKETVRGHGTNLYREGSRPTGIWLVSIGVVKWTSQRLSSRHSLDPILSHGNTLGLYEVLIGKPYICDMITDSVVHCFFIEAEKIEQLRQSDPSIEVFLWQESALVIARLLLPQIFEKMAMHEIRVLIAERSTMNIYIKGEDIELEQNYIGILLEGFLKTKNQNLITPPGVLLPSNTDLNLFGLESSAMNHIDYCYTAPSYQVEARARIIFFEIGRVWETQPDLQRTVSLLAQTHEPPRTLSKEHSGLLSWPESFRKSRGPHNVSFAEMRNQPGSLSARALQLSMYGSMINDMHSGQGQRRQRHRMQATNQKHSSSYPRVPSRPSNARPLLSVQSEGSNMKRMAAPKEAGEAPAPATSAGQRRRKAMEANNFSDDESAGEEVIVRVDSPSMLSFRQPSK

SEQ ID NO: 16920 - protein, 589 aa, Brassica napus; identical to SEQ ID NO: 16401

SEQ ID NO: 16921 - protein, 508 aa, Mycobacterium smegmatis str. MC2 155
MSDLTFQMIAIGLYFAMMLAIGYYAFRRTSDLDDYMLGGRKLLPGVAALSAGASDMSGWLLLGVPGAIYASGLFESWIVIGLVVGAWLNWKFVAPRLRAYTEIANNSITVPSFFENRLRDHSHVLRIAAGAIILVFFTFYVSSGMVAGGVFFETSFGSSYLVGMLVVAGVTLCYTLFGGFLGASLTDVAQALLMFAALVTIPVVTIIVTGGPGAVIDLVHSADAAQSIAGDEMHRTSLFFGGGFLAIVSAAAWGLGYFGQPHIIVRFMAMRSAADAKAGRRIGISWMILTAIGAITTGFAGLAYFFREGVTLDNPETVFLRLAQVLFHPFVAGVVLAAVLAAIMSTISSQLIVCSSALVEDIYRAFGKEASPTRLVTYGRLGVLTVAVVAILLALNPDGTILDLVGFAWAGFGAAFGPLILLSLFWRRLTSAGAIAGMIAGAVVVGIWGQTEALSSAMYEIVPGFIACLMVAVAVSLFTAREDDEIQREFTEMAEKASAPMGEPAASA

SEQ ID NO: 16922 - protein, 402 aa, Thermotoga maritima MSB8
MRLNQISKFAIVSVVVLVLALLLGGSAKTNLTVEEVNKALEPFFDSLSYILNYYYEADKLDINKLIDHAIDGLVKGTGDDFSYYQDPETYRENQIEMKGEYGGLGIEVTYDAEHGAIKVVAPMYGTPAWRAGLKAGDLIITIDGTPVSKMTYMEAVNNLRGEPGTSVTIEVLRDGEKLTFTIVREKIEIKMVLYSFIETEKGSIGYVRITRFGEKADSDMKNALDKIFEKGVKGLIIDVRDNPGGYLDVALKIVSMFVDKGVILKVRNGFGEEDVYESYGNSYPNVPIVLLVNEGSASASEILTGALKDLGIATVVGRKTFGKGSVQTGFPLSNGGVLFLTTAHYLTPSGKDIHKIGIEPDVLVEESVEEELHAETREQIEVDPEKDPFVKKGLEVLLEKIK

SEQ ID NO: 16923 - protein, 445 aa, Clavibacter michiganensis subsp. sepedonicus
MDKQRDFVLRTIEERGIKFVRLWFTDVTGTLKSVAIAPAEVEGAFAEGLGFDGSAIEGLTRSYEADMLAHPDPTTFQILPWRGEIDPTARMFCDISTPDGQPAIADPRNVLKRTLEKAADRGFTFYTHPEIEFYLLESSEFGVDGPEPVDAAGYFDNVPGGTAHDFRRRSVRMLEDLGISVEFSHHEAGPGQNEIDLRYADALTTADNIMTFRTVIKEVAIEQGVYATFMPKPLAAHPGSGMHTHMSLFEGDVNAFYASGAEYQLSTIGRQFIAGLLRHAPEITAVTNQFVNSYKRLWGGGEAPSFVTWGHNNRSALVRVPLYKPNKGNSSRVEYRAIDSAANPYLSFSLMLAAGLKGIEEGYELPAEAEDNVWTLSDAERRALGYAPLPSSLDHAIQLMERSELVAETLGEQVFNYVLLNKRQEWRDYRAQVTPYELRSNLEML

SEQ ID NO: 16924 - protein, 634 aa, Pasteurella multocida subsp. multocida
MGKIIGIDLGTTNSCVAVMDGDKPRVIENAEGDRTTPSIIAYTQDNETLVGQPAKRQAVTNPKNTLFAIKRLIGRRFQDEEVQRDVSIMPFEIVAADNGDAWVGVKGEKMAPPQISAEVLKKMKKTAEDFLGEPVTEAVITVPAYFNDAQRQATKDAGRIAGLEVKRIINEPTAAALAYGLDKGQGNKTIAVYDLGGGTFDLSIIEIDEVGGEKTFEVLSTNGDTHLGGEDFDNRVINYLVDEFKKEQGVDLRNDPLAMQRLKEAGEKAKIELSSAQQTDVNLPYITADATGPKHLNIKLTRAKLESLVEDLVSRSLEPVKIALADAGLSVSQIDDVILVGGQTRMPLVQQKVEAFFGKAPRKDVNPDEAVAIGAAVQGGVLAGDVKDVLLLDVTPLSLGIETMGGVMTTLIEKNTTIPTKKSQVFSTAEDNQSAVTIHVLQGERKRAADNKSLGQFNLEGINPAPRGMPQIEVTFDIDADGIIHVSAKDKGTNKEQKITIKASSGLTDEEIQQMVRDAEANAEADRKFEELVQARNQADHLVHGTRKQLSEVGDKLSAEDKAPIEKAVADLEAAAKGEDKAEIEAKVQALIQVSEKLMQAAQPQPEAQAQQAQSGKSNDDVVDAEFEEVKDNK

SEQ ID NO: 16925 - protein, 680 aa, Shigella flexneri 2a str. 2457T
MFFRLTALAGLLAIAGQTFAVEDITRADQIPVLKEETQHATVSERVTSRFTRSHYRQFDLDQAFSAKIFDRYLNLLDYSHNVLLASDVEQFAKKKTELGDELRSGKLDVFYDLYNLAQKRRFERYQYALSVLEKPMDFTGNDTYNLDRSKAPWPKNEAELNAQWDSKVKFDELSLKLTGKTDKEIRETLTRRYKFAIRRLAQTNSEDVFSLAMTAFAREIDPHTNYLSPRNTEQFNTEMSLSLEGIGAVLQMDDDYTVINSMVAGGPAAKSKAISVGDKIVGVGQTGKPMVDVIGWRLDDVVALIKGPKGSKVRLEILPAGKGTKTRTVTLTRERIRLEDRAVKMSVKTVGKEKVGVLDIPGFYVGLTDDVKVQLQKLEKQNVSSVIIDLRSNGGGALTEAVSLSGLFIPAGPIVQVRDNNGKVREDSDTDGQVFYKGPLVVLVDRFSASASEIFAAAMQDYGRALVVGEPTFGKGTVQQYRSLNRIYDQMLRPEWPALGSVQYTIQKFYRVNGGSTQRKGVTPDIIMPTGNEETETGEKFEDNALPWDSIDAATYVKSGDLTAFEPELLKEHNARIAKDPEFQNIMKDIARFNAMKDKRNIVSLNYAVREKENNEDDATRLARLNERFKREGKPELKKLDDLSKDYQEPDPYLDETVNIALDLAKLEKARPAEQPAPVK

SEQ ID NO: 16926 - protein, 232 aa, Brassica napus; identical to SEQ ID NO: 11162

SEQ ID NO: 16927 - protein, 215 aa, Arabidopsis thaliana; identical to SEQ ID NO: 14089

SEQ ID NO: 16928 - protein, 436 aa, Pseudomonas aeruginosa PAO1
MLHCFRPTTLALALLLGAGAAQAADAPADAAPLANGSSAPLPLDELRTFAEVLDRVKAAYVEPVDDKTLLENAIKGMLSNLDPHSAYLGPEDFAELQESTSGEFGGLGIEVGSEDGFIKVVSPIDDTPAARAGIQPGDLIVQIDGKPTKGQSMTEAVDSMRGKAGSPITLTIVRDGGRPFDVELKRAIIKVKSVKSQVLEPGYAYLRITQFQVNTGEEVVKALNQLRKDNKGRLKGLVLDLRNNPGGVLQSAVEVADAFLTKGLIVYTKGRIANSELRFSADPADPSDKVPLVVLINGGSASAAEIVAGALQDQKRAILMGTDSFGKGSVQTVLPLNNDRALKLTTALYYTPNGRSIQAQGIVPDIEVGRAKVTQERSSFEGFKEADLQGHLANGNGGADRPTGKRAAPSERPQDSDYQLSQALSLLKGLSVTRGN

SEQ ID NO: 16929 - protein, 648 aa, Oryza sativa Indica Group
MAGKGEGPAIGIDLGTTYSCVGVWQHDRVEIIANDQGNRTTPSYVGFTDSERLIGDAAKNQVAMNPINTVFAKRLIGRRFSDASVQSDIKLWPFKVIAGPGDKPMIVVQYKGEEKQFAAEEISSMVLIKMREIAEAYLGTTIKNAVVTVPAYFNDSQRQATKDAGVIAGLNVMRIINEPTAAAIAYGLDKKATSVGEKNVLIFDLGGGTFDVSLLTIEEGIFEVKATAGDTHLGGEDFDNRMVNHFVQEFKRKNKKDITGNPRALRRLRTACERAKRTLSSTAQTTIEIDSLYEGIDFYSTITRARFEELNMDLFRKCMEPVEKCLRDAKMDKSSVHDVVLVGGSTRIPRVQQLLQDFFNGKELCKNINPDEAVAYGAAVQAAILSGEGNEKVQDLLLLDVTPLSLGLETAGGVMTVLIPRNTTIPTKKEQVFSTYSDNQPGVLIQVYEGERTRTRDNNLLGKFELSGIPPAPRGVPQITVCFDIDANGILNVSAEDKTTGQKNKITITNDKGRLSKEEIEKMVQGAEKYKSEDEEHKKKVESKNALENYAYNMRNTIKDEKIASKLPAADKKKIEDAIDQAIQWLDGNQLAEADEFDDKMKELEGICNPIIAKMYQGAGADMAGGMDEDDAPPAGGSGAGPKIEEVD

SEQ ID NO: 16930 - protein, 209 aa, Cupriavidus taiwanensis
MSRRPLPFRLSVPLAAALTLAAASGALLPAPLRAADKPATSTVPAAAGACPASLNFTFPRLQDDAPQNLCQYAGKVVLVVNTASYCGFTPQYEGLEALYAKYNARGLVVLGFPSNDFSQEPGSQKEIADFCYNTYGVKFPMLGKSHVRGSEANPMYALLAKQTGTAPKWNFYKYLIGRDGKVVASYGSRTTPDDKELVAKIESLLAAPR

SEQ ID NO: 16931 - protein, 392 aa, Buxus sempervirens; identical to SEQ ID NO: 10013

SEQ ID NO: 16932 - protein, 716 aa, Lentisphaera araneosa HTCC2155
MNLKHLSALLLFFTSFSTFAEEDFIASEKERQVTRVVAQLMTHLHYEKKPLDDEMSKAVFDEFFKRLDYSKRIFLKSDYDQFSKYRPFLDDMYLQGDLTFAELFFKRFKQRVQERLDYAEKRLAAGMDLKHGGALSLDRENAEWKESPEELNDLWDRYIENEIINMHIGNLAKQMKKDDDEKKTEEEEAALNEDNGSTEEQVRRRIVFRLKNLLEMERDKFFEMAISMMTGCFDPHSTYFGPKSMEEFEIMMKLSLNGIGATLTNSDGYTKVVRIISGGPADKAKQLKKGDRIIEVQQAGEEPVNVIDMPLSKTISMIRGPKGKVVTLHVLRGGINGVRHVLSIKRDKIDISESAAARSKLFELERDGAMQKVGVIYLPSFYFHPQSKKSCANDVKAEVLKLKEQGMQSLVFDLRDNGGGSLSEVIKMTGFFIKEGPVVQVKDYRGEIDVQKDRSDDVVYGGPLTVLVNQHSASASEIFAAAIQDYERGVVIGSADRTHGKGTVQQVYDLERIQQMKELAKNGFKPGELKFTIAKFYRINGGSTQKMGVIPDIILPHFYDKENGGEASLRHSLKYDTIPRARVNKEVSVNSALDKLRNNSDKRVGKSDDFAELQKELDYYRDRYEDKEISLNQDERISEFKMHYQRSQDRKEVLRRISGRKPKAEEEEDDEVEGLGAFSQDGREEVLLDVYLKEAVEISIDLQIMAQDKNSNLVIR

SEQ ID NO: 16933 - protein, 394 aa, Carludovica palmata; identical to SEQ ID NO: 10015

SEQ ID NO: 16934 - protein, 185 aa, Pinus gerardiana
LVITIDDAPKEGCKHISVLTEADETQCPVVKIHPDDVVALPYSSGTTGLPKGVMLTHKGLVSSVAQQVDGENPNLYFHSEDVILCVLPLFHIYSLNSVLLCALRAGAATLIMQKFNLTTCLELMQKYKVTVAPIVPPIVLDITKSPIVSQYDVSSVRIIMSGAAPLGKELEDALRERFPKAIFGQ

SEQ ID NO: 16935 - protein, 460 aa, Euptelea polyandra; identical to SEQ ID NO: 10018

SEQ ID NO: 16936 - protein, 395 aa, Joinvillea ascendens; identical to SEQ ID NO: 10021

SEQ ID NO: 16937 - protein, 189 aa, Welwitschia mirabilis
DEHGEVVSEIRRSDLEPYLGLHYPATDIPQASRFLFMQNRVRMIYDCRANPVKVVQSKELKQPLCLVGSTLRAPHGCRAQYMANMGSVASLAMAVIVNVSEEEAGGSSGRNTMRLWGLIVCHHTSPWAVPFPLRYACEFLMRAFGHQLNMELQLAAQLTEKNILKTQTLLCDMLLRDAPVGIVTQSPSI

SEQ ID NO: 16938 - protein, 719 aa, Isatis tinctoria
MMENWVVVALFTLCIVGFELRFIHGATDASDTSALNTLFTSMHSPAQLTQWTASAGDPCGQNWRGVTCSGTRVTQIKIPSLELSGTLGYMLDRLTNLTELDLSSNNLGGDLPYQLPPNLQRLNLAYNQFTGAAQYSISQMAPLKYLNLGHNQFKGQIAVDFSKLTSLTFADFSFNSFTNSLPGTFTSLTSLKSLYLQNNQFSGTVDVLAGLPLETLNIANNDFTGWIPSSLKGIHLIKDGNSFSTGPAPPPPPGTPPIRGSPSHKSGGGTNRSSGDSTSNGDSKKSGIGAGAIAGIIISLLVVTALVAFFLVKRKRRSKRSSSMDIEKTDNQPFTLAPSDFHENNSIQSSSSVETKKLDTSLSINLRPPPADRHKSFDDEEDSTRKPILVKKSAVVVPSNVRAYSVADLQIATGSFSVDNLLGEGTFGRVYRAEFDDGKVLAVKKIDSSALPHGMTNDFAGIVSKIAILDHPNVTKLIGYCSEHGQHLLVYEFHKNGSLHDFLHLSEEESKALVWNSRVKIALGTARALEYLHEVCSPSIVDKNIKSANILLDSELNPHLSDSGLASFLPTANELLNQTDEGYSAPEVSMSGQYSLKSDVYSFGVVMLELLTGRKPFDSTRSRSEQSLVRWATPQLHDIDALGKMVDPALEGLYPVKSLSRFADVIALCVQPEPEFRPPMSEVVQALVVLVQRANMSKRTVGVDPSQRSGSADTTSDYM

SEQ ID NO: 16939 - protein, 199 aa, Fusobacterium nucleatum subsp. nucleatum ATCC 25586
MGNLKNHLMKYERRPIMKIYDFKVKNRKGEDISLENYKGKVLLIVNTATRCGFTPQYDELEALYSKYNKDGFEVLDFPCNQFGNQAPESNEEIHTFCQLNYKVKFDQFAKVEVNGENAIPLFKYLKEEKGFAGFDSKHKLTSVLTEMLSKNDPDFAKKSDIKWNFTKFLVDKSGNVVARFEPTTSAEVIEQEIKKLLEV

SEQ ID NO: 16940 - protein, 442 aa, Aspergillus nidulans FGSC A4
MAKHTKSHAHPKPPSGAAKGKGSAASVSKTPKSMVIRIGGSRVGSSVSQLVKDVRLMMEPDTAVRLKERKSNRLRDYAVMAGPLGVTHFLLFSKSSTGNTNMRLALTPRGPTLNFKVESYSLCRDVEKALKRPRGGGQDHKTPPLLVMNNFNSPNADENSKVPKRLESLTTTVFQSLFPPINPQATPLKSIRRVMLLNREPASESDKEGSYILNLRHYAITTRKTGIPKRIRRLDPKEVRNREKHKSAVPNLGKLEDAADYLLDPSAAGYTSASETELDTDAEVEVAGTTTRKVLTKREMQRMKTGEKVEKKTTTAEVEKRAVKLVELGPRMRLRLIKVEEGLCEGRVMWHDYIHKSQQEVDALDKTWDQKIKEKEARKKLQRENVERKKQEKAKARAEGKEVEDDEDDEDVDMDDEWISDDEEEQNQEVDEEDEGDESIDE

SEQ ID NO: 16941 - protein, 235 aa, Debaryomyces hansenii
MTFEVNTSVLSRVDGSAELSVGTTKVITSVTGPIEPKIRQELPNLASLEIIVRPSLGVSTTREKALEDKLRSILQSIIIRYKYPRQLIQIVVQFLITENNINDNGSNQHNKDFTSTELNAAINCCYFALIDANIALYNSFSSTSICIPLDTKKENYIFNPNMNDLIVSESHHVICFSIKDSKAANLLLLESHGKFSEDQLLLAIRKAGDECESIHNTYQRKCIANKVENDFIWKS

SEQ ID NO: 16942 - protein, 637 aa, Buchnera aphidicola str. APS (Acyrthosiphon pisum)
MGKIIGIDLGTTNSCVAIMDGNKPRVLENAEGDRTTPSIIAYTQEGEVLVGQPAKRQAITNPKNTLFAIKRLIGRKFKDDEVQRDIKIMPYNIVNSDNGDAWIDVKKQKMAPPQISAEVLKKMKKTAEDYLGETIKEAVITVPAYFNDAQRQATKDAGRIAGLEVKRIINEPTAAALAYGLDKGKGNRTIAVYDLGGGTFDISIIEIDEVDKEKTFEVLATNGDTHLGGEDFDSRLINYLVTEFKKEQGIDLRNDPLSMQRLKESAEKAKIELSSAQQTDVNLPYITADSNGPKHLNIKVTRAKLESLVEDLILRSIEPLKVALKDAGLSVTDINDVILVGGQTRMPMVQSKVADFFGKEPRKDVNPDEAVAVGAAVQGGVLSGDVKDVLLLDVTPLSLGIETMGGIMTSLINKNTTIPTKHSQIFSTAEDNQSAVTIHVLQGERKRSSDNKSLGQFNLDGINPAPRGTAQIEVTFDIDSDGILHVSAKDKKTGKEQKITIKASSGLNEEEIKKMVNDAEANSEADQKFEELIQTRNQGDQLVHSIKKQLNENKNSIEEESKKDIQLALNKLENALKGEDKSDIEKNIQNLLKISSKLTEINQKKSEKDQKDNNMSANKKDENVVDAEFEEIKDPKK

SEQ ID NO: 16943 - protein, 392 aa, Knema latericia; identical to SEQ ID NO: 10026

SEQ ID NO: 16944 - protein, 482 aa, Candidatus Pelagibacter ubique HTCC1002
MDKTYFISQSTSLTLVITISLIFTIVGLIYSKKYQGINNYLTANRNIGFFSLTTSLIASALGAWILFGPASAATWGGIGAVIGYALGTAFPMIFLISLGKKIRTDFPKGSTLIEFLRKRFGKSLFKLILLMTVFYMFVFLCAEVTAVAILINYISGTELWVTSLIILIATLAYTLYGGLRASIFTDNIQMIVIVALLLISVFYLTSFKGDQFSFSFIKEKSPHLLSVSYIPNYTAGLTFFIAVAATNLFHQGNWQRVYAAKNNEVLKKSLIVAFIVIIPIVFFMGFSGLVAVSANPKVIPDLGFFSLLLSEQTEFLSLIIVILGLSLTISTVDTLVNAISSLIVVDGKATLNLNKKTNYLTFSKYFIVVLSIIAFIIASKGFSVLYLFLLADLFCCAFVLTVFYSFYNKKLNEKTAYISIIIGLIGGFLLFPAPDFSKSLLVGIILPADTFPAFVSQSLLFLSFIIATFLPVIFWKIKGSKK

SEQ ID NO: 16945 - protein, 620 aa, Campylobacter lari
MAKVIGIDLGTTNSCVSVYERGESKVIPNKEGKNTTPSVVAFTDKGEVLVGDSAKRQAVTNPEKTIYSIKRIMGLMINEEAAKEAKNRLPYHITERNGACAIEIAGKIYTPQEISAKVLMKLKEDAEAFLGEKVEDAVITVPAYFNDAQRKATKEAGQIAGLNVLRIINEPTAAALAYGLDKKESEKIVVYDLGGGTFDVTVLETGDNVVEVLATGGNAFLGGDDFDNKLIDFLANEFKDETGIDLKNDVMALQRLKEAAENAKKELSSANETNINLPFVTADASGPKHLTKTLTRAKFESMIDGLVAETISKINEVVKDAGLDKSEVKEIVMVGGSTRVPLVQEEVKKAFGKELNKSVNPDEVVAIGAAIQGAVIKGDVKDVLLLDVTPLSLGIETLGGVMTKIIEKGTTIPTKKEQVFSTAEDNQSAVTINVLQGEREFSRDNKSLGNFNLEGIPPAPRGMPQIEVTFDIDANGILTVSAKDKATGKAQEIKITGSSGLSEEEINNMVKDAELHKEEDRKRKEAVEARNAADSLVHQVEKSLSELGDKVGDDDKANIQKALDELKETLKNANASKEEIEGKMKALSEVSHKLAENMYKKEEPNAQKKKDDDVIDAEVE

SEQ ID NO: 16946 - protein, 162 aa, Mycobacterium avium 104
MTVKNIPLTTLDGRPTTLAELSDGATLVVNVASKCGLTPQYTALEKLAEDYAARGLTVVGVPCNQFMGQEPGTPEEIREFCSTNYGVTFPLLAKTDVNGDDRHPLYAELTKAADADGHAGDIQWNFEKFLISPDGEVVRRFRPRTEPDAPEVISAIEAVLPR

SEQ ID NO: 16947 - protein, 508 aa, Borrelia garinii PBi
MNKKLKDVLLKLDQDLIKHVKGSLDLEISGVTYSSKLVLPRYVFFALPGIRFDGHDFIETAIQKGSNVIVCSRDMDFYSPNVTYIKVDDFNIRKFMSNFSNIFYDEPSKKLKVIGVTGTDGKSSVCYYIYLLLKKKGVKVGFISTVFFDDGNGSLIKNPYRQSTPESTEIHLFLSNMVKNNVQYAILESTSHGLDLKTARLIDVNYFAVVFTNIGHEHLEFHGTIQNYLNAKLGLFRSVSDDAGFGVINFDDPYYSDFKNAVKKSFTYSLKSSKADFFVSFIDEKIDSTRFEFYHKGVKYFANVSLLGSFNVENIMAALILVSQILNSDIQDIVDKLICIKSLDGRMDSVNLGQNFSVIIDYAHTPGAFSKLFPIFKRFATNRLISVFGSAGERDVAKRFLQGQIADIYSDLIVLCDEDPRGENSMYIIKDIAKGIVNKVVNQDLFFIPDRRLAIEKAISLARAGDLVVALGKGHENSIIYKNKELFWNEQEAVKNAILSLEESEKDR

SEQ ID NO: 16948 - protein, 443 aa, Moritella sp. PE36
MSVYSTLCFLGAIAIFIAFINSKIGKMQTTVAITAGSIILSLGIVIAGQSGWFHLEAIATEQLNNINFESFLLKGILGFLLFAGGLGIKLAHMKDQKWEITVLALVATLFSTAFIGGVLWGFCQLVGIPLDFIYCLLFGSLISPTDPIAVLAIVKNLDAPQRISTQIEGESLFNDGFGLVIFMTLFSVAFGSEAPTVSSVAQLFMHEAIGGIIYGLVLGLVFHYLISSTNDHSMELLLTIAIPTAGYVFADVIDVSGPLAMVVAGIMIGNWTRQKGFSPESEYHLDHFWELVDEFLNGILFLLIGMAMLLFSFHKEDWILMVFAIPLVLVARYLSVKFSYLFFNRFRSYNPLSVTILTWGGLRGGLALAMALAIPAGVFIIPEKNIDVREIILVMTYSVVVFSILVQGSSITGLIHKAKKWETEQLEKKTAADVITAKMDTDK

SEQ ID NO: 16949 - protein, 622 aa, Campylobacter lari
MSKVIGIDLGTTNSCVSVYERGESKVIPNKEGKNTTPSVVAFTDKGEILVGDSAKRQAVTNPEKTIYSIKRIMGLMINEDAAKEAKNRLPYHITERNGACAIEIAGKIYTPQEISAKVLMKLKEDAEAFLGEKVEDAVITVPAYFNDAQRKATKEAGTIAGLNVLRIINEPTAAALAYGLDKKESEKIVVYDLGGGTFDVTVLETGDNVVEVLATGGNAFLGGDDFDNKLIDFLASEFKDETGIDLKNDVMALQRLKEAAENAKKELSSANETNVNLPFITADASGPKHLTKTITRAKFESMIDGLVAETISKINEVVKDAGLDKSEVKEIVMVGGSTRVPLVQEEVKKAFGKDLNKSVNPDEVVAIGAAIQGAVIKGDVKDVLLLDVTPLSLGIETLGGVMTKIIEKGTTIPTKKEQTFSTAEDNQSAVTINVLQGEREFSRDNKSLGNFNLEGIPPAPRGMPQIEVTFDIDANGILTVSAKDKATGKAQEIKITGSSGLSEEEINNMVKDAELHKEEDRKRKEAVEARNSADSLVHQVEKSLSELGEKVSDEDKANIQKALDDLKETLKNANASKEEIESKMKALSEVSHKLAENMYKKDEKPSDDKKKKDDDVIDAEVE

SEQ ID NO: 16950 - protein, 638 aa, Colwellia maris
MGKIIGIDLGTTNSCVAVLDGGSVRVIENAEGDRTTPSIIGYTEDGETLVGQPAKRQSVTNPKNTLYAIKRLIGRRFEDEEVQRDIKIMPFGIVKADNGDAWVTARDKNVSPPQVSAEVLKKMKKTAEDYLGETVTEAVITVPAYFNDSQRQATKDAGRIAGLDVKRIINEPTAAALAYGMDKKEGDKVVAVYDLGGGTFDISIIEIDEVDGEHTFEVLATNGDTHLGGEDFDNRLINYLVAEFKKDQGMDLTSDPLAMQRLKEAAEKAKCELSSAQQTDVNLPYITADASGPKHMNIKVTRAKLESLVEDMVKATLIPLKQALKDADLSVSDVNDVILVGGQSRMPMVQKAVTEFFGKEPRKDVNPDEAVAAGAAIQAGVLSGDVTDVLLLDVTPLSLGIETMGGVMTKVIDKNTTIPTKQSQTFSTADDNQSAVTVHVCQGERKQASANKSLGQFNLEGIDAAPRGTPQIEVTFDIDADGILHVTAKDKNTGKEQKITIKASSGLSDEEVEQMVRDAEANADEDAKFEELVQVRNQADGMIHSTRKQVEEAGEELPSEDKEKIEAALTELETAIKGHDKEEIDAKTQALMEASAKLMEIAQAKQQAQSAPEGSADADAAPGDDVVDAEFEEVKDDK

SEQ ID NO: 16951 - protein, 165 aa, Mesorhizobium septentrionale
MFADGVMFDGSSIAGWKAINESDMVLMPDPDTVHMDPFFAQSTMVILCDILDPVSGESYNRDPRGTAKKAEAYMKSEGIGDTIYVGPEAEFFVFDDVKYKADPYNTGFRLDSTELPSNDDTDYETGNLGHRPRIKGGYFPVPPIDSAQDMRSEMLTVLAEMGIRV

SEQ ID NO: 16952 - protein, 474 aa, Clavibacter michiganensis subsp. sepedonicus
MFRDSSEVLAFIKDTDVKFLDIRFTDLPGVQQHFNIPASTVDEEFFSVGQLFDGSSIRGFASIHESDMQLIPDVTTAYIDPFRIERTLIMVFDIYNPRNGEIYARDPRQVAKKAEKFLAASGIADTAFFAPEAEFYIFDDVRYEVNQHTSFYSVDSEEGAWNSGREEEGGNLGNKTPYKGGYFPVSPVDKQADLRDDISLKLIDAGLILERAHHEVGTGGQAEINYRFDTMVHAADDILKFKYIVKNTAEQWGKTATFMPKPLFGDNGSGMHTHQSLWNDGKPLFYDEAGYGGLSDVARWYIGGILKHAPAILAFTNPTVNSYHRLVPGFEAPVNLVYSAGNRSASIRIPITGTNPKAKRIEFRAPDASSNPYLAFAAQLMAGIDGIKNRIEPHEPVDKDLYELPPEEAKNIPQVPASLGAALEALEADHEFLTAGNVFTPDLIETWIEYKREMEIKPLAQRPHPFEFELYYGV

SEQ ID NO: 16953 - protein, 454 aa, Chenopodium rubrum
MSTPKATNHQSQPQPLKRQLPFTSMKPPFVPSPGDYHRFSDNRAPPAPDPETIVVKTPPMKRKSDTAEYDAESSDWTASPGYTEVVSSPHQTPVSGKAGKGRGSRISKCNRPGPQTPMSNVGSPGNNLTPVGPCRYDSSLGLGTKKFINLIKHAEEGILDLNKAADTLEVQKRRIYDITNVLEGIGLIEKKLKNRIQWKGLDVSRPGEVDDSVTSLQADVENLSIEERRLDEQIREMQERLREMSEDENNQKWLFVTEEDIKGLPCFQNETLIAIKAPHGTTLEVPDPDEAVDYPQRRYRIVLRSTMGPIDVYLVSQFEEKFEEISGAEPPPSIPSTSGYNEDTTTAAKEENRDDETKMQGQETHRICSDANAQQDFVSGIMKIVPEVDSDADYWLLSDADVSITDMWRTDSGVEWNELGTIHEDYTVANVGTPQPQSPPPSATEVLPTNTTGR

SEQ ID NO: 16954 - protein, 440 aa, Synechococcus sp. PCC 7002
MSNSKPFVLGATALVLTTVAVTGAGLHYSKSQAYLKDSPKEIVDEVWYVINKEYVDATFNQNDWRQVRQEFLSKDYANTDEAYDAIREMLDLLGDPYTRFMPPQDFENLQVDTSGELTGVGIQIAKDKDTEEVVVIAPIEETPAFEAGIMAQDVIVAVDEQPTEGMELNDVVNLIRGQRGTEVTLTIRRDERVLEFPIVREVIQIHPVKARINESPIGDVGYIRLTQFSAQATAEMREAIADLESQNVDGYVLDLRSNPGGLLYASIDIAQMWLDGGGIVSTVNRVGEVDRQEASDRALTDKPLIVLVDGGSASASEILSGALQDNQRAVLVGTQTFGKGLVQSVRRLGDDSGVAVTVAKYLTPSGRDINKEGIAPDFIVELDEADQETLQEDRTKIGTMADPQYAKAIQLLDEQLRTGTIVIPEKQASTERPSRPAQDS

SEQ ID NO: 16955 - protein, 407 aa, Synechococcus elongatus PCC 6301
MIQPFLKRSLLWLTLLFWFATATPALALTEEQKLFNEAWRIVNQSYVDPSFNHSNWFQLREKILKKPLDNRDQTYTAIEGLLAKLDDPFTRLLRPDQYRNLQVSTAGELSGVGLQIGFEAESGDVVVIAPIEGSPAALAGLLSGDRILTVDGVAISGRDLDEAAARMRGPRGTTVALQVLRDQQTLDFELVRDRISLNPVRSQLDRDGDHPPIGYIRLSQFNANASVEVAHAIAQLDQQGAEAFVLDLRNNSGGLLTAGIEIAREWLNEGAIVYTVNRQGVLDSFAANGQALTDKPLALLVNRGTASASEILAGALQDNERAILVGDRTFGKGLIQSLFELSDGAGLAVTVAEYETPNHNDINKQGIQPDLAVEQSEPLFAEAIASAAVRQYQAAVTALTEQVRHRA

SEQ ID NO: 16956 - protein, 523 aa, Nostoc punctiforme PCC 73102
MALDSTTSEVVIAEQLKQFLLVLSVSLGVATLPQIFSWLRRIPYTLLLVIVGLGLAFVNVRLVNLSPELILMIFLPPLLFEAAWNLKWSDLKRDLFPICLYAVVGVIISIAGVAIGLHQFAGLELSIALLVGASLSATDPVSVTALFRELGASKRLRTLMEGESLFNDGMAVVAFGLLVALPLGNAKLDLQSALLEFFQVVGIGISVGGLIGFGISYLTQRFDLPLVEQSLTLVSAYSTYLITEYLGGSGVIGVVTTALILGNFGSRIGMNPRTRFIVTEFWEFLAFFVNSIVFLLIGDQIRFAVLGDNLKTIAVTIAAMVVGRAVSIYALSSLSNWLAKSNIPLSEQTVLTWGGLRGSVSIALALSVPAILPQREEIIATVFGVVLFTLLVQGLTTQPLLEKLQLLGSQPLHQKYTEAIARQVALQRALEYLETTQKRPGIQPEFYHYQKTLLSGEITFLQEEIDKLLDEYPNLQEFTTEELRGELLAIEADTYAEFVRAGKLNKELSPFLQTTHDVTDGKE

SEQ ID NO: 16957 - protein, 444 aa, Bacillus cereus G9241
MARYTREDIFRLAKEENVKYIRLQFTDLLGVIKNVEIPVSQLTKALDNKMMFDGSSIEGFVRIEESDMYLYPDLDTWVIFPWTAEKGKVARLICDIYNADGTPFEGDPRNNLKRVLKEMEALGFSDFNLGPEPEFFLFKVDEKGNPTLELNDNGGYFDLAPMDLGENCRRDIVLELEEMGFEIEASHHEVAPGQHEIDFKYANAIRSCDDIQTFKLVVKTIARKHGLHATFMPKPLYGVNGSGMHCNLSLFKNGENVFFDQNGDLQLSDDARHFIAGILKHAPAFTAVANPTVNSYKRLVPGYEAPCYVAWSAQNRSPLVRIPASRGISTRVEVRSVDPAANPYLVMATLLAAGLDGIKNKLTPPAAVDRNIYVMTKEEREEAGIVDLPATLAQALVTLQSNEVVCGALGDHLLEHFIEAKEIEWDIFRTQVHQWERDQYMSLY

SEQ ID NO: 16958 - protein, 667 aa, Glycine max
MAGSWARRSLIVLAIISFGCLFAISIAKEEATKLGTVIGIDLTTYSCVGVTDAVEIIANDQGNRITPSWVAFTDSERLIGEAAKIVAAVNPVRTIFDVKRLIGRKFEDKEVQRDMKLVPYKIVNKDGKPYIQVKIKDGETKVFSPEEISAMILTKMKETAEAFLGKKINDAVVTVPAYFNDAQRQATKDAGVIAGLNVARIINEPTAAAIAYGLDKKGGEKNILVFDLGGGTFDVSILTIDNGVFEVLDTNGDTHLGGEDFDQRIMEYFIKLIKKKHGKDISKDNRALGKLRREAERAKRALSSQHQVRVEIESLFDGVDFSEPLTRARFEELNNDLFRKTMGPVKKAMEDAGLQKSQIDEIVLVGGSTRIPKVQQLLKDYFDGKEPNKGVNPDEAVAYGAAVQGSILSGEGGEETKDILLLDVAPLTLGIETVGGVMTKLIPRNTVIQPKKSQVFTTYQDQQTTVSIQVFEGERSLTKDCRLLGKFDLSGIPPAPRGTPQIEVTFEVDAERGILNVKARRAKGTGKSERSPISNEKGRLSQEEIERMVREAEEFAEEDKKVKERIDARNSLETYVYNMKNQISDKDKLADKLESDEKEKIETAVKEALEWLDDNQSMEKEDYEEKLKEVEAVCNPIISAVYQRSGGAPGGGGASGEEDEDDSHDEL

SEQ ID NO: 16959 - protein, 511 aa, Prochlorococcus marinus subsp. pastoris str. CCMP1986
MRSIKLHRLLDLVGIIPSLDLIDKEINNISFNSKEVQKGTLFLGMPGLNVDGGKYCIEAIENGAEAAIIGSAAKQKIGSIDRERILVIEDNLDYIFGQIVSEFWNRPSRKLKLIGVTGTNGKTTITFLLEYLLKKLGKKTALFGTLFNRWPGFSEVASHTTDFADKLQKKLNAAVDAESEFAILEVSSHSIAQNRISGCEFEAAIFTNLTQDHLDYHSDMESYFQTKRKLFFPPYLKDKDGISVLNHDDLWISKLSSDLEKRSSLVSTKITKSEFKNDGFFYVTDKQFTESGSTCIFHTPKEKIKLFVPLVGEFNLMNAIQAITILYKLNFSLKDLSKLIQSFPGAPGRMEKIEIDNNDVSRSLPIVIIDYAHTPDGLKKVLQSIKKLCKGKLITVFGCGGDRDRSKRPLMGSIAEEFSDHVFITSDNPRSEEPQQIVNDILMGIEKREKITFDIDRFKAINESIKFANKEDIVLIAGKGHEDYQILNDKVINFDDRKIAQKLLQEKSKSK

SEQ ID NO: 16960 - protein, 258 aa, Dehalococcoides sp. VS
KLDEVQSPFQKIEIFETTDWGNLMLIDGAVMLTTRDNFLYHEMMSHPALFTHAAPKNVVIIGGGDCGTLREVLKHPGVEEAVQCDIDEQVTRMAEKWFPELCDSNADKRAQLLFDDGIAYMANRPAGSVDLIIVDSTDPVGPAEGLFNKAFYDSCFRALREDGILVQQSESPLMLLKLIQEMRTDMGKAGFQTFKTLPFPQPCYPTGWWSCTLARKAGGFEFRQDDAQAKGFATKYYNAGIHHGALSTPAFVAQALGE

SEQ ID NO: 16961 - protein, 446 aa, Oryza sativa Japonica Group
MKLTSEKVGCTGENKVRTILLENPGLLVLDEGHTPRNERSVIWKTLGKVKTEKRIILSGTPFQNNFLELYNILCLVRPRFGEMFLTKTRVGRRHCVSKKQRDKFSDKYEKGVWASLTSNVTDDNAEKVRSILKPFVHIHNGTILRTLPGLRECVIVLKPLPLQKSIIRKVENVGSGNNFEHEYVISLASTHPSLVNAINMTEEEASLIDKPMLERLRSNPYEGVKTRFVMEVVRLCEALKEKVLIFSQFIQPLELIKEHLRKIFKWREGKEILQMDGKILPRYRQNSIEVFNNPDSDARVLLASTRACCEGISLTGASRVVLLDVVWNPAVGRQAISRAFRIGQKKFVYTYNLITYGTGEGDKYDRQAEKDHLSKLVFSTEDEFSNVRNMLSKAEMEHCSKLISEDKVLEEMTSHDQLKGMFLKIHYPPTESNIVFTYNQIAPELS

SEQ ID NO: 16962 - protein, 604 aa, Cucumis sativus
MEIESLRVSVDEKVLKDEEKNEKEEMKMKMKMKRKLGGVKTMPFILGNEVCDRFASSGFHSNIITYLTQDLNMPLVPASNILTNFAATSSFTSLIGALIADSFAGRFWTITIASIIYELGMVTITISAILPSLHPPPCPTQINCTQASGTQLMILYLALLLTSLGAGGIRPCVVAFAADQFDMTKVGIAGRTWNFFNWYYFCMGMATLTALTVVVYIQDNVGWGWGFGLPTIAMALSVVAFVVGSPLYNKLKPSGSPLVRLAQVVVAAFKNRKAVLPDDSKLLYRNHELDAAIAIQGRLVHTDQFKWLDKAAVITSPDSTANPPNLWRLATVHRVEELKSIIRMLPIWAAGILLVTASSHQHSFTIQQARTMNRHLTPTFQIPPATLSIFGILSMLTGLVLYDRLLVPFAKKLTHNPSGITCLQRMGVGFAINILATLVSSIVEIKRKKVAANHGLLDNPTATIPFSVFWLVPQFWLHGIAEVFMSVGHLEFMYDQSPESLRSTATALYWLAISVGNYIGTLMVYLVHKYTGEEHNWLPDRNLNRGRLEYYYWLVSGIQVMNLVYYVICAWFYTYKPLEEEKINIENKDGDQEWERCEDTIKIA

SEQ ID NO: 16963 - protein, 647 aa, Psychrobacter sp. St1
MGKVIGIDLGTTNSCVAVMEGDKVKVIENAEGTRTTPSIVAYKNDEILVVQSAKRQAVTNPNNTLFAIKRLIGRRFDDKVVQKDIGMVPYKIVKADNGDAWVEINGKKLAPPQVSAEILKKMKKTAEDYLGETVTEAVVTVPAYFNDSQRQATKDAGKIAGLDVKRIINEPTAAALAYGMDKKQGDSTVAVYDLGGGTFDVSIIEIADVDGEQQFEVLATNGDTFLGGEDFDSALIDYLVDEFKKDQDVNLKGDSLAMQRLKEAAEKAKIELSSAQSTEVNLPYITADSNGPKHLVVTISRSKLESLTEELVQRTMGPCKIALEDAGIKIGDIDDVILVGGQTRMPLVQQKVQEFFGQEPRKDVNPDEAVAAGAAIQGAVLSGEKTDVLLLDVTPLTLGIETMGGVMTPVIEKNTMIPTKKSQVFSTAEDNQPAVTIQVYQGERKIANQNKQLGRFDLTDIPPAPRGLPQIEVTFDINADGIMNISATDKGTGKAQSIQIKADSGLTDEEIEQMVRDAEANAAEDEKFANLAQVRNEADGRIHAVQKALKDAEDKVTAEEKSTVETAISELEAVMKEDDHDDIKAKLEALDNAFLPVSQKIYADAGAGSEGMDPSQFQQGADNAADSNQADDDVADAEFTEVDEDKK

SEQ ID NO: 16964 - protein, 394 aa, Liriodendron tulipifera; identical to SEQ ID NO: 10038

SEQ ID NO: 16965 - protein, 638 aa, Xylella fastidiosa 9a5c
MGKIIGIDLGTTNSCLAIIEGGKGRVIENSEGDRTTPSIVAYTKDGEVLVGAAAKRQAVTNPKNTFYAVKRLIGRKFGDAEVQKDLDLVPYKITQHDNGDAWVATADAKKLAPQEISAKVLEKMKKTAEDFLGEKVTEAVITVPAYFNDSQRQATKDAGRIAGLDVKRIINEPTAAALAYGLDKKGGDRKIAVYDLGGGTFDVSIIEIAEVDGEKQFEVLATNGDTFLGGEDFDKRVIDYLVDEFNKDQGIDLRKDPLALQRLKDAAERAKIELSSSQQTEVNLPYITADASGPKHLNIKLTRAKLEALVDDLVRKSIEPCRIALNDAGLRTSDVQEVILVGGQTRMPKVQQAVADFFGKEPRKDVNPDEAVALGAAIQGGVLAGDVKDVLLLDVTPLSLGIETMGGVFTKIIEKNTTIPTKASQVFSTAEDGQSAVTVHVLQGEREQARFNKSLAKFDLAGIEPAPRGQPQIEVSFDIDANGILHVSAKDKKTNKEQKVEVKAGSGLSDSEIQQMVADAEAHREEDKKFQELVQARNHADGLIHSTRSAIKEHGSKVGGEVIGRVEASLAELEAAVKGDDKNQIEAKSKTLEEVAQSLHMAATAEQQSGSTGAGAGSSAKVDDVVDAEFTEVKGDKK

SEQ ID NO: 16966 - protein, 396 aa, Meliosma squamulata; identical to SEQ ID NO: 10041

SEQ ID NO: 16967 - protein, 683 aa, Shewanella sp. MR-7
MRKLTLATSIATVFVGFSAWAVPPTIQISELPTLKQEAQHKVASKRVTDLYTRSHYHRFALDDAFSAQIFDRYLQQLDYRRNVLTQADVDSFKPYINQFDDMLSSGELEPAYKMFDLVQKRRYEGFVYALSLLDKEMDFTVPGDAYEYDREDVAWPKDQAEINELWRQRVKYDALNLKLTGKKWPEIVDILQKRYNNAIKRLTQTNSEDVFQAVMNAFSRSIEPHTSYLSPRNAERFQMEMNLSLEGIGAQLQLEDDYTVIKSLIAGGPAASSEKLSPEDKIVGVGQEGGEIVDVIGWRLDDVVDLIKGPKGSKVVLQILPKKGGSNAKPFNLTLVRDKIRLEDRAATSKIIEPKDGEYANRKVGVIQIPGFYMNLSQDVEKELVKLNEAKVEGVVIDLRGNGGGALTEAVLLTGLFIDMGPVVQVRDADGRVSAHRDNDGKTTYAGPLTIMVDRYSASASEIFAAALQDYDRALIVGESSFGKGTVQQHKSLGRIYDMYEKPIGHVQYTIQKFYRINGGSTQLKGVTPNIAYPSALEPGEYGEAEEKNALPWDKVPMAQYGTLNDITPELVASLDKKHLARIQNNVEFNYINQDIADFKKHHKEKTVSLVESERIASREADEKKVLDRTNERRVAHGLAAVKSMEDIKDKDDVEAPDAFLDETAYITLDMADAKKLANAGTK

SEQ ID NO: 16968 - protein, 389 aa, Platanus occidentalis; identical to SEQ ID NO: 10044

SEQ ID NO: 16969 - protein, 393 aa, Sabia swinhoei; identical to SEQ ID NO: 10046

SEQ ID NO: 16970 - protein, 480 aa, Bacillus sp. SG-1
MEQRKGLIVIAAASLLTGAGGMYGGMSLLDAFDRDKEGEVAEEGGPLSDRLHKVEVAYDLIADKYVEKVDKGELVEGAIQGMLDTLEDPYSVYMDAKTASQFNDSLGSSFEGIGAEVTVMDGKLLIVAPFKDSPAEKAGLRPNDQILKVDGESITGLDLYEATLKIRGEKGSSVELEIVREGLKNPIKVSVKRDEIPLETVHSDVKKKNGKHYGIIEVSSFSENTSKDFKKQLAELEEQGLAGLVIDVRGNPGGLLTSVNEMLAELVTEEKPYVQIQERNGDTMKYFSENKEKKAYPITVLVDEGSASASEILAGALKEAGGYPLIGTKTFGKGTVQQPVPMGDGSNIKLTMFKWLTPKGNWIHKKGIQPDIPVKQPAYFYAHPLETEKPLAREMNNEQVKNAQQMLEGLGYNPGRIDGYFNQATEAAVRSFQQKHELAATGKIDTDTASKLQEEIYIAVKDEKNDVQLKAALDYLERVE

SEQ ID NO: 16971 - protein, 394 aa, Tofieldia calyculata; identical to SEQ ID NO: 10048

SEQ ID NO: 16972 - protein, 456 aa, Vitis vinifera
  misc_feature (303)..(303): Xaa can be any naturally occurring amino acid
  misc_feature (327)..(327): Xaa can be any naturally occurring amino acid
  misc_feature (374)..(374): Xaa can be any naturally occurring amino acid
  misc_feature (406)..(406): Xaa can be any naturally occurring amino acid
MGEAVEFYHSNGVSGINHNESGKKIDENHMCCWYEEVIDDNLKWSFALNSVLHKGTSQYQDIVLLDTKHFGKALVIDGKMQSAEVDEFIYHECLIHPALLCHPNPKTIFIMGGGEGSAAREALRHNSIEKVVMCDIDQEVVDFCRRYLTVNQEAFRNKKLNLVINDAKAELERRNEKFDIIVGDLADPVEGGPCYQLYTKSFYERILKPKLNVNGIFVTQAGPAGIFTHKEVFSSIYNTIKQVFKYVVAYAAHVPSFADTWGWVMVRLTGSKLATPITAPTIAPRTTPPATMLSRKFLRDGEXPEAASAASGSTMEAVNAAAVRPVXAFSLREAFTSSRLPLDFGFTATAFFDGFTCSGWKKASEVGLWSSLFXLAEVSRIAIETLAIVSNSSLLICSSGCCWEEXGAWCLDRWTKIGEKEMRGGNKRFSADVSPNCYPTWHILDPVLVDKVILVD

SEQ ID NO: 16973 - protein, 737 aa, Psychrobacter arcticus 273-4
MMKKQPAQWLLSAASVGIAGLILTQSYGTAVADTNTEGFKQTPEQQVTTRQVAALLDRSHYLNQPLDTATGSEILSMYIDSLDPNHTLFLQSDVDEFKKKYADEFGVRLKRGDLSAGVEVFERYRKRSNEYFAMAKKMLKTDINLTSKDTIVLDREKLNHFKTKKEQRDYWTSQLKFQLMSITLGKEDEKAKEKVFLDNPDITRGQDLVRNDERTPSEILLNRLSRQQEQFTRLKDDEIMETILNTAMLTYDPHSNYYAPIQANELQIQSSLQLEGVGVSIRPDRKNPDYTRIVTLVDGGPAAKSGQIKPNDLIIGIAQDGKTMTDVVGWSTREIVSLIRGKRGTSVTIKVRQPNTPDASARNVTVVRDIIQQEESGVTQRVVEVQRPNIDKTPKRIGVLEIPSFYLNYRARRNGEDYRSVSIDTEKALKELNTKNIDGLVVDLRNNPGGSLDEVAKMLGFFIKSGPLVQIRDNRGNIQVYRDDDGGEQLYDGKVVVLTNLASASASEIFAAAIQDYGRGLVVGSTTTGKGSAQIQLDSLALGSATLTQRKFYRITGGSTQNKGVVPDVELVNIYDNATFGERAQKKALPWDTIKTAPYKPEGKFTSNTLATLNQQSKIRQQKNPQFVYLSTLNDIRNMEDEKKPVALDINKRRAKMQLIEKRSLEVENKRLIATGERPYANWNTYQAAMDAKFEERSQMKAGERPELPEDEAFINEAAYIMLSTEPKTLSSPEEKP

SEQ ID NO: 16974 - protein, 1034 aa, Debaryomyces hansenii
MSDTTGNLTQGIEMDESPTPETVTTPSLDLNEILKPTELDGTTTNIASNKAKYLIRSDKEHFDVDETAKRFKYLLGLTDLFQHFINAKADRDPNFQRVLASIDNNEVNHKHTEANNRRRKTEKEEDEELLNDEVETPAITEFTESPGYIHGKLRPYQIQGLNWLISLYENNLSGILADEMGLGKTLQTISFLGYLRYMRNINGPHIIIVPKSTLDNWAREFARWTPDVRVLVLQGDKDSRHELIQKRLLACDFDVVVSSYEIVIREKASFRKFAWEYIIIDEAHRIKNEESLLSQIIRMFHSRNRLLITGTPLQNNLHELWALLNFILPDVFGDSETFDQWFQNDNKDEHGNGKEEDVILQLHKVLQPFLLRRIKSDVEKSLLPKQEVNLYVSMSDMQRKWYQKILEKDIDAVNGANKKESKTRLLNIVMQLRKCCNHPYLFEGAEPGPPFTTDEHLVYNSQKMIILDKLLKKFKQEGSRVLIFSQMSRMLDIMEDYCMFRDYEYCRIDGQTDHADRVNAIDEYNEPGSSKFVFLLTTRAGGLGINLTTADIVILFDSDWNPQADLQAMDRAHRIGQTKQVRVFRFVSENAIEEKVLERATQKLRLDQLVIQQGRNAGNIGQQSNKATSKDELLTMIQHGAAEIFSKDSASNGENADDVDIDSILASSESKTKELNKKYEKLDLSALQNFSNDESVYEWNGENFKKKETSTIGDIGHGWINPGKRERKENYSIDMYYKDVLNTGGRSHVKSGPKPPKQLNIFDHQFYPTKLFELNELEKNYYKKQIRYQVPLKAGNPKTLKERQLEQKLEQEEIENSRPLTDEEKELKEELLTQGYGNWNRREFTHFIQVCSKYGRNSVSLIATEFEDKTDEDVREYAKKFWTSYEEIEGYERYINQIEMGEEKIIKNRLQKESLRRKLAQYKYPLQELVLKFPPASTNKRTFSEEEDRFLLVQLYRFGLDRPDIYERIRDAIRDSPLFQFDFFFQSRNAAELSRRCTTLLACVLKEIHPNAVNNKRKKEETPDKDTKKKKAKK

SEQ ID NO: 16975 - protein, 266 aa, Silene diclinis
KVEKILFQGKSKYQDVIVFQSSPYGKVLILDGVIQLTERDECAYQEMISHLPLCSIPNPKKVLVIGGGDGGVLQEVARHSSVEQIDICEIDEMVVTVSKEFFPEVAVGYDDPRVNLHIGDGVAFLKAAPEGSYDAVIVDSSDPIGPAKELFEKPFFESVAKALRPGGVVCTQAESIWLHMHIIEDIVSNCREIFKGSVNYAWTTVPTYPSGVIGFMVCSTDGPAVDFKNPVNPIDKTEDEKRPLKFYNAEIHSAAFCLPSFAKRII

SEQ ID NO: 16976 - protein, 513 aa, Corynebacterium glutamicum ATCC 13032
MSDLGPIWRWLLLVSVSICAASGLVYELALVSLSTSLNGGGIVETSLIVAGYVAALGLGALLVKPFLNWPAQTFLGVETLLGLIGGCSALVLYFTFATIGQSLWILVIATAAIGILVGAELPLLMTMIQQGRLADAKTTGSLVATLNAADYLGALLGGLAWPFVLLPWLGMMRGAAAAGMINLVAALFVGCVLLRHLLPRTHFFVSVVALLLAIAALATVLVKSDGIVATARAQLYRDPVIYSHQSDYQDIVVTERGKDRRLYLNGGLQYSTRDQHRYTESLVYPSLNPEAESVLIIGGGDGLAARELLRFPSMQITQVELDPEVIEVANTVLRSDNGGAMEDPRVSIIVDDAFTWLRSGGNNGETYDSIIIDLPDPNNDTMARLYSEEFYTLARARLNEQGRMVVQSSSAYTTPDVFWRVGATLKSAGCEQVIPYHVHVPTFGDWGFQLCGPADMELELREDTPPLTFLNDEVLVAAGVFGLDNQPRELEPSTLDHPRVVEDLRKGYRESGD

SEQ ID NO: 16977 - protein, 263 aa, Oryza sativa; identical to SEQ ID NO: 15594

SEQ ID NO: 16978 - protein, 184 aa, Arabidopsis thaliana
  misc_feature (13)..(13): Xaa can be any naturally occurring amino acid
  misc_feature (107)..(107): Xaa can be any naturally occurring amino acid
  misc_feature (157)..(157): Xaa can be any naturally occurring amino acid
  misc_feature (161)..(161): Xaa can be any naturally occurring amino acid
MASSMLSSTAVVXSPAQATMVAPFTGLKSSASFPVTRKANNDITSITSNGGRVSCMKVWPPIGKKKFETLSYLPDLSDVELAKEVDYLLRNKWIPCVEFELEHGFVXPVRHGETLPGYYDGRYWTMWKLPLFGCTDSAQVLKEVEKCKKEYPGAFIXGIIXIHTTRQVHGLSSFAYKPPSFTQA

SEQ ID NO: 16979 - protein, 320 aa, Picea sitchensis
MMAQRLDISGGNDSSISELEQTNAHPDLTSKDIINLRKRKCLSNPKVKVADVHSIPPKTKETDETERNGKHYKVGESTKDKDDLKDKLEESNSAETAESCPKQTVDNAKPSSVSVKQDYIHVRARRGQATDSHSLAERVRREKISERMKLLQDLVPGCNKVTGKAVMLDEIINYVQALQCQVEFLSMKLAAVNPQLDCNVEGGYLTRDVLQPHCSSISKMFAPDTTAAASQINQLQKTPLQHGLQCRADRQELAIRGMMDTQFTCMNGYADPTFQLQMSQGWDDEFQNAVDIGLDQNRSNPLKSHGFHGVLPTGHMKVEL

SEQ ID NO: 16980 - protein, 487 aa, Kineococcus radiotolerans SRS30216
MIALTAAEVAELTGGRLAAGTASTPVTGPVVVDSRAAGPGSLFVALPGERVDGADHAAGAVAAGASLVLAEREVELPAGAALVVVEDGVTALGRLARGVLERLRSTGSGPLVVGVTGSQGKTTTKDLLARVLAPAGPVVAPAGSFNNEIGAPLTVLRADRGTVTLVVEMGARGLGHIAALCAIARPDVGVELVVGAAHAGEFGSLETTARAKGELVEALPAEGLAVLNADDDRVAAMATRTRARVLTFGRGAHADVRALDVELDALARPRFTLQHGGGRARVQLQLHGEHQVTNALAAAAVALGTGRPLEEVAASLSAATELSPGRMQVVERPDGVTVVHDAYNANPDSMRAALKALVGMAGAGRRTWAVLGEMLELGPASREEHDLLGRTVVRLDVDQLLVVGAGARPVYTGAVMEGSWGEEAAFATDVDDALEFLRARLRPGDVVLVKSSNGAGLARLATTLIHDTTAATPGTPGTGTETTEASS

SEQ ID NO: 16981 - protein, 247 aa, Physcomitrella patens subsp. patens
MGFSDILRVLRIVFQNSLGCLFDQLEYLLQVVRRWNAPERPVDLKNGKFPYCLVWVPLPIIAWLVPFVGHVGICREDGVILDFAGNINVDNLAFGSCAKYVRLSPNNCCFPHPQYGHTCKVADKHAAAGMAYSWDDAISRSVQVFGRKSYNFFTCNCHSFVANCMNRMAYGGHTNWNLVDVLLLALVQGEFVDFTGFLRGYVPFVAIMTLGLFMADWVYFFFWAGFATLLLGWFIYGTYVFGGYIDC

SEQ ID NO: 16982 - protein, 220 aa, Arabidopsis thaliana
  misc_feature (21)..(21): Xaa can be any naturally occurring amino acid
  misc_feature (25)..(25): Xaa can be any naturally occurring amino acid
  misc_feature (149)..(149): Xaa can be any naturally occurring amino acid
MASSMLSSATMVASPAQATMXAPFXTGLKSSAAFPATRKANNDITSITSNGGRVNCMQVWPPIGKKKFETLSYLPDLTDSELAKEVDYLIRNKWIPCVEFELEHGFVYREHGNSPGYYDGRYWTMWKLPLFGCTDSAQVLKEVEECKKXEYPNAFIRIIGFDNTRQVQCISFICLQAHQASPVKFPLLLLCKPSKLYPPSLILSLVFLLFSSFLGFNFRT

SEQ ID NO: 16983 - protein, 144 aa, Glycine max
  misc_feature (12)..(13): Xaa can be any naturally occurring amino acid
  misc_feature (20)..(20): Xaa can be any naturally occurring amino acid
  misc_feature (109)..(109): Xaa can be any naturally occurring amino acid
LLASTRACCEGXXLTGASRXVLLDVVWNPAVGRQAISRAFRIGQKKFVYTYNLITYGTGEGDKYDRQAEKDHLSKLVFSTEDEFNNVRNMLSKAEMEHCSKFISEDKVXEEMTSHDQLKGMFLKIHYPPTESNIVYSYNQIATE

SEQ ID NO: 16984 - protein, 492 aa, Herminiimonas arsenicoxydans
MGTKLKNIGLIGLGMVAGAIGMGTQLDAIAQKSTGNPLPLEELRQLADVFGLIKSDYVEPVEDKKLLTEAISGMVSSLDPHSAYLDKKAFKELREGTQGKFVGLGIEVGMEDGYVKVISPIEDSPAYRAGIKAGDLITRLDSTPVKGMTLDEAVKKMRGEPNTKITLTIARKDEDKPVVITITRQEIRVQSVKAKVVEPGYAWLRVAQFQEPTVDDMAKKIAALYAQEPNLKGLVLDLRNDPGGVLPGAIGVSAAFLPKDVVITSTNGQLPDSKASFYARREFYAARAVGDPLAKLPDAIKKIPMVVLVNSGSASASEIVAGALQDYKRATIMGTQTFGKGSVQTIRQLSADTAVKLTTARYYTPNGRSIQAKGIVPDLMVDETADGDGLNSLRLREADLQKHLTNDKDKEAESARPGLDELEEDQRIAALEKKRKPLEFGSKDDFQLTQALNHLKGLPVVLSKVKVEVKKEAGINQPKTESKTEPKNGDKK

SEQ ID NO: 16985 - protein, 173 aa, Ricinus communis
QSEPKSVYDFTVKDARGNDVDLSTYKGKVLLIVNVASQCGLTNSNYTELTQLYQKYKDQGLEILAFPCNQFGSQEPGTNEQIVEFACTRFKAEYPIFDKVDVNGNNAAPLYKFLKSSKGGIFGDNIKWNFSKFLVDKDGNVVDRYAPTTVPSQHREGCEETAGDCMSAQGRPN

SEQ ID NO: 16986 - protein, 212 aa, Medicago sativa
MGRGKIEIKRIENSSNRQVTYSKRKSGILKKANEINVLCDAQVSTIIFAPSGKMHEYISPSTTLIDMLERYQKASGKRLWDAKHENLRNEIEKLKKENEDMEIKLRHLKGKDINTLNYKKLMSLEDVLENGLLTIRDKQMEVYQMVTRNDKILEEENRELNFILQQQHMAVEGGREMDYNDEFDESSGSDFNSQMPFSFRLQPMQLHSLLQL

SEQ ID NO: 16987 - protein, 162 aa, Debaryomyces hansenii
MDKTSFYDFKPLDVYGEVYDFSQLKGKVVVIVNVASLCGFTSQYKDLEYLYKTYKERGFVVLGFPCNQFGSQEPYTEREILQICEKKFGVTFPIMDKIEVNGECEDPLYGYLKNEQRTSLGFKGIKWNFEKFLISRSGRVVKRYDSTVAPLNFEKAIVELLE

SEQ ID NO: 16988 - protein, 88 aa, Salvinia cucullata
SNEQIVEFACTRFKAEYPIFNKVDVNGDNSAPIYKFLKTQKGGLLGDGIKWNFTKFLVDKDGNVVDRYAPTTSPLSIEKDVKKLLGVS

SEQ ID NO: 16989 - protein, 332 aa, Arabidopsis thaliana
MFGNGFPEIHKATSPTQTLHSNQQDCHWYEETIDDDLKWSFALNSVLHQGTSEYQDIALLDTKRFGKVLVIDGKMQSAERDEFIYHECLIHPALLFHPNPKTVFIMGGGEGSAAREILKHTTIEKVVMCDIDQEVVDFCRRFLTVNSDAFCNKKLELVIKDAKAELEKREEKFDIIVGDLADPVEGGPCYQLYTKSFYQNILKPKLSPNGIFVTQAGPAGIFTHKEVFTSIYNTMKQVFKYVKAYTAHVPSFADTWGWVMASDHEFDVEVDEMDRRIEERVNGELMYLNAPSFVSAATLNKTISLALEKETEVYSEENARFIHGHGVAYRHI

SEQ ID NO: 16990 - protein, 95 aa, Lemna minor
QFGSQEPGTNSEIKQFACTRFKAEFPIFDKVDVNGPKTAPVYQFLKSSAGGFLGDLIKWNFEKFLVDKNGKVVERYPPTTSPFQIEKDIRKLVAA

SEQ ID NO: 16991 - protein, 779 aa, Zea mays; identical to SEQ ID NO: 12143

SEQ ID NO: 16992 - protein, 369 aa, Vitis vinifera
  misc_feature (268)..(268): Xaa can be any naturally occurring amino acid
MEGGAGKGLECPKIMDGKASNGKGLKKAIPSCCLKAKASAPENDAKCHSTVVSGWFSEPQSCSDKAGNLMYFNNPMWPGEAHSLKVENILFQGKSEFQEILVFESSAYGKVLVLDGIVQLSEKDECAYQEMIAHLPLCSIESPKRVLVVGGGDGGVLREISRHSSVELIDICEIDKMVIDVCKKFFPQLYVGFEDPRVQLHVGDAVEFLRHVPEGKYDAIIVDSSDPVGPAQELVERPFFETTARALRPGGVLCNMAESMWLHTHLIXDMLSICRETFKGSVHYAWASVPTYPSGVIGFLLCSTEGPPVDFLHPVNPIEKLEGNLKCGRELRFYNSEIHSAAFALPSFVRREVSILHNSPTPAQRICVS

SEQ ID NO: 16993 - protein, 436 aa, Bartonella henselae str. Houston-1
MIRKVILLVAGVFLGACSMIMVQSVAANNEGDVYKQLAIFGDVFERVRMQYVTVPDDKKLIENAINGMLTSLDPHSSYMNAQEAKEMRDSTKGEFGGLGIEVTMEKNLIKVVSPMDDTPASKAGILAGDLISKIDGVQTNGQTLNEAVNKMRGAPGTPITLTIIRSGIDKPLEIKVVRDIIKVKAVKYRVEGDIGYLRLIQFSEQTFGNLQAAIKDIQSKIPQDKLKGYVLDLRLNPGGLLDQAVSVSGAFLNKGEIVSTRGRRKNDVTRFDAKPGDIIKGKPLIVLINGGSASASEIVAGALQDHRRATILGTQSFGKGSVQTIIPLGENGALRLTTALYYTPAGTSIQGTGITPDIIVEQPLPEKYKGYDVKLGESELKGHIKGERENNKGSGSAAFVPRDPKEDAQLNEAYKLLRGEMANAAFPPDPNKDILK

SEQ ID NO: 16994 - protein, 101 aa, Fagus sylvatica
VNVASQCGLTNSNYTELNQVYEKYKDQGLEILAFPCNQFGAQEPGNNEQILEFACTRFKAEYPIFDKVDVNGDNATPLYEFLKSSKGSIFGDKIKWNFSKF

SEQ ID NO: 16995 - protein, 350 aa, Mesorhizobium sp. ICMP 15054
DPKGKLQHVTMDVIEVEEDMFADGVMFDGSSIAGWKAINESDMVLMPDADTVHMDPFFAQSTMVILCDILDPVSGESYNRDPRGTAKKAEAYMKSEGIGDQIFVGPEAEFFVFDDVKYKADPYNTGFKLDSTELPSNDDTDYETGNLGHRPRIKGGYFPVPPIDSAQDMRSEMLTVLAEMGVRVEKHHHEVAAAQHELGIKFDTLVRNADKMLIYKYVVHQVANAYGKTATFMPKPIFGDNGSGMHVHQSIWKNGKPTFAGNEYAGLSESCLFYIGGIIKHAKAINAFTNPLTNSYKRLVPGYEAPVLLAYSARNRSASCRIPFGSSPKSKRVEVRFPDPGANPYLAFAA

SEQ ID NO: 16996 - protein, 421 aa, Arabidopsis thaliana
MFETGAIQFFKKLDIGTFDLGDFLAIGAIFAATDSVCTLQVLNQDETPLLYSLVFGEGVVNDATSVVLFNAIQSFDLTHLNHEAAFQFLGNFFYLFLLSTGLGVATGLISAYVIKKLYFGRHSTDREVALMMLMAYLSYMLAELFALSGILTVFFCGIVMSHYTWHNVTESSRITTKHAFATLSFLAETFIFLYVGMDALDIEKWRFVSDSPGTSVAVSSILMGLVMLGRAAFVFPLSFLSNLAKKHQSEKISIKQQVVIWWAGLMRGAVSMALAYNKFTRSGHTELRGNAIMITSTITVCLFSTMVFGMLTKPLIRYLMPHQKATTSTTSMLSDDSTPKSIHIPLLDGEQLDSFELPGSHQDVPRPNSLRGFLMRPTRTVHYYWRQFDDAFMRPVFGGRGFVPFVPGSPTERSSHDLSKP

SEQ ID NO: 16997 - protein, 461 aa, Magnetococcus sp. MC-1
MSSEKKSARGWLWLVVVFILFIVGVQAANNGMALGRITYEKLKVFTEVLDLVRTQYVEEADEEKLLYGAIGGMLETLDPHSSFLNPDSFKEMKVDTKGEFGGLGIEITRGEQAIKVVAPIADTPADRAGMKAGDLIIKIEDESTQDMNLMDAVKRMRGKPDTDIKLTVVREGEPKPLVFTLTRAIIKISSVKWRAEQNNLAYVRITSFNEQARPLLDKALDEIEAELKGNVRGLVLDLRNNPGGLLDQAVQVSDAFLNKGRIVYTKGRIPGKDLSFDARNGDLMEGAPIVVLVNGGSASASEIVAGALQDHKRAVIMGTQSFGKGSVQTILPLSDGSGVRLTTALYYTPSGRTIQAKGIVPDIVVEDLTLIKRKDRLERTKEKDLKGHFNNDGKRSMDDKEETTSTTEDSAKKGDTKSTEDEDDQAERDSVTGRSKDDYQLKRALDLLRGLQVFQTTAAQN

SEQ ID NO: 16998 - protein, 1033 aa, Kluyveromyces lactis NRRL Y-1140
MSGDNLGGLKVQMMSQTSLEQEIENNANNMISKQTLEQEEKLLERYTNKRDILRQKRDSLLSKRYNASRISVRAKLKEQIEDVENYELKPLEQDIAEIKERIKGLKETNEADTTTKSTERQPGESERDFLLRTGKITGFGNSVNFKVEDEEESKSILLAERQMLKNIDEEEDQSEDEADFISDSEELLNESAGKLDVIRKPAEAIDDGDEHHYQQRLKKWVANRSKDRDYDNQPDIPEWLKPHPKISDANISEDFMVPGDIFPLLFPYQKTCVQWLCELYQQGCGGIIGDEMGLGKTIQIIAFLATLHHSRKLNGPVLVVCPATVMKQWCNEFHTWWPPFRAVILHSIGAGMNKGTQIPEEELEKMLMTSNYGTFTYNDYEKKEKTRTSLESRKSVKKLLEKVITDGHIIITTYVGLRLHSEALLNVRWGYAILDEGHKIRNPDSDISLTCKQLKTQNRIILSGTPIQNNLTELWSLFDFVYPGKLGTLPVFQQQFANPINMGGYANASNIQVKTGYKCAVALRDLISPYLLRRVKSDVAKDLPKKNEMVLFCKLTQYQKSKYLEFLHSDELMKIRKGKRQVLYGIDILRKICNHPDLLDLKRKKMNDYEDADYGNPARSGKMQVVKQLLLLWHSQGHKTLLFTQSRQMLDILQEFISYKDPELSDLKFLRMDGTTNIGSRQSLVDKFNNEPYDVFLLTTRVGGLGINLTGANRIIIFDPDWNPSTDMQARERAWRIGQKREVTIYRLMIAGSIEEKIYHRQIFKQFLSNKILKDPKQKRFFKMNDLHDLFTLGGDNGYETEEFNQEIVKQTGNIKQNKTSETDDFDKLSQISGVHKLEGFFNSKEQDEKQSTEDDRIMGSLFSSANSVDTNERDDIIGAEATRNVKSALDALKNSRKQTKRFDVGTPTWTGKFGRAGKIRKSRTALSTNDSKFARKLNRDTLEREKIKREDIQSDATQKDEKSAEVLKASIEKYLSQSPGFASKSADLVIRVGLQLTNSTDVERVRKILKDVAVFDKLKKVWVLKSANRDTD

SEQ ID NO: 16999 - protein, 1123 aa, Arabidopsis thaliana
MAYRFLEEATDSSSSSSSSKLESSPVDAVLFVGMSLVLGIASRHLLRGTRVPYTVALLVIGIALGSLEYGAKHNLGKIGHGIRIWNEIDPELLLAVFLPALLFESSFSMEVHQIKRCLGQMVLLAVPGVLISTACLGSLVKVTFPYEWDWKTSLLLGGLLSATDPVAVVALLKELGASKKLSTIIEGESLMNDGTAIVVFQLFLKMAMGQNSDWSSIIKFLLKVALGAVGIGLAFGIASVIWLKFIFNDTVIEITLTIAVSYFAYYTAQEFYAAFARTAFKGDSQKSLHHFWEMVAYIANTLIFILSGVVIAEGILDSDKIAYQGNSWRFLFLLYVYIQLSRVVVVGVLYPLLCRFGYGLDWKESIILVWSGLRGAVALALSLSVKQSSGNSHISKETGTLFLFFTGGIVFLTLIVNGSTTQFVLRLLRMDILPAPKKRILEYTKYEMLNKALRAFQDLGDDEELGPADWPTVESYISSLKGSEGELVHHPHNGSKIGSLDPKSLKDIRMRFLNGVQATYWEMLDEGRISEVTANILMQSVDEALDQVSTTLCDWRGLKPHVNFPNYYNFLHSKVVPRKLVTYFAVERLESACYISAAFLRAHTIARQQLYDFLGESNIGSIVINESEKEGEEAKKFLEKVRSSFPQVLRVVKTKQVTYSVLNHLLGYIENLEKVGLLEEKEIAHLHDAVQTGLKKLLRNPPIVKLPKLSDMITSHPLSVALPPAFCEPLKHSKKEPMKLRGVTLYKEGSKPTGVWLIFDGIVKWKSKILSNNHSLHPTFSHGSTLGLYEVLTGKPYLCDLITDSMVLCFFIDSEKILSLQSDSTIDDFLWQESALVLLKLLRPQIFESVAMQELRALVSTESSKLTTYVTGESIEIDCNSIGLLLEGFVKPVGIKEELISSPAALSPSNGNQSFHNSSEASGIMRVSFSQQATQYIVETRARAIIFNIGAFGADRTLHRRPSSLTPPRSSSSDQLQRSFRKEHRGLMSWPENIYAKQQQEINKTTLSLSERAMQLSIFGSMVNVYRRSVSFGGIYNNKLQDNLLYKKLPLNPAQGLVSAKSESSIVTKKQLETRKHACQLPLKGESSTRQNTMVESSDEEDEDEGIVVRIDSPSKIVFRNDL

SEQ ID NO: 17000 - protein, 3389 aa, Oryza sativa Japonica Group
MASSQQVELEAAKLLQKLIQESKDEPAKLATKLYVICQHMKLSGKEQSLPYQVISRAMETVVSQHGIDMDALRSSRIPLAGGPQAGDSSGAMPKDKEIIGSQPPMVGTDASQSSAHAGLWNFPSGSADMARHSASISGRVPAGPNRSDVAGADIHQGSMSQKSGRSSGMESPASLQIEDTRSMNSHDSLKSDEKTSKKSSSKRKRVDPKAAGDLHSEDNSKSDAMSTGQNIRKGKQPGKAGTQGQLSRTVEHDPSHTLQVGNAQVPPLPSGAPFFRAHQEGPSASSARTIDKTKPSNPFTMAQISNFAEGLASGNIPAELQKSILGGANLLNASFGWNQNAQGPVMKNTQGSVPNLMRPGVNVEGKVNLGSQGTFNSMSASQMDYPTVPPYVSSSFGGGPQYLDKGKDLTSGNTGSELNSSKAGAQLGIMHGSPMQERHGIVRAPQRAGSSQMSQTSPSIPFKEQQLKQLRAQCLVFLAFRNNLQPRKVHLEIALGVGPPASEGGSAGQRGSESRMADGSGKENGNSQENPAIFGRQSDISRLQSTSTGSVADVDSASKDPEIVKKKIKIAEHEKSFEAENIQQTVPIQGTDSEMHSQETISPMPSGQLHYFQGDTRKTTPEIYKADAENLNRNLGWVGGQGPSPLGGNRHTSMEVGLLAKDEVSKEPFAVLRPHHMPVDGSNHNLSGKDQTPETAGNEIDNGSHMGEMIFERSADEGDEDLSEQDDLPLSPPKYTMTDKWILDHQKRRYEENKRKALELQKAHRRISASYEKLKENVSSSEDLSAKTKSVIELKKLQLLQLQRRVRSEFLQDFFKPNTTDLDRIKSVKKHRHGRRVKQLEKIEQKMKEERQKRIRERQKEFFADIEAHREKLEDSFKVKRERLKGFNRYVKEFHKRKERIHREKLDRIQREKINLLKNNDVEGYLRMVQDAKSDRVKQLLRETEKYLQKLGAKLQGSKSMDGRVSYASDSTANDIEDESYQPQHYLESNEKYYQLAHSVKEVVNDQPSYLQGGKLREYQMNGLRWLVSLYNNNLNGILADEMGLGKTVQVISLLCYLMETKNDRGPFLVVVPSSVLPGWESELNFWAPSINKIAYAGPPEERRKLFKEMIVHQKFNVLLTTYEYLMNKHDRPKLSKIQWHYIIIDEGHRIKNASCKLNADLKHYRSSHRLLLTGTPLQNNLEELWALLNFLLPNIFNSSEDFSQWFNKPFESNGDSSTEEALLSEEENLLIINRLHQVLRPFVLRRLKHKVENELPEKIERLVRCWPSAYQKLLIKRVEENLGGIGAVKVRSVHNTVMELRNICNHPYLSQLHVEEIEGYLPRHYLPSILRLCGKLEMLDRLLPKLKATGHRVLLFSTMTRLLDVMEDYLVWKKYKYLRLDGHTSGQERGALIDKFNNPNSQAFIFLLSIRAGGVGVNLQAADTVIIFDTDWNPQVDLQAQARAHRIGQKKEVLVLRLETVQTVEEQVRASAEHKLGVANQSITAGFFDNNTSAEDRREYLESLLRGGKKEEAAPVLDDDALNDLLARSEDEIDIFESIDKQRREEEMATWLTVVQNSSTSGLDPSVMPSRLVTDDDLKSFCHAMKIYESSNIKSVKVVRRKGELGGLDTQHYGRGKRAREVRSYEDQWTEEEFEKLCQVDSPDSPQPGGISRDADVPKVVKLEVPPESSKEPEQAKKEPASSVGDSPPAKRRRGRPRRSDASLSPVTAPPNTGKQEAGTIIDGSSSAPTTTIHSVAPDVTIDSTALSATGNPDVGTEIKGTTPDGTIKPVICTDNKGTASIAVLEGSNAKEVGIPAHSVHEPVSSSAPHPPTPATSRGRKTQAGETPRRRGRKPKSLAASAGDVILSPVVAVGSGEAYASSVVSSYPQGNVSSSHANAMAGLQKDTIIYKPAALLPEGVKGTLTPSGGDKDEMVKTPLAEDIYAGTVTTSGNANSQLPMIAHNENAGLVQGGTDQNLSVATPTIPVVSEGSTKISEVVVADKPAEKQGARRRRKKTSGTGSEDTGVSTRQRAASRRLYGIGTADIAGTDMSTGEKIGIVKEIDGSCQDTSKGLPNIISPSYEKSGYDSQPSTPIAVPINEAALPSGFSEAHATHSELHPARESISSVGHEKLAGAHLEAPPSVSFQAPVQHETRKDYVGVHSEVATTHPETITTHSSVNPVIDHKLANVQFESHASLHTSGKDITTMPSEVDSGAPSKAPGRRRKGSAREPRTRSNSATAASERRARLAGSKQPDDIKMAEMSGNPSTAVCSSTQQQEDNTLKAAHATGSVGEEQNNAENRVREVSMPAGILEAKLELTKQTDQAGTDEKSAALSTQIPALDEKSGERELPGGHNSEQEQEMVSAAKSASANDEEHKVHEVHQIIADHNALPSSAQYTLQDKIDSSADAGLVPCDKIASVVIAVDDQDPSNASDKDAPASTEDDGNGLQSECVHVDLVLAKQDNTKVEDTQKSNQPAEQGESLEMTGSKFRSETRLEKTEETVDKSGGDNLPTIEKNDDSPIERSSPSADKIAQVAYGGEAGTETTTVEAVSAMNSDGLQDVRNALSTHGLSTNDITVASEEHRDPESHLSGEVSMSGGSSELKLESLNQSESACQSGEVTLEDTHATLDIQIPALIESEEKKSPGGDVHGSEEQHMHEVLHNTVDGSISPSNREQDKLQVHIDTNTDVDIPSSDKDHSTDIVLAGCQAPCDASGKDKLSTCDASGKDMAAPTDDDLNCLQSEDTVIPVADAKDETMLVKAIQNDEMSMGSSHGLPATIQSTDSDRLAEEGESAEITGSKFSCGMEQEKMEEPLDKSVTDNQTSSQINDGSNNMDSQKVDSSLQAADGGDLLVSRGTSVETTTAINTDASDESISVSTQSVKEASTVEIGASTNDIAPACELRKDFESHVSGCVSKPVGLSELRLEELSQTKSVSQSIVANAEETSTRSDIETPAMDASESKSPESDVHELSERVEFMGPTPSANEKSNELHSQELVKMISAAETASTEGHREKDTCEVDHKIDCTIFSPIGDQDTRNRIDGDTDCGVPSCQRNAAFDSENEVSAEINLTGSQAPCDAPNKATPAPTEDDHNGQESEDTVIGAEQGTVEVEAMQIDGISKSYSSDSHATLQSSDSNQLVNSDSKFESSKKHDKTDETSNESRGDNPTHSCTNDDSHDKNLVGCSPSEDLNEDNSAQLADGDDLVGSKDTTAAHASGLKELTSGNYVASSSSHVVQDVTSISKMESVQAGSEEIYHGYSDETIHSARIKPVVGTEITENASVASAPVITIQPDIETEAGVTASLTVLEGSIAEEVDTQVESGHDLVTSTAPLSPAPLPGESHACTDVSCPVAVEVSETKLESANHTASQLGAACTETPNALLNTLIPALPESEETKLSGSDTDGTVFL

SEQ ID NO: 17001 - protein, 139 aa, Brassica napus
  misc_feature (138)..(138): Xaa can be any naturally occurring amino acid
MGRFKNNKKGRVNVKPIAKSNQANVDHVTGDKIPKSFVFSRTKLPGSVKQLQMDLRKLMLPYTALSLKEKKRNTLRDFLNVSGPMGVTHFLMLKKTASALSLRVARTPQGPTLTFKIHQYSLASDIAQSQTRPRCPPXL

SEQ ID NO: 17002 - protein, 527 aa, Burkholderia vietnamiensis G4
MSPVAAFKLILLSFVAIVALECIAKRLRLPPAAALLMGGIGIAFIPGLPPVNLDPELVLLVFLPPLLMDGAYFTVWEEFKRNVGGILLLAIGAVAFTTFAVGYAVHWVAPSLPWAACFALGAIVSPPDAVAAKAVLERVALPRRLMVLLEGESLLNDAAGLVLFRFAVAAALTGAFSLEHAVVRFAELGIGGVVVGFVVGRIVVWFLKLLDDDYLVITVAVIAGWLAYIAGEMVEVSGVIATVTAGMIVGWHQHEVFSAAVRTRGTAFWQVIVFLLEAMVFVLIGLSLRGAIHRLGGFEQVLGTMMPAVLAVLAAVIVSRFVWVYAVEALKWPVRGIVRRGAAPDWKAATVMSWAGMRGVVTLAIALSLPEAMPGRDVILVASFAVILVTVLLQGTTIGPLIRLLCLPQRDERAAHHLSEPQTWAYIEAAQLAAIQPLVHDASGNVIHPRLLEQYTYRAALTERTKDAPQYPPEVRAAHYDVVLAAIRAGRAELLRLHRSGHIHDEMLHMVERDLDLQEVSAQHARG

SEQ ID NO: 17003 - protein, 1085 aa, Saccharomyces cerevisiae
MEDKEQQDNAKLENNESLKDLGVNVLSQSSLEEKIANDVTNFSNLQSLQQEETRLERSKTALQRYVNKKNHLTRKLNNTTRISVKQNLRDQIKNLQSDDIERVLKDIDDIQSRIKELKEQVDQGAENKGSKEGLQRPGETEKEFLIRTGKITAFGHKAGFSLDTANREYAKNDEQKDEDFEMATEQMVENLTDEDDNLSDQDYQMSGKESEDDEEEENDDKILKELEDLRFRGQPGEAKDDGDELYYQERLKKWVKQRSCGSQRSSDLPEWRRPHPNIPDAKLNSQFKIPGEIYSLLFNYQKTCVQWLYELYQQNCGGIIGDEMGLGKTIQVIAFIAALHHSGLLTGPVLIVCPATVMKQWCNEFHHWWPPLRTVILHSMGSGMASDQKFKMDENDLENLIMNSKPSDFSYEDWKNSTRTKKALESSYHLDKLIDKVVTDGHILITTYVGLRIHSDKLLKVKWQYAVLDEGHKIRNPDSEISLTCKKLKTHNRIILSGTPIQNNLTELWSLFDFIFPGKLGTLPVFQQQFVIPINIGGYANATNIQVQTGYKCAVALRDLISPYLLRRVKADVAKDLPQKKEMVLFCKLTKYQRSKYLEFLHSSDLNQIQNGKRNVLFGIDILRKICNHPDLLDRDTKRHNPDYGDPKRSGKMQVVKQLLLLWHKQGYKALLFTQSRQMLDILEEFISTKDPDLSHLNYLRMDGTTNIKGRQSLVDRFNNESFDVFLLTTRVGGLGVNLTGANRIIIFDPDWNPSTDMQARERAWRIGQKREVSIYRLMVGGSIEEKIYHRQIFKQFLTNRILTDPKQKRFFKIHELHDLFSLGGENGYSTEELNEEVQKHTENLKNSKSEESDDFEQLVNLSGVSKLESFYNGKEKKENSKTEDDRLIEGLLGGESNLETVMSHDSVVNSHAGSSSSNIITKEASRVAIEAVNALRKSRKKITKQYEIGTPTWTGRFGKAGEIRKRDPLKNKLTGSAAILGNITKSQKEASKEARQENYDDGITFARSKEINSNTKTLENIRAYLQKQNNFFSSSVSILNSIGVSLSDKEDVIKVRALLKTIAQFDKERKGWVLDEEFRNNNAS

SEQ ID NO: 17004 - protein, 459 aa, Azoarcus sp. BH72
MGSKLKQFGLVMTGVVAGVMISLNFSANADKAALAPLPVEELRAFADVFNAIKQGYVEPVEDKKLVTHAISGMLSGLDPHSAYLDAEAFKDLQVGTQGEFGGLGIEVGMEDGFVKVVSPIEDTPAYRAGVKAGDLIVKLDDTPVKGMNLNDAVKRMRGKPKTDITLTIMRKGESRPIVLTLTREVIKVQSVKSKVIEPGYGYVRVAQFQENTGASLVQHLDKLSKEGQLKGLVLDLRNDPGGLLNGAVGVAAAFLPPEAQVVSTDGRTEDAKRQYRATPEDYLRGSRDDYLKALPRGIKDVPMVVLVNGGSASASEIVAGALQDHKRAVVMGTQTFGKGSVQTILPLNGNTAIKLTTARYYTPSGRSIQAKGIEPDIVVEEGANGSARRVREADLQGHLGNDRDPEAERKLQATKNGEHKPGEDDDEAQPRFEIAGKDDNQLAQAINLLKGLQIVQNKK

SEQ ID NO: 17005 - protein, 1396 aa, Oryza sativa Japonica Group
MDPRRPPSRGGAAANGGGLSYSTLFNLEPLLNFKVPLPEDLDRYRRSSPNGSMSSQGQGSLSDQYNGINDASHGLHRKRKRNLDGASDDDEVDAYSNQITEEHYRTMLSEHVQKYRRSKFKEDVFSSDPPQVIVPQKHKNGSARVTKYRSDTRNVAMLGGVEATAEYNGTKSTNAYGGFNKVVASLDSSYLDMGDNVSYKIPEGYDKLALSLNLPVFSDIRVEETFLNGTLDLRTLAAMLSTDQKFETTNRGGLAEPQPQYESLQERVKVQKFSLQVTEDPFAIPEGAAGRIRRFIISESGSLHVHYVKVLEKGDTYEIIERSLPKKQIIRKDPSEIAREESEKTIKLWHAIAVKGIPRHHRNFMALLKKRQVDAKRFSENCQREVKFKVSRSLKLMRSAAIRTRRLARDMLIFWKRVDKEQYELRKREEKEAAEALKREEELREAKRQQQRLNFLLSQTELYSHFMQNKAGESAPSDEASVPEEDEEDPEEAELKREALRAAQHAVSQQKRMTNAFDSETGRLRQSSDSGIPTDDLASMEPNKIDLLHPSTMPEKSSVQTPELFKGALKEYQLKGLQWLVNCYEQGLNGILADEMGLGKTVQAMAFLAHLAEDKNIWGPFLVVAPASVVNNWAEEILVNEEKLLRRVKWQYMVLDEAQAIKSSSSQRWKTLLSFNCRNRLLLTGTPIQNNMAELWALLHFIMPTLFDSHEQFNEWFSKGIEGHAEHGGALNEHQLSRLHAILKPFMLRRVKIDVIAEMTKKKEEIVPCRLSSRQQVFYQAIKNKISLNELLDGSRGNLNDKKLLSLMNIVMQLRKVCNHPELFERNEGSSYFYFADIPNSLLSPAFGELQDVHYAGKRNPIMFEIPKLVYKGIVSNMEMPVRGCGFLYGSFNRMFNIFSPSYIHQSAFPEAISPNNTVLLSGAFGFTRLINLSPVEASFLATCSLFNRLAFSAVRWNKKYTDELVDVFLDSESTDLESTHNDLTTVRAVVRLLLSPTKAESSFLRTKIETGPSDSPYEALVLSHHERLVSNIRLLRSTYAFIPPARAPPINVWCADRNFAYKLTDEMHDPLAKKLVLGFARTSEFNGPREPTSPHSLIEELHTDLPFPEPMLQLPYRIFGSSPPMSNFDPAKMLTDSGKLQTLDILLRRLRAENHRVLLFAQMTKMLDILEDYMNFRKFKYFRLDGSSAISDRRDMVRDFQNRNDIFVFLLSTRAGGLGINLTAADTVIFYEIDWNPTQDQQAMDRTHRLGQTKEVTVYRLICKDTIEEKILQRAKQKNAVQELVMKGKHVQDDHLMRQEDVVSLLIDDTQISHKLKEISMQAKDRLKKRRTKGIKVDKEGDLMLEDLDDQTSGAAEHDNTSSKKKKSSQKKLPKLQDNGSVDKNAEAEGGESGG

SEQ ID NO: 17006 - protein, 625 aa, Mycobacterium tuberculosis
MARAVGIDLGTTNSVVSVLEGGDPVVVANSEGSRTTPSIVAFARNGEVLVGQPAKNQAVTNVDRTVRSVKRHMGSDWSIEIDGKKYTAPEISARILMKLKRDAEAYLGEDITDAVITTPAYFNDAQRQATKDAGQIAGLNVLRIVNEPTAAALAYGLDKGEKEQRILVFDLGGGTFDVSLLEIGEGVVEVRATSGDNHLGGDDWDQRVVDWLVDKFKGTSGIDLTKDKMAMQRLREAAEKAKIELSSSQSTSINLPYITVDADKNPLFLDEQLTRAEFQRITQDLLDRTRKPFQSVIADTGISVSEIDHVVLVGGSTRMPAVTDLVKELTGGKEPNKGVNPDEVVAVGAALQAGVLKGEVKDVLLLDVTPLSLGIETKGGVMTRLIERNTTIPTKRSESFTTADDNQPSVQIQVYQGEREIAAHNKLLGSFELTGIPPAPRGIPQIEVTFDIDANGIVHVTAKDKGTGKENTIRIQEGSGLSKEDIDRMIKDAEAHAEEDRKRREEADVRNQAETLVYQTEKFVKEQREAEGGSKVPEDTLNKVDAAVAEAKAALGGSDISAIKSAMEKLGQESQALGQAIYEAAQAASQATGAAHPGGEPGGAHPGSADDVVDAEVVDDGREAK

SEQ ID NO: 17007 - protein, 939 aa, Oryza sativa Japonica Group
MVTTHSILLWLALFILLPAAHSSLAASELRAGPTRCDSGSKRQQTQHRVRVDGHELGADLATSAPPPRQHGKGAQCKAGGVDSDGAGDELRADLAAQHRCPNPSPNPDHLLLFLARRPPKTSLSQQLLRLDASSSSSSFSVSPPPPPRTSPTSDAAADDAPPLPEEEDEVPCIRPRASLPPAASLDSRGPYEPLALSPPGERPVVQVPSSINCRLLVHQRDGVRFLYNLYRNNHGGVLGDDMGLGKTIQTIAFLSAVIGKDNDHGDQLVEGRKIAPILILCPTSVIRNWENEFAEWARCSVAVYHGPNRDLVLQKVETQRLEIVITSFDTFRIHGKILCGISWDLVVVDEAHRLKNEKSKLYTACLEITTRKRFGLTGTIMQNKIMELFNLFDWIVPGCLGDREHFRVYYDEPLKHGQRFSAPERFVQVADKRKKHLVSVLSKFLLRRTKEETIGHLMLGKEDNIVFCRMSDVQKRVYRRMLQQPDVQILINKDLPCSCGSPLTQVECCKRTEPHGIIWSYLHRDNPEGCSLCPFCLVLPCLGKLQQISNHLELIKPNLKDEIEKQKKDAELAAAVFDTDIELVGGGAKSENFMGLSDAEHCGKMRALERLLSLWTLQGDKILLFSYSVRMLDILEKFLIRKGYCFSRFDGTTPMNARQLLIDEFNRCPSKQVFLISTRAGNLGVNLVSANRVVIFDPSWNPAQDLQAQDRSFRFGQRRHVTVFRLLGAGSLEELIYSRQIYKQQLSNIAVSGKIEKRYFEGVQDDKKFQGELFGICNLFRDLSDKLFTSEIIEMHGEHGKGNTAETIGIREIVDTNIFGTQDQMKSSMTAIHNENKNLYHCGIVYAHRNEDVVNTRTNEASNCAEDKTVPRHLEELQSKKNETMHTIKAKSYSLVQKKKEFSRIASFMGMNDLEFSKWLLSVSPLQRHEVLDRYRNAK

SEQ ID NO: 17008 - protein, 524 aa, Oryza sativa Japonica Group
MGLDLGALVLKSGGLLVSDYDSIVAINIFVALLCSCIVIGHLLEGNRWVNESITALVMGLITGGVILLVSGGKNSHILVFSEDLFFIYLLPPIIFNAGFQVKKKQFFRNFMTIILFGAVGTLISFVIISLAIGAIFSATDSVCTLQVLNQDETPLLYSLVFGEGVVNDATSVVLFNAIEDIDIANFDSLVLLAFIGNFLYLFFTSTLLGVVAGLLSAYIIKKLCFARHSTDREVAIMILMAYLSYMLSMLLDLSGILTVFFSGIVMSHYTWHNVTESSRITTKHTFATLSFIAEIFLFLYVGMDALDIEKWKLASSSPKKPIALSATILGLVMVGRAAFVFPLSFLSNLSKKETRPKISFKQQVIIWWAGLMRGAVSIALAYHKFTASGHTELRINAIMITSTVIVVLFSTMVFGFFTKPLLNLLIPPRPDIAADLSSQSIIDPLLGSLLGSDFDVGQPSPQNNLQLLLTIQTRSVHRVWRKFDDRFMRPMFGGRGFVPFVPGSPVERSIHGSQLGTVTEAEHS

SEQ ID NO: 17009 - protein, 55 aa, Azolla pinnata
YKYLKSSKGGLFGDGIKWNFTKFLVDRDGKVVDRYAPTTSPASIEKDIKKLIGTS

SEQ ID NO: 17010 - protein, 195 aa, Zea mays
MAAINSAGKKDDGREEKVAAAPAAEGASSSSSDGEGAGTAATGLPMANLVRLMRQVIPKGVKISSRAKDLTHDCAVEFVGFLAGEASELARAQHRRTISPEDFTRSLQALGFDDYVRPMSTYISRYREQATSPAGYSGGFARRPPPRATAAPCVSDEETRSRVPPHGEHGDGWRTSVNTPAPGGHGYDYTSPDNM

SEQ ID NO: 17011 - protein, 124 aa, Pistia stratiotes
NYTELSQLYEKYKNQGLEILAFPCNQFGAQEPGSNDEIVEFACTRFKAEYPIFDKVDVNGDNAAPIYKFLKSSKGGLFGDSIKWNFSKFLVDKKGMLLTVCPTLLSYIRRVRTVGLQAPSVIRN

SEQ ID NO: 17012 - protein, 218 aa, Zea mays
APTRSASSSPASDPHSPPLLPPPPAPAPFSPLLASPRARFYKGFGGGARSLAMADDGGSHEGSGGGGGVREQDRFLPIANISRIMKKAVPANGKIAKDAKETLQECVSEFISFVTSEASDKCQKEKRKTINGDDLLWAMATLGFEEYVEPLKIYLQKYKEMEGDSKLSTKAGEGSVKKDAISPHGGTSSSSNQLVQHGVYNQGMGYMQPQVIYRTVIC

SEQ ID NO: 17013 - protein, 555 aa, Zea mays
MARTAAPAAGYGEDGVYRSPRPAVRIESDTGLSLNDLLFRRADVCPSALALVDSATGQSLTFAAFRSAVLTTAVALSSRAGVRRGDVVLFFAPNCFLYPVCFFAVTALGAVATTANPLYTPREVAKQATDSRAKLAITVSELLPKIVDLGFPTILLDGGGDGDAASAAASKPQGASVTLYSDLVSGARETEYRRPPTKQSDTTALMYSSGTTGASKGVILTHRNFISAAAMMTADQDALGEGPNVFLCFLPMFHIFGLSVITFAQMQRGNSVVVMSRFDMDSVMAAVQRHRVTHLFCVPPVMIALAKLGSVGKYDLSSLRFIGSGAAPLGKDVMEGVAKNFPEAVIAQGYGMTETCGIISLEYPEKGQIRQFGSTGALVSGVEAKIVDVETLICLPPNQLGEICVRGPNIMQGYFNNVQATEFTIKQGWLHTGDIGYFDEGGQLFVVDRLKELIKYKGFQIAPAELEGLLLSHPEILDAVVIPFPDAEAGEVPIAYVVRSSESSLTEVDVQKFIEKQVAYYKKLRRVTFVDSVPKSASGKILRRELISKVRSSKL

SEQ ID NO: 17014 - protein, 703 aa, Oryza sativa
  misc_feature (163)..(163): Xaa can be any naturally occurring amino acid
  misc_feature (497)..(497): Xaa can be any naturally occurring amino acid
MASTTTKNALLLLLLLLLLFPLLHSSLADVAAAAPSSASAAEVDALMELKAALDPSGRLLPSWARGGDPCGRGDYFEGVSCDARGRVAAVSLQGKGLAGAISPAVAMLPGLTGLYLHYNELAGAIPRQLGDLPMLAELYLGVNNLSGTIPVELGRLPALQVLXLGYNQLSGSIPTQLGQLKKLTVLALQSNQLTGAIPASLGDLPELARLDLSSNRLFGSIPSKLAAIPKLATLDLRNNTLSGSVPSGLKKLNEGFHFDNNSELCGAHFDSLKPCANGDEDDNEEGSKMARKPESTNVKPLQAPQTMNVNRDCDNGGCSRSSSSSTTLSSGAILAGTIIIIGGAAACGISVISWRRRQKQKVGGGGTVESLEGRASSSNASSSLINVEYSSGWDTSSEGSQQGLRLSPEWSPSVRYNMEEVECATQYFAGANLLGRSGFAATYRGAMRDGAAVAVKSIGKSSCKAEEADFLRGLRAITSLRHDNLVALRGFCRSRAXRGECFLVYEFMANGSLSRYLDVKDGDVVLDWATRVSIIKGIAKGIEYLHSSKANKAALVHQNICADKILMDHLFVPHLSGAGEHKLLADDVVFSTLKDSAAMGYLAPEYTTTGRFTDRSDVYAFGVVVFQVLTGRKAVSSELRLLGGGGGAEYSGKLDDLVDPRLGGRFSRPEAAKLAGIALLCTSESPAQRPAMAAVLQQLGATQ

SEQ ID NO: 17015 - protein, 637 aa, Vibrio parahaemolyticus RIMD 2210633
MGKIIGIDLGTTNSCVAVLDGDKPRVIENAEGERTTASVIAYTDGETLVGQPAKRQAVTNPTNTLFAIKRLIGRRFEDEEVQRDIEIMPYKIVKADNGDAWVEAKGQKMAAPQVSAEVLKKMKKTAEDFLGEEVTGAVITVPAYFNDAQRQATKDAGRIAGLEVKRIINEPTAAALAYGLDKKGGDRTIAVYDLGGGTFDISIIEIDEVEGEKTFEVLATNGDTHLGGEDFDNRLINYLVDEFKKEQGIDLKNDPLAMQRVKEAAEKAKIELSSTSQTDVNLPYVTADATGPKHMNIKVTRAKLESLVEDLVQRSLEPLKVALADADLSVNDITDVILVGGQTRMPMVQAKVAEFFGKEARRDVNPDEAVAMGAAVQGGVLAGEVKDVLLLDVTPLSLGIETMGGVMTKLVEKNTTIPTKANQVFSTAEDNQSAVTIHVLQGERKQAMYNKSLGQFNLEGIQPAPRGMPQIEVTFDLDADGILHVSAKDKQTGKEQKITIQASGGLSDDEIEKMVQEAEANKEADKKFEELATARNQADQMIHGTRKQMEEAGDALPAEEKEKIETAISELEEARKGEDKEAIDAKVQALMTAAQKLMEIAQQQAQAQQAQGADAGAQSKDDDVVDAEFEEVKDDKK

SEQ ID NO: 17016 - protein, 382 aa, Geobacillus stearothermophilus
MLAVHFGAGNIGRGFIGSLLSQSGYEVVFVDINDELVRLLKEKQEYRVIIADENRQELLIRNVSAVNSQTEREKVIDYITKAHLITTAVGPHILPAIATILAEGLQKRITINKTPLHIIACENMIGGSDVLKSHVFEKISEADKPLFEKYYGFLNCAVDRIVPNQKHDDPLSVVVEPFFEWVIEKRNIIGAIPPIQGAHFVDDLKPYIERKLFTVNTGHAIASYLGYYKKLQTIQEAMCDQEIRSDVEKALHESGAVLVKKYGWNENEHQSYIQKIIQRFINPSISDEVVRVARSPIRKLGANDRLIGPATQYYDLFGQVPHGLVKGIAALLLFDYENDEEAVALQKTIQETGVEGALYQYSQLEKDHPLVIAIKDQWQHLK

SEQ ID NO: 17017 - protein, 615 aa, Candidatus Phytoplasma mali
MTKTNKIIGIDLGTTNSCVSVMEGGEAKVITNAEGGRTTPSVVAFKGNNIMVGEIAKRQAITNPNTIISIKRHIGETKYTVSVNGNKYTPQEISAMILQNLKKTAEDYLGSEVTQAVITVPAYFNDAQRQATKDAGKIAGLEVKRIINEPTAAALAYGIDKNNQKEQIVLVFDLGGGTFDVSILNLADGTFEVLSTSGDNKLGGDDFDQRIVDYLVKEFKKENLVDLSKDKMALQRLKDSAEKAKKELSGVSSTQISLPFITMSESGPLHLENNLTRAKFDELTIDLVQRCLGPVKSALSDAKLTRDKIDQVLLVGGSTRIPAVQELVKKEIQKTPNKGINPDEVVSMGAAIQGGILSGDVKDILLLDVTPLSLGIETLGNVFTKLIERNTTIPTSKTQVFSTAADNQPAVDIHVLQGERTLSTDNKTLGRFQLTDIPPAPRGTPQISVTFDIDANGIVSVKAKDLGTNKEQKIVITGSGTLSEEEIKRMIKEAEENAETDRLKKELIDIKNEADTLIFQTKKALVDLKDDVEVQEKEKIESKIKELEEVISKDDVNIIKDKINALSQDAQNIAIKAYQKTQNKTANDDKNPSSNDNKDEKIKDDVVDADFEEKK

SEQ ID NO: 17018 - protein, 1013 aa, Mycobacterium bovis AF2122/97
MLVLHGFWSNSGGMRLWAEDSDLLVKSPSQALRSARPHPFAAPADLIAGIHPGKPATAVLLLPSLRSAPLDSPELIRLAPRPAARTDPMLLAWTVPVVDLDPTAALAAFDQPAPDVRYGASVDYLAELAVFARELVERGRVLPQLRRDTHGAAACWRPVLQGRDVVAMTSLVSAMPPVCRAEVGGHDPHELATSALDAMVDAAVRAALSPMDLLPPRRGRSKRHRAVEAWLTALTCPDGRFDAEPDELDALAEALRPWDDVGIGTVGPARATFRLSEVETENEETPAGSLWRLEFLLQSTQDPSLLVPAEQAWNDDGSLRRWLDRPQELLLTELGRASRIFPELVPALRTACPSGLELDADGAYRFLSGTAAVLDEAGFGVLLPSWWDRRRKLGLVLSAYTPVDGVVGKASKFGREQLVEFRWELAVGDDPLSEEEIAALTETKSPLIRLRGQWVALDTEQLRRGLEFLERKPTGRKTTAEILALAASHPDDVDTPLEVTAVRADGWLGDLLAGAAAASLQPLDPPDGFTATLRPYQQRGLAWLAFLSSLGLGSCLADDMGLGKTVQLLALETLESVQRHQDRGVGPTLLLCPMSLVGNWQQEAARFAPNLRVYAHHGGARLHGEALRDHLERTDLVVSTYTTATRDIDELSEYEWNRVVLDEAQAVKNSLSRAAKAVRRLRAAHRVALTGTPMENRLAELWSIMDFLNPGLLGSSERFRTRYAIPIERHGHTEPAERLRASTRPYILRRLKTDPAIIDDLPEKIEIKQYCQLTTEQASLYQAVVADMMEKIENTEGIERRGNVLAAMAKLKQVCNHPAQLLHDRSPVGRRSGKVIRLEEILEEILAEGDRVLCFTQFTEFAELLVPHLAARFGRAARDIAYLHGGTPRKRRDEMVARFQSGDGPPIFLLSLKAGGTGLNLTAANHVVHLDRWWNPAVENQATDRAFRIGQRRTVQVRKFICTGTLEEKIDEMIEEKKALADLVVTDGEGWLTELSTRDLREVFALSEGAVGE

SEQ ID NO: 17019 - protein, 471 aa, Acinetobacter sp. ADP1
MSMANKVLKLIQESGAKWVDFRFTDTKGKEQHVTYPADSIDEDTFEDGKMFDGSSIAGWKGIEASDMILRPDAETGFIDPFFAEPTVVVTCDVIEPSTGQGYERDPRSIARRAEEYLKSTGIGDTAFFGPEPEFFVFDEVKWEIDMSGARHTLIAEEAAWSTGKDYESGNSGHRPRVKGGYFPVPPVDSSHDMRAEMCNKIEEIMGPGRVEVHHHEVASCQLEIGVSFNTMVRKADEVQQFKYAVHNVAHQYAKTATFMPKPMVGDNGSGMHVHMSISKDGKNLFAGDEYAGLSEMALYFIGGVIKHARALNAITNPSTNSYKRLVPHFEAPIMLAYSARNRSASIRIPYVSSPKGKRIEARFPDPMMNPYLGFAALLMAGIDGIQNKIHPGEAADKNLYDLPPEEEAKIPTVAHSLDMALEALQADHEFLLKGGVFTKEMLDAYIELKTEEVRRLNTTTHPVEFDMYYSL

SEQ ID NO: 17020 - protein, 440 aa, Synechococcus elongatus PCC 6301
MSLFSRLRFSVYGSALLAASGAVCIGISAEHARALPWQDSPKVVLDQAWQLIDREYVDPTFNRQDWQAVRRELLSRNYGSNEEAYAALRSALRRLDDPYTRFLAPEQFKTLTEQTAGEASGIGIEIIPDSKDSRPRIQAILDNSPASKGDVQVGDRILAIDADSTRELTLDEVRNRLQGKVGSEIDLKLQRGDRIFSVKLTRVQIEIPSVTAELRQHSGRSVGYIQLREFTAHAAREMRTSIRSLDEQGATSYVLDLRGNPGGLLYSSIEIARMWLNNGTIVKTVDRNGKSETINANNSAITNKPLAVLVDQNSASSSEILVGALKDNNRAVVIGRQTFGKALVQSVHTLADGSGLAVTVAHYYTPNGTDLGNRGIQPDVEVRLNQRQQALQRSDPSFLGSNQDPTYGQAIATLEQRTAESTPSPASSPQLSQRPSEIRP

SEQ ID NO: 17021 - protein, 446 aa, Dictyoglomus thermophilum H-6-12
MTGSFPKTKEEVLKYVKDNNVYFIEIWFTDILGYLKSFTITAHELEKAFEEGLGFDGSSVRGFTRIEESDMIAFPEPETFTILPWRPKDKKVARMFATILEPNGKPFEGDPRNVLRRMLAKAKELGFTYYVGPELEYFYLKAPSSNPEVLDWGGYFDLIPRDEAIDLRHQTVSILEEMGIEVEFTHHEVAPSQHEIDFRYKDALTMADIVMTARLAVKEVAYLNGVYATFMPKPLFGQNGSGMHVHMSLFKNGKNAFFDPNDKYHLSDTAKHFIAGLLKHAKEITLITNQWVNSYKRLVPGYEAPVYISWAMRNRSDLIRVPMYKPGKEEATRIEYRAPDPACNPYLAFAVILAAGLEGIEKKYPLPEPIEENVYHMTEEERRKRGIESLPGSLIEAIEITEKSELVRKALGDHVFTNFIENKKIEWDNYRRQVTTYELETYLPVL

SEQ ID NO: 17022 - protein, 977 aa, Streptomyces coelicolor A3(2)
MGDMAVTEAGRAGATTASVPVGLAAVFLPAPLPREGRIAFWNPDGGPVDAAEDFGGAAAGDGRGHGDGERSGGPTELTVVRRHGAGVRRGTAPALSLPLAEALPHLVRARHDRAAHPATACWGAAALHALRLTARGRLLPGLTPTGHDAWRAGPLDPDDIAHLRAVAAALPPEGHAVPLDGPGPIRLPEPEALVRAFLDAVADTLPRTPAAPHASGRPFAAREARRLPDAHDWAAEVAAGMDAGVRISLRLDLSAYDLFDREGEGAPGSGSEGVGARNAGAAVVQVHSLADPTLVADAADLWSGTADAAFGARTRVDTALAVRRAARVWPPLDRLTDQDVPDVLALSEEEVTDLLGVAAGRLAAAGVAVHWPRDLAQDLTATAVIRTAPGSATDGTGFFESEDLLQFRWQLAIGGDPLTEAEMDTLAEAHRPVVRLRDRWVLVDPALVRRARKRDLGLLDPVDALSVALTGSAETDGETVEVVPVGALAALRDRLTAGVRPAEAPPGLHATLRDYQLRGLAWLDLMTSLGLGGCLADDMGLGKTVTVIALHLRRARTEPTLVVCPASLLGNWQREINRFAPGVPVRRFHGPDRTLDDLTGGFVLTTYGTMRSAATTLAEQPWGMVVADEAQHVKNPYSATAKALRTIPSPARVALTGTPVENNLSELWALLDWTTPGLLGPLKSFRARHARAVENGEDDQAVERLARLIRPFLLRRRKSDPGIVPELPPKTETDHPVPLTREQAALYEAVVRESMLAIEEAEGIGRRGLVLKLLTSLKQICDHPALFLKEEHPPGGTDRMTARSGKLALLDELLDTVLAEDGSVLVFTQYVGMARLITSHLAARAVPVDLLHGGTPVPERERMVDRFQSGATPVLVLSLKAAGTGLNLTRAGHVVHFDRWWNPAVEEQATDRAYRIGQTQPVQVHRLITEGTVEDRIAEMLQSKRALADAILGSGESALTELTARELSDLVSLRRPS

SEQ ID NO: 17023 - protein, 60 aa, Glycine max
MLMFPGQTSRHGKIAIPDGYIQLTENDEFAYQEMLIHLALCSIPNPKKGFCSFFLFLTCT

SEQ ID NO: 17024 - protein, 693 aa, Prosthecochloris aestuarii DSM 271
MFSNMRKVFFLSVSLFLLVSSAGYAVPPEPSVALAPLKPTPVQEEAEKYISSYLRQHHFRRVSVNDSLSQEILSRYLDEIDNAKTYFLASDIERFKTKYGDILDDQFLVGKADAGFAIYNRFLEQARKKMKFVISLLDTARFDYSLIETFDLKRDDAPWPTDQKELHRLWRQEVKYQLLNMKYSGEEADSSALVLSKRYTNRLSLLDQQNAEDAFRVFSNAITTSFDPHTSYFSPMDFENFQIDMSRSLEGIGAKLQIENEYTMVNEVIPGGPAFKSKLLNKGDKIIGVGQGARGEIVDIVGWRINDVVHLIRGKKGSLVRLKILPVSQGGKGPSKIIQIVRDEVTLEEQSAQKSIVERDGRKIGLITVPAFYLDFEGQKHNRPDYKSTSRDVRKIIEELKLEGVQGIILDLRNNGGGALEEAVKLTGLFIADGPVVQIRNSQGGKLVLRDEEPDVLYSGPLAVLVNRYSASASEILAAAIQDYGRGIVIGGRTFGKGTVQSILNITRPFNFFYKSDDLGQLKLTVAKFYRITGESTQHLGVTPDLVFPSFIDSEVVGEDTYPSSLPWDKISPSDYDRSSNLSDESIERLRQRYLGRLATDSLYTGYVKDLNALKIFRKKDVVSLYEPAFKAEFEKVKNFEANWSRDEEEAENTADDKPDLMVLHAASVVGDMAVGAGQIPRGAASAPWHSQQ

SEQ ID NO: 17025 - protein, 466 aa, Bacillus subtilis
MKRQLKLFFIVLITAVVASALTLFITGNSSILGQKSASTGDSKFDKLNKAYEQIKSDYYQKTDDDKLVDGAIKGMIQSLDDPYSTYMDQEQAKSFDETISASFEGIGAQVEEKDGEILIVSPIKGSPAEKAGIKPRDQIIKVNGKSVKGMNVNEAVALIRGKKGTKVKLELNRAGVGNIDLSIKRDTIPVETVYSEMKDNNIGEIQITSFSETTAKELTDAIDSLEKKGAKGYILDLRGNPGGLMEQAITMSNLFIDKGKNIMQVEYKNGSKEVMKAEKERKVTKPTVVLVNDGTASRSRNYGRCLHESSNVPLIGETTFGKGTVQTAKEYDDGSTVKLTVAKWLTADGEWIHKKGIKPQVKAELPDYAKLPYLDADKTYKSGDTGTNVKVAQKMLKALGYKVKVNSMYDQDFVSVVKQFQKKEKLNETGILTGDTTTKLMIELQKKLSDNDTQMEKAIETLKKEM

SEQ ID NO: 17026 - protein, 446 aa, Rubrobacter xylanophilus DSM 9941
MDLQEAKNFLEKNNVRYVLAQFVNIHGVSKTKAVPVKHFENVVTEGAGFAAFAVGNLGLGPETPDYMAVGDLSTLTLVPWMPGYARIVCEGHMRGEPWHYDPRVILKKQTQRLKERGWTFYTGLEPEFFLLARDEENGLLRTADPTDVLEKPCYDYKGLARQRNFLETITEILGEVGIDVYQIDHEDANGQFEINFFHKDCVFSADDMIFFRMAAVEVARRSGMVCSFMPKPFADRTGNSMHIHHSIADEEDNNLFEDKNDPQGMGLSKLAYQFLGGIMAHAPALTVFNAPSVNSYKRLAVGSSRSGATWAPAHVSYGPDNRSALVRVPAGRLELRLTDSGANPYLATAALIAAGLDGIDRNLDPGEPCRDNLYALSSGDLQRRNIRQLPSTLNAACDALEADSVICEALGADFVEEFLETKRQEWDRYNRHVSEWEIDRYLEFWS

SEQ ID NO: 17027 - protein, 1152 aa, Oryza sativa
MSGSGNSLDTVALIVGGGSDSSGIVGRKRRRCDLIRERWCCLCPVWCKEAQEVVVPGRGRNGARQRDGGGCALGTTEVLGRICNSSVEKAEERETVIPAISNTEKMGEKQQKSIPRDRKRKGELDPAADYVKDLWDAFYVTAESTHLDTSEVNNKKQLDNCNHDIHVYEDLGHVCHECGLVVRKADSLFHYQWKKASRKRTNVNEVCLKKVGSDAISLSEDFIFSDIAIHPRHAKNIRPHQLEGFKFLVNNLVTDEPGGCILVHAPGSGEIFMLISFIQGFMARHFTARPLVVLPEGILGTWKREFQQWQVEDIPLYDFDSIKADNRVEQLEVLKSWSSKRSILFVGSKHFTQIVCDDRDENAVAECRDTLLMVPSLLILDEGHTPSIDETDMLQSARKVQTPCKVVMSGTLFHNHVKEVFNTLDLVRPGFLKTETFWPIVTRMMGQLEISSARSITEISESMEDTLLNDDNFTRKVNVIRSLGELTKDVLHYCKGEDLNEFPVLLDFSVFLELSPKQKDILCKLEEDHGMLKTSAVGAALYVHPCLSEISEANDVDRDDRVDSLVNSINLGDGVKARFFLNILALANSAGEKLVAFSQYTLPMKFLERLLVKEMGWHVGKEIFVINGDTSMEDGQLAMDQFNGSADAKVLFGSIKAFGEGISLVGASRIVILDVHLNPSVTRQAIGSTFRPGQKKKVFVYRLVAADSPEEKAHETAFNKEVIPKLWFQWSGRCTTEDFKLNQVCIDGSRDELLETDVIRQDIKALYQSIDMGLVSEATVCFNNVSSSGLSVHDTGGNVIGQGDQDSEKNRYLSIASETMLVHFVHVFSFVCVPVNTTCSLSICREILWFLIGTREVPFSSVKFGISSWMGKITLIRIFRILYDEKGQIALLASKGSIKDKQEACKSWRYPSIHPWLTEAVVLAVTAATPPHLLAVAGPLPLPSLCSAVPFALLYYFGKGRKVVHTLKNWLQQVSVENKICGWGYNTTEVLGRICNCSVEKAEERETIILASGNMEKMEEKHQKSDQDFHFSDSTMAIPRERKQKGEVDPAADCLKDRWGAFYVAVESTQVQVETTKYMLLKPIIVNFFILIICFGQLDTSEVNNKKQLNNYNHDIHVYEDLGRVCHECGMVVRKADSLFHKRKKVHNLLKL

SEQ ID NO: 17028 - protein, 169 aa, Bacillus anthracis str. A2012
MIVKRGAKTMTVYDFSAKTITGEEKSLKDYEGKVLLIVNVASKCGFTPQYKGLQEVYDKYKEQGLEILGFPCNQFGGQEPGTEADITSFCELNYGVNFPMFAKIDVKGDKAHPLYTYMTEQAPGLLGMKAVKWNFTKFLIGKDGKVVGRFAPQTKPVDLEVEIEKVLGE

SEQ ID NO: 17029 - protein, 1162 aa, Vitis vinifera; identical to SEQ ID NO: 10111
  misc_feature (85)..(85): Xaa can be any naturally occurring amino acid
  misc_feature (198)..(198): Xaa can be any naturally occurring amino acid
  misc_feature (294)..(294): Xaa can be any naturally occurring amino acid
  misc_feature (337)..(337): Xaa can be any naturally occurring amino acid
  misc_feature (514)..(514): Xaa can be any naturally occurring amino acid
  misc_feature (566)..(566): Xaa can be any naturally occurring amino acid
  misc_feature (595)..(595): Xaa can be any naturally occurring amino acid
  misc_feature (609)..(609): Xaa can be any naturally occurring amino acid
  misc_feature (647)..(647): Xaa can be any naturally occurring amino acid
  misc_feature (711)..(711): Xaa can be any naturally occurring amino acid
  misc_feature (752)..(752): Xaa can be any naturally occurring amino acid
  misc_feature (782)..(782): Xaa can be any naturally occurring amino acid

SEQ ID NO: 17030 - protein, 288 aa, Zea mays
  misc_feature (99)..(99): Xaa can be any naturally occurring amino acid
SPSKQVFLISTRAGNLGVNLVSANRVVIFDPSWNPAQDLQAQDRSFRYGQRRHVTVFRLLGAGSLEELIYSRQIYKQQLSNIAVSGKIERRYFEGVQEXSQKFQGELFGICNLFRDLSDKLFTSEIIEMHGEHGKSSATEATGIREIVDTDLFGSQENRKSSTATTHTDDQKLVDFGIVYAHRNEDVVNMRTDGREKGGADETVQSSLEELLSKNETKHTAMEKSYSSEEKREVARSYSLEQKKKEFSCIASFMGMDDLEFSKWLLSASPHQRSEVLQDYRRKKKNQK

SEQ ID NO: 17031 - protein, 183 aa, Myxococcus xanthus DK 1622
MSQNLYDIPLKSIDGAPQSLGQFKGKVLLVVNVASKCGLTPQYEGLEKLYERKRAEGFEVLGFPANNFLGQEPGSESEIKAFCTLTYDVKFPLFSKISVVGADKHPLYHALTGAIPDAVGEGPMRSRLQGYGITANPVPEVQWNFEKFLVGRDGRVAARFAPDVAADDARLLSAIDAELAKQA

SEQ ID NO: 17032 - protein, 695 aa, Haemophilus influenzae 86-028NP
MVMKFKMSKNVICYAWLSVCLSSAIPAFAVQPTLKPSDISIPAISEESQLATKRATTRLTQSHYRKIKLDDDFSEKIFDRYIKNLDFSHNTFLQSDIDELRQKYGTKLDEQLSQGDLSAAFDIYDVMMKRRYERYTYALSLLDKEPDLNGQDQIEIDREKAAAPQTEADANKLWDARVKNDIINLKLKDKKWSEIKAKLTKRYNLAIRRLTQTKADDIVQIYLNAFAREIDPHTSYLSPRTAKSFNESINLSLEGIGTTLQSEDDEISIKSLVPGAPAERSKKLHPGDKIIGVGQATGDIEDVVGWRLEDLVEKIKGKKGTKVRLEIEPAKGGKSRIITLVRDKVRIEDQAAKLTFEKVSGKNIAVIKIPSFYIGLTEDVKKLLVKLENQKAEALIVDLRENGGGALTEAVALSGLFIADGPVVQVRDAYQRIRVHEDDDATQQYKGLLFVMINRYSASASEIFAAAMQDYRRGIIIGQNTFGKGTVQQSRSLNFIYDLDQSPLGVLQYTIQKFYRVNGGSTQLKGVAADINFPEIIDAKEYGEDKEDNALAWDKIPSASYTEVGNIDYIDNAVNILNEKHLARIAKDPEFVALNEELKVRNERRDRKFLSLNYKMRKAENDKDDARRLKDLNERFKREGKKALKDIDDLPKDYEAPDFFLKEAEKIAADFVIFNSDQKINQANGLSEAKTESKK

SEQ ID NO: 17033 - protein, 222 aa, Ginkgo biloba
MGRGKIEIKKIENSTNRQVTFSKRRGGLLKKAHELSVLCDAEIAVILFSSTGKLFEYCSPRSSIKTVIDRYQRVSGARLWDTQHQNLFSEMAMVKSENEQLHKTLRHMMGEDVNSLSTDELHSLEQTLEIASSRVRTRKNQYLVQQIDKLRKKERFLNEHNNHLYALLVENQASMRDSSTSCQHREQPTAQAFRVQPSQPNLQDREHDEHHDLRLGFSYFLG

SEQ ID NO: 17034 - protein, 224 aa, Glycine max
MDQYQDDYDFEGGNGKSGKGGRDKSKGRRDNSLNVLTRKFIDLIRKSPNQTVDLNNAVKILNVQKRRIYDITNVLEGIQYIEKVLKNKIKWVGKQVTEELDDKINELEELENLQKEESDIDHWINYLQENLGDLTKDEVNNNYSYVTFDDVKSVNTLAREDDQPFLVIRAPKGTVLEVPVVDNETEENFPHRMQLTSQDEEILIYVVSNDQNAAPGGEVTKLNR

SEQ ID NO: 17035 - protein, 217 aa, Euryale ferox
MGRGKIEIKRIENASNRQVTFSKRKQGILKKAREISVLCDAQVSLVLFSSAGKLNEYCSPSTNLKEILTRYQKTSGKKLWDARHEYLNTELDRIRKENENMQIELRHLMGEDLSSLSVVELRNLEDSLQFGYDHVRMKQTECLNNDIEILRKNERMLEEENRQLKYILHQQEQMAMREMRDIEIGSNKKEKGYPSQSRVQPFGFCVQPIQPNLQQNK

SEQ ID NO: 17036 - protein, 637 aa, Vibrio sp. Ex25
MGKIIGIDLGTTNSCVAVLDGDKPRVIENAEGERTTASVIAYTDGETLVGQPAKRQAVTNPENTLFAIKRLIGRRFEDEEVQRDIQIMPYKIVKADNGDAWVEAKGQKMAAPQVSAEVLKKMKKTAEDFLGEEVTGAVITVPAYFNDAQRQATKDAGRIAGLEVKRIINEPTAAALAYGLDKKGGDRTIAVYDLGGGTFDISIIEIDEVEGEKTFEVLATNGDTHLGGEDFDNRLINYLVDEFKKEQGIDLKNDPLAMQRVKEAAEKAKIELSSTSQTDVNLPYVTADATGPKHMNIKVTRAKLESLVEDLVQRSLEPLKVALADADLSVNDITDVILVGGQTRMPMVQAKVAEFFGKEARRDVNPDEAVAMGAAVQGGVLAGDVKDVLLLDVTPLSLGIETMGGVMTKLVEKNTTIPTKANQVFSTAEDNQSAVTIHVLQGERKQAMYNKSLGQFNLEGIQPAPRGMPQIEVTFDLDADGILHVSAKDKQTGKEQKITIQASGGLSDEDIEKMVQEAEANKEADKKFEELATARNQADQMIHGTRKQVEEAGEALPAEEKEKIEAAISELETARKGEDKEAIDAKVQALMTASQKLMEIAQQQAQAQQAQGADADAQSKEDDVVDAEFEEVKDDKK

SEQ ID NO: 17037 - protein, 392 aa, Acridocarpus adenophorus; identical to SEQ ID NO: 10122

SEQ ID NO: 17038 - protein, 631 aa, Hyphomonas neptunium ATCC 15444
MSKIIGIDLGTTNSCVAVMEGGQAKVIENAEGARTTPSVVAFTENGDRLIGQPARRQGVTNPDFTFYAIKRLIGRTFDDPTAQKDKAMSPFSIVKAPNGDAWVKGRDKDYSPQEISAFILTKMKETAEAYLGSKVTQAVITVPAYFNDAQRQATKDAGRIAGLEVLRIINEPTAAALAYGLDKGGNKTIAVYDLGGGTFDVSLLEIGDGVFEVLSTNGDTFLGGEDFDLRVVDFLASEFKKEQGIDLKGDKLALQRLKEEAEKAKKELSSATQYEVNLPFITADATGPKHLNIKLTRAKFESLVEDLVKRTIDPCQKALKDAGKTPAQIDEVVLVGGMTRMPAVQEAVKKFFNREPHKGVNPDEVVAIGAAIQGGVLQGDVKDVVLLDVTPLSLGIETLGGIFTRLIERNTTIPTKKSQVFSTAEDNQPAVTIKVAQGEREMASDNKQLGQFNLEGIAPAPRGLPQIEVTFDIDANGIVSVSAKDKATGKEQQITIQADGGLSEADIKNMMADAESNASTDKARRELVEAKNHAEALIHQTEKQLIEHGAKVTDAIKGDIEKAIADLKEAAAGDNAADIAAKHQALMNAAMKLGEAIYAAQGADAGEGEDAPQSGNDDVVDADFEEVDERK

SEQ ID NO: 17039 - protein, 214 aa, Cabomba caroliniana
MGRGKIEIKKIENASNRQVTFSKRKQGILKKAKEISVLCDAKVSLILFSSAGKMYEYSSPSTSLQNILAKYQSTSGKKLWDARHEYLNQELERIRKENENMDIELRHLRGEDLSSLSVVDLRNLEDSLQIGYENVILKKTQWMYNELERLKQSGDAIDEENRRLRFILKQQDAALCNPTEFDLGGNKKGKGSSSQLAAMQPFGFHVQHNLHNNK

SEQ ID NO: 17040 - protein, 195 aa, Brassica napus
MDAVTDLKRPREEDDNAAAAKPACFSSVIPGWFSEMSPMWPGEAHSLKVEKVLFQGKSDYQDVIVFQSATYGKVLVLDGVIQLTERDECAYQEMITHLPLCSIPNPKKVLVIGGGDGGVLREVARHPSVEHIDMCEIDKMVVDVSKQFFPNVAIGFEDPRVNLVIGDGVAFLKNAAQGSYDAVIVDSSDPIGPAK

SEQ ID NO: 17041 - protein, 485 aa, Gloeobacter violaceus PCC 7421
MRKFLNLVPALMLLAAPCYAQGVVMVAGGGSEGDIGDTASWSYRLYPTLIEAGDVNGDGRVTVAVIADSSQSEFIPEYFEWLGADDAFNVLVATRTQANDPAAVDRVRDVDAIFIKGGDQGKYYDNWNDTRLEDHIRYVVQTLGGGVGGTSAGAMSQSQYALAGEKDLISQDVLTNAQTRYLDDADGGSGIHADFLGFVANTVIDSHFNDRGRLARLLGVMAKVNEDFGLTTGLLGIGLGDLTGLVIRGDRAEVIGQGSVSFLQATPETVTHRPGGAPLYMTNVRADVLTEGWSFNLSGRAVAAQPAGVVTVSYAGDSAANRGALTIQGSKKGNERLYALKPTYFPQSYGLVPTTASTYIFNSLGLNDAQNPDNRGAIQETALRALYDYPHYTGILLSVGAKLSRTQSSPDAIAFGAGTGGSEAAAIVLDGKKIEARGLSPYAAPTDSGNGSLRAAALVNLRVHILGQTGIWGTRYNTRTHTLQQ

SEQ ID NO: 17042 - protein, 424 aa, Pseudomonas aeruginosa UCBPP-PA14
MLDLVAAFIALTTLLTYVNYRFIRLPPTIGVMATALVFSLIVQGLSELGYPILEVEMQEIIRRIDFSEVLMTWFLPALLFAGALHVDLSDLRSYKWPIGLLATAGVLIATFVIGGLAYYTFPLFGWQVDFIYCLLFGALISPTDPIAVLGILKSAGAPKPLATTIVGESLFNDGTAVVVFAIILGILQLGEAPTVSATAILFVQEAIGGVLFGAVLGYGVFVMMRGIDQYQVEVMLTLALVIGGAALAARLHVSAPIAMVVAGLIIGNHGRHYAMSDETRRYVDKFWELIDEILNALLFALIGLELLLLPFSWLHVAAAFALGGAVLVSRLLTVGPAILVLRRFRGANRQVPAGTIRILVWGGLRGGVSVALALSLPLGPERDLILSLTYIVVLVSILLQGLSIGPLVRRIYAGQPLEKSEGAH

SEQ ID NO: 17043 - protein, 757 aa, Mannheimia succiniciproducens MBEL55E
MNIQQIVKEKGLGLLFRQGTVGIEKESQRVHADGSIVTSEHPKAFGNRSYHPYIQTDFAESQLELITPPNKKIEDTLRWLSALHEVTLRTIDENEYIFPMSMPAGLPPEQEIRVAQLDNAADVAYREHLVASYGKAKQMVSGIHYNFQLDPKLVETLFNAQTDYKSAVDFQNNLYLKMAKNFLRYQWIPLYLLSATPTVEANYFKDGSPLKPNQYVRSLRSSKYGYVNAPDIIVSFDSIEKYVETLEHWVNSGRLIAEKEFYSNVRLRGAKKAREFLHTGIQYLEFRLFDLNPFEAYGINLKDAKFIHHFILLMIWLEETADQDAVELGRARLGEVAFEDPHSETAYRDEGEQIINQLIDMLKAIGAEQSAVEFAEEKLAQFANPGQTLCARLVDAIEQAGGYQQLGGEIAKRNKVQAFERFYALSAFDNMELSTQALMFDAIQKGLNMEILDENDQFLRLQFGDHFEYVKNGNMTSHDSYISPLIMENKVVTKKVLAKAGFNVPQSLEFTSVEQAVASYPLFEGKAVVIKPKSTNFGLGISIFQQGVHDKADFAKAVEIAFREDKEVMVEDYLVGTEYRFFVLGNETLAVLLRVPANVMGDGVHTVAELVAAKNDHPLRGDGSRTPLKKIALGEIEQLQLKEQGLTVDSVPAKDQLVQLRANSNISTGGDSIDMTDEMHPSYKDLAVGITKAMGAAVCGVDLIIPDLKKPAEPNLSSWGVIEANFNPMMMMHIFPYSGKSRRLTLNVLGMLFPELV

SEQ ID NO: 17044 - protein, 428 aa, Gloeobacter violaceus PCC 7421
MQDFFRKSVLLTVILSLVGSAAVTAAPKQPVKLRAEYEARLEDSPKAIVDEVWQTVDREFVDPTFNKQNWIAAREQLLGRDYKSKEEAYEAIRNSLKVLGDPYTRFLDPREFQALRDQTSGELVGVGIQLGVSQASKLPVVVKTLEDSPASRSGIQAKDELLAVDGKATAKLEIGEVSRMIRGDRGTQVTLSVLRSGQKMSFTITRAPIELKVVTSSLKEENGRKVGYIRLAEFSEKAPNEMQRAFAKLSEAGVQGWVLDLRGNPGGLLDAATRVASLVLDQGTIVSTVDRAGTQDQLTADRHPVTNLPLVVLVDQGSASASEILAGAIQDNRRGTLVGMKTFGKGVIQQVNALSDGSGVNVTIAHYLTPSGNDIHKKGIQPDVVVAFPEEARKAPIEPATGADIQYQRAVTVLAKLIETKPATNARK

SEQ ID NO: 17045 - protein, 704 aa, Arabidopsis thaliana
MATCPPFDFSTKYYDGDGGCQRQSSFFGGTTVLDQGVGYAVILGFGAFFAVFTSFLVWLEKRYVGARHTSEWFNTAGRNVKTGLIASVIVSQWTWAATILQSSNVAWQYGVSGPFWYASGATIQVLLFGVMAIEIKRKAPNAHTVCEIVKARWGTATHIVFLVFCLATNVVVTAMLLLGGSAVVNALTGVNLYAASFLIPLGVVVYTLAGGLKATFLASYVHSVIVHVALVVFVFLVYTSSKELGSPSVVYDRLKDMVAKSRSCTEPLSHHGQACGPVDGNFRGSYLTMLSSGGAVFGLINIVGNFGTVFVDNGYWVSAIAARPSSTHKGYLLGGLVWFAVPFSLATSLGLGALALDLPISKDEADRGLVPPATAIALMGKSGSLLLLTMLFMAVTSAGSSELIAVSSLFTYDIYRTYINPRATGRQILKISRCAVLGFGCFMGILAVVLNKAGVSLGWMYLAMGVLIGSAVIPIAFMLLWSKANAFGAILGATSGCVFGIITWLTTAKTQYGRVDLDSTGKNGPMLAGNLVAILTGGLIHAVCSLVRPQNYDWSTTREIKVVEAYASGDEDVDVPAEELREEKLRRAKAWIVKWGLVFTILIVVIWPVLSLPARVFSRGYFWFWAIVAIAWGTIGSIVIIGLPLVESWDTIKSVCMGMFTNDRVMKKLDDLNHRLRALTMAVPEAEKIYLLELEKTKKNDEEG

SEQ ID NO: 17046 - protein, 541 aa, Poncirus trifoliata
MDQAISSVVRKLQMVNTSDHNSVVSINIFVALLCASIVIGHLLEESRWMNESITALLIGVCAGVIILLTTGGKSSHLFVFSEDLFFIYVLPPIIFNAGFQVKKKQFFRNFITIMLFGAIGTLVSCTIISLGVIQFFKKLDIGTLDIGDYLAIGAIFAATDSVCTLQVLNQDDTPLLYSLVFGEGVVNDATSVVLFNAIQSFDLNHINTRSAFQFIGNFLYLFFTSTLLGVIGLLSAYVIKKLYFGRHSTDREVAIMVLMAYLSYMLAELFYLSGILTVFFCGIVMSHYTWHNVTESSRVTTKHTFATLSFVAEIFIFLYVGMDALDIEKWRFVKGSPGTSVAASAMLMGLIMAGRAAFVFPLSFLTNLAKKSPTEKISIKQQVIIWWARLMRESNSMALAYNQFTRSGHTQLRENAIMITSTITVVLFSTVVFGLMTKPLIRLLLPHPKHTTNHILSDPSTPKSLSQPLLEEGQQDSYADLVGPTVPRPGSLRALLTTPTHTVHYYWRKFDDAFMRPVFGGRGFAPFVPGSPTERSVRGGQ

SEQ ID NO: 17047 - protein, 542 aa, Citrus reticulata
MDQAISSVVRKLQMVNTSDHNSVVSINIFVALLCASIVIGHLLEESRWMNESITALLIGVCAGVIILLTTGGKSSHLFVFSEDLFFIYVLPPIIFNAGFQVKKKQFFRNFITIMLFGAIGTLVSCTIISLGVIQFFKKLDIGTLDIGDYLAIGAIFAATDSVCTLQVLNQDDTPLLYSLVFGEGVVNDATSVVLFNAIQSFDLTHINTRSAFQFIGNFLYLFFTSTLLGVIGGLLSAYVIKKLYFGRHSTDREVAIMVLMAYLSYMLAELFYLSGILTVFFCGIVMSHYTWHNVTESSRVTTKHTFATLSFVAEIFIFLYVGMDALDIEKWRFVKGSPGTSVAASAMLMGLIMAGRAAFVFPLSFLTNLAKKSPTEKISIKQQVIIWWAGLMRGAVSMALAYNQFTRSGHTQLRENAIMITSTITVVLFSTVVFGLMTKPLIRLLLPHPKHTTNHILSDPSTPKSLSQPLLEEGQQDSYADLVGPTVPRPGSLRALLTTPTHTVHYYWRKFDDAFMRPVFGGRGFAPFVPGSPTERSVRGGQ

SEQ ID NO: 17048 - protein, 440 aa, Rhizobium leguminosarum bv. viciae 3841
MIRRASLVLVGALMGATAMSVIYSAGVPAEAAGSSTYKELSVFGDVFERVRAQYVTPPAEDKLIENAINGMLSSLDPHSSYMNAKDAEDMRTQTKGEFGGLGIEVTMEDELVKVITPIDDTPAAKAGVLAGDYISEIDGQSVRGLKLEDAVEKMRGAVNTPIKLTLIRKGADKPIELTIVRDVVAVQAVKSRVEDDVGYLRIISFTEKTYPDMEKAIKKIKDTVPADKLKGYVLDLRLNPGGLLDQAINVSDALLQRGEVVSTRGRNPDETRRFNAGPGDLTDGKPVIVLINGGSASASEIVAGALQDLRRATVLGTRSFGKGSVQTIIPLGENGALRLTTALYYTPSGRSIQGTGITPDIKVEEPLPEELQGKMVTEGESSLRGHIKGQSETDEGSGSVAYVPPDPKDDVQLNYALDLLRGKKTDPAFPPNPDKAVVAK

SEQ ID NO: 17049 - protein, 470 aa, Haemophilus influenzae
MSNAIASVFKLIEENDIRFVLLRFTDIKGKEHGVSIPVSLVDEDMFEDGKMFDGSSVEGWKTINKADMLLMPMAETAVVDPFAQIPTLSIRCSVYEPTTMQSYDRDPRSIAIRAENYMRSTGIADQAFFGPEPEFFLFDDVRFNVSMNKASFSIDDIEAAWNTNKKYEEGNNAYRPLKKGGYCAVAPIDSAHDIRSEMCLILEEMGLVIEAHHHEVATAGQNEIATKFNTLTLKADETQIYKHVVQNVALEHGKTACFMPKPITGDNGSGMHCNMSLSKEGKNIFQGDKYAGLSETALYYIGGIIKHAKALNAFTNPSTNSYKRLVPGYEAPVLLAYSASNRSASIRIPAVTNPKAIRIEARFPDPLANPYLAFAALLMAGLDGVVNKIHPGDAMDKNLYDLPPEELKDIPAVASSLEEALNSLEKDYEFLTQGGVFAKDFIDAFISIKRKEVERLNMAPHPVEFEMYYA

SEQ ID NO: 17050 - protein, 534 aa, Thermobifida fusca YX
MRPEHVQPRLLSELVPLLGPDAFVTCVDPAEPPLGTAPTPAATDLEQASSVDSVVVTGVTHDSRAVRPGDLYVAVQGQRVHGAKFAAQAARAGAAAVLTDPAGYDRAAATRLPVITVPDPRSRLGDVAAWIYGHPARELLLIGTTGTSGKTTVSYLVESGLREAGMRTGLVGTVEIRVDDERIDSSLTTPEATELHGLFALMRERDVAGAAMEVSSHALALGRVAGVRYDVAVFTNLSQDHLDFHADLHDYFETKARLFTPEFAKVAVVNRDDSFGRTLIDRITEQGAIPVTTFSATGDTAADWYATDVVLEAGGSRFRVVGPGGMAMDASVRLPGPFNVANAMAAIVALIEAGVPLPTAVAGVAAARGVPGRMERVDEGQDFTAIVDYSHKPGAIEAVLTSLRPITEGRLTIVVGCGGDRDRGKRPLMGEAAARLADAVILTDDNPRSEDPVTIITSMLEGVAKVPVAQRARITVEPDRRTAIELAVTRAQPGDVVVVAGKGHERGQHVGDRILPFDDRDVLREAIRARLDTD

SEQ ID NO: 17051 - protein, 507 aa, Myxococcus xanthus DK 1622
MKLTDVLAGCGAEQTSGGRSAVDVTGVTQDSRRVKPGDLFVAIPGTKEDGAQFIGEAVSRGAVAVVSEKPVPSSQVPFFKVSSARKALALIAANFYGRPADQLTLLGITGTNGKTTTSYLLEAMSTAAYASTGVIGTLGYKFAGRTVECANTTPDPLELHRILREMVEAGVETVIMEVSSHALAQERVHGLTFKAAGFSNLSRDHLDYHKDMEDYFQSKRKLFAENLSATGVAVVNGDDTYASRIYNEQRGQKRMAWKFSRQGSGEISAADVSFSLQGIKGVLKTPAGDIPLKSKLLGPHNLENILLAVGIGLGAGFARRDVQEGIERMMPVAGRMERVENYGPSGAPAVLVDYAHTDDALKRSIEAARSLAKGRVIAVFGCGGDRDKGKRPLMGAVAGEGADLAVVTSDNPRTEDPEEIISQVTAGIEKSGLRRISAGKAKSGEKGYLVDADRRAAIEQAISLASADDVVLIAGKGHETYQQVGEEKLVFDDRQVAAKALANRIAG

SEQ ID NO: 17052 - protein, 633 aa, Flavobacteria bacterium BBFL7
MSKIIGIDLGTTNSCVSVMEGSEPVVIPNAEGKRTTPSVIAFVEGGEIKVGDPAKRQAVTNPTKTVASVKRFMGNKFSESSKEAARVPYNVVKGDNDTPRVDIDGRLYTPQELSAMILQKMKKTAEDYLGQEVTGAVITVPAYFNDSQRQATKEAGEIAGLKVERIINEPTAAALAYGMDKKDTDQKIVVFDFGGGTHDVSILELGDGVFEVLSTDGDTHLGGDDVDQKIIDWLADEFKAAEDIDLRQDPMALQRLKEAAEKAKIELSSSAQTEINLPYVTATASGPKHLVKTLTRSAFEKLINDLVKRTIEPCQTALKNAGLSTGDIDEIILVGGSTRIPAVQEAVEKFFGKAPSKGVNPDEVVAIGAAIQGGVLTGDVKDVLLLDVTPLSLGIETMGGVMTKLIESNTTIPTKKSQVFSTAADNQPSVEIHVIQGERSMAADNKTIGRFHLSDIPPARRGTPQIEVTFDIDANGIIKVSAEDKATGKKQDIRIEASSGLSEEEIEKMKQDAAANADADAKAKETADKLNAADQMIFQTEQQLEEFGDKLPEDKKAPITEALTELKAAYETKDIAVIDPALEKLNTVWTAASEEMYKAQADAQGGQPGPDAGADQAADNTSDVEDVDFEEVK

SEQ ID NO: 17053 - protein, 548 aa, Candidatus Blochmannia floridanus
MEIFFTILILTLAVSISGIIRQILPFQIPLPLMQIMLGAVLAWPKFGLHIDFNPELFLLLFIPPLLFSDGWKTPMREFIRHGGEIIILALVLVVITVIGIGYLIYWMIPEIPLVASLALAAVLSPTDAVALSGIVGEGRMPKKIMDILQGEALMNDASGLVSLKFAISVAMGTMIFSISGVSIEFLKVSIGGLLAGISITWGYSKSLRLIMCLSGEDPATQTMLLLLLPFAVYLIAEHIGVSGILSSVASGMTIGQSGIIRNAPLAMRLRGNSVWTMLEFVFNGMVFIMLGLQLPDILYTSIIQAQLDPTIKIWVLFVYVMVIYIALIALRFAWLWLMKYISVHYMHRRPMVFSKYTIREILIASFAGVRGAITLAGVLSIPLFLRDGMAFPCRYQLVFIATGVILLSLLCGVIVLPWLLQGITVSDKLLRREEERMARTIAAEVAIDSLYKLEERLVHDPGENIDSQLINEVSARVISNLRYRIDGSNDVRRSILIEDLERRMRLNALRAERGEYYHLRAQQKISNETLTKLLRDLDFLEALLIEHE

SEQ ID NO: 17054 - protein, 392 aa, Acridocarpus chevalieri; identical to SEQ ID NO: 10139

SEQ ID NO: 17055 - protein, 144 aa, Saccharomyces cerevisiae [sequence omitted]

SEQ ID NO: 17056 - protein, 392 aa, Acridocarpus excelsus; identical to SEQ ID NO: 10140

SEQ ID NO: 17057 - protein, 392 aa, Acridocarpus orientalis; identical to SEQ ID NO: 10143

SEQ ID NO: 17058 - protein, 392 aa, Acridocarpus smeathmannii; identical to SEQ ID NO: 10145

SEQ ID NO: 17059 - protein, 171 aa, Triticum aestivum
TRLRLPVILLDDAAPPATADVTLYSDLVSGADESAYRRPPTKQSDTAGLLYSSGTTGESKGVVLTHRNFIAAATMVTSDQDERGEPPNVFLCFLPMFHIFGLSVLTFAQLQRGNAVVVMSGFAMDSVMRAVQQHRVTHVFCVPPVMIALAKHGRAGKYDLSSLKFIGSGAA

SEQ ID NO: 17060 - protein, 222 aa, Brasenia schreberi
MGRGKIEIKRIENSSNRQVTFSKRKQGILKKAKEISVLCDANVFLILFSSAGKMYEYTSPSANLENILTRYQTASGKKLWDARHEYLNHELDRIKKEHDNMQIELRHLNGEDLSSLSVIDLRNLEDSLQIGYENVILKKTQWMYNELERLKQNGDAIDEENRRLRCLLKQQDAALCDLTDFDLGSNKKGKGNPSHLGMQPFGFHVQPIQPNLQHNKFKSGPC

SEQ ID NO: 17061 - protein, 422 aa, Yersinia pestis KIM
MAALPTCNANYLAYKQVITARAVGRKWPFYSKVTNMKALHFGAGNIGRGFIGKLLADAGAQLTFADVNQPLLDELNKRKRYQVNVVGEQARVEEVKNVSAVNSGSPEVVALIAEADIVTTAVGPQILARIAATVAQGLITRHQQGNTRPLNIIACENMVRGTSQLKQHVFAALSEDEQIWVEQHVGFVDSAVDRIVPPSEAGSTDILAVTVETFSEWIVDGTQFKGQPPEIVGMELTDNLMAFVERKLFTLNTGHAITAYLGQLAGHQTIRDAILDPAVRQTVKGAMEESGAVLIKRYAFDPQKHAAYINKILSRFENPYLHDDVERVGRQPLRKLSAGDRLIKPLLGTLEYQLPHDSLVTGIAAAMSYRSEQDPQAQELVTLLAQLGPKAALAQISGLPADSEVVEQAVSVYNAMQQKLAH

SEQ ID NO: 17062 - protein, 639 aa, Schizosaccharomyces pombe
MRFFNAHKSAEDGNYSETTNAISLKNERQSRDLSVNKHGRMLLTALLENFCQLYDNNPAKSKRLFALICHTLQKIGILEEEYIEELAAVRSNYQDALHHLILQAREAIRLDDAEERLLALPDPTNVFEKFPQETALSKFSVDGLNVRQFRFRDLTLESWLQSRNSRYIEDFEEYSLLGRGGFGSVYHVRNKIDGAEYAMKKINSTFQQMSYSKIFREIKCLAKMDHPNVIRYFSSWVESTTEATQMPIVMSKNSSRVLGTSSYCDVNGMDSIIFEPTESSALTDDILFAEDPGTESIISTSRKSSYSSTTESSNFENLESPRNLHDSNVSTFNNTTILDDDYSSSMHISKTGPTHSFIIYIQMQLCFDDLESYLIRRNHFLSFPLCKEQIQLHTDLFRMIINGVMYVHEGVNLIHRDIKPSNIFLAKSLPEDRGSVPLISYNDKNDLKEYITPKIGDFGLVVENKKNTETALSFLERNHLPNLQDETQHIGTATYAAPELLDAMSSQHNKFTKKIDTFSLGMVLFELLHPFQTNMERATKLQDLRRGNLPEEFVEQHICESSLILWMTAKDPTKRPSLLEVLNCGLLLPNQVSMPNISNIVSTNHLDVETQMKLIMDENQRLREQIAVLRSRIQHLETR

SEQ ID NO: 17063 - protein, 469 aa, Xylella fastidiosa Ann-1
MSLENVEKLVKDKKIEFVDLRFVDMRGVQQHVTFPVNILEPSLFKDGKMFDGSSIAGWKGINESDMVLLPDASTAYLDPFYADPTLVMTCDILDPATMQSYVRDPRGIAKRAEIYLNSLGIADQAFFGPEPEFFIFDSVRFSNDMGHAFFQIASEEAAWNTGAEFEGGNSGYRPTVKGGYFPVPPTDSLHDLRAEMVKTLEQVGIETEVHHHEVATAGQCEIGTKFDSLVKKADQLMTMKYILKNVAYRNGKTVTFMPKPIVGDNGSGMHVHQSLSKGGVNLFSGDDHAGLSQLALYYIGGIFKHAHAINAFSNSGTNSYKRLVPGFEAPVMLAYSARNRSASCRIPWVSSPKARRIEMRFPDPLQSGYLTFTALMMAGLDGIKNKIHPGPPNDKDLYHLAPEEEKLIPQVCSSLDQALEALDKDRDFLKAGGVMSDDFINGYIALKMQEVTQFRAATHPLEYQMYYAN

SEQ ID NO: 17064 - protein, 392 aa, Acridocarpus zanzibaricus; identical to SEQ ID NO: 10149

SEQ ID NO: 17065 - protein, 1137 aa, Solanum lycopersicum; identical to SEQ ID NO: 10150

SEQ ID NO: 17066 - protein, 1046 aa, Crocosphaera watsonii WH 8501
MTILHGTWIENTSEKHFFIWGETWRSLSSDISSDDSILMYPFSVDKQGIIEQLNSNKIKIEKNKNIESVSQIFYLPSKFIAKSKQSIPLLSTELKDKDFEQGDIQLIAWKIEGIKLNVDDTINILSQLPLGLTNNDENYIGDNLKFWTHIYRWSLDLLTRGKYLPQMEEQDNNCYGQWEPLLDSLVDQQRFSKFIQTMPNSSLAYHNLMEGELSSSLLKQTTILDFLSTIINQQVRQFIDVAITPSSFIQKWLYSLTQDLSKFEASEVERKGLKNAINNWKSSLSEYIIKSDNQPLGINQFRVCFKLENPAKSGKKLEQSNWQLHYYLQALDDPNFLISAKVIWENPVTRLICNNRTINHPQETLLKGLGLASRLYYLIEESLQDNKPSFSELDPIQVYEFLRSIANILKDNGLGVILPASLEQGVEEKRLGISLTAEVKSKKGQRLSLQSLLSYKLNLAIGDKTISKKDFEKLLAQKSPLVEVKGEWIALQPADVKAAQQILNKSYDPLELSVEDALRFSTGDISTVAKLPITNFEAKGELANLINAINNNESIPMIENPRGFKGQLRPYQQRGVGWLSFLEKWGLGACLADDMGLGKTPQLIGFLLHLRSEGMLDQPTLVICPTSVLNNWEREVQKFAPTLSTLIHHGDKRSKGKAFVKAVSKKNVIITSYSLIYRDIKSFEQVEWQGIVLDEAQNIKNPQAKQSQAVRQISTQFRIALTGTPVENRLTELWSILDFLNPGFLGTQQFFRRRFATPIEKYGDKESLQIMRSLVRPFILRRLKTDKTIIQDLPEKQEMTIFCGLSSEQGKLYQQLVDNSLVAIEEKTGIERKGLILSLLLKLKQICNHPAHFLKQKSLKTAEQSGKLLRLEEMLEELIEEGDHALIFTQFSEWGKLLQPYLQKKFQQDVLFLYGATRRVQRQEMIDRFQQDPNGPRIFILSLKAGGTGLNLTRANHVFHIDRWWNPAVENQATDRAFRLGQKRNVQVHKFVCTGTLEEKINEMLESKQKLAEQTVDAGEQWLTELDTDQLRNLLLLDRDTIIDEQ

SEQ ID NO: 17067 - protein, 1445 aa, Physcomitrella patens subsp. patens
DDPQDSDFDPTDGASSRVKDSDAELSEEVSDESLNLSDDSLDLSDDSDNSYGKRRASRKRKTTRTSQANRNRTRVLRTQRLRVQGSLCSSDNESSAKDSVEEESDEDSSYGRPQRKTVTSSRRKRQETSGSAHALKNDRDLSAKEARTRTSSRALPRKSYVEAEDSQASEEERDKKRLKEIEEEEDYGDAIERVLWHQPKGIAEAEAEEGRHADPFVLDTDPNAELTWKNQEFYIKWKGQSYLHCSWMPLSELELLSGYKKVVNYMKKIDEDRQVRQTLSPEEAELHDVSKEMELDLLKQYLQVERVFADRNRVDNEEEITEYLVKWKGLSYCDSTWFKDTDIAFAQSQIDECKAREAETTFQGKPVDVQRRKGKDDTNFHSWEICIIFNILSLSLICLNMRKLEEQPEWLKGGTLRDYQLEGLNFLMNSWRNDTNVILADEMGLGKTVQSVSMLGFLQYAQQIPGPFLVVVPLSTITNWAKEFRKWLPDMNVVVYVGNRASREVSQHEFYTGRKTGRTIKFNTLLTTYEVVLKDKAVLSKIKWCYLMVDEAHRLKNCEASLYTTLQEFSTKNKVLVTGTPLQNSVEELWALLHFLDSDKFKSKEHFTEHYKNLSSFDEKELANLHAELRPHLLRRIIKDVEKSLPPKIERILRVEMSPLQKQYYKWILERNFNDLNKGVRVNQVSLLNIVVELKKCCNHPFLFESADYGYGGDANTNDNNKIQRIVLSSGKLAILDKLLVRLKETKHRVLIFSQMVKMLDILADYLSLRGFQFQRLDGSTRADLRHQAMEHFNAPGSEDFCFLLSTRAGGLGINLATADTVIIFDSDWNPQNDLQAMSRAHRIGQRDVVNIYRFVISRSVEEDILERAKKKMASSKLILMPEFLCVLDHLVIQKLNAQGRLEKKEAKKGTGFDKNELAAILRFGAEELFKDDKNEEDQKSKLENMDIDEILARAEKVETKSATEVDAEGNELLGAFKVANFSNTEDDATFWSRLIPPEAARQAEDMSGPRVARTIRNYSEDLGSERNDKRRRGDGKEKLPKRGSRSSKEYVPPSEIEGAAARTAKWGGGVLTKKEANSFIKAVKKFGDLSRIKLIAKEAGDPVSETSTSLQSELWDALVNGCKDAVRRAGVDCKAAVLDFFGVPVKSQDMLGRINELTLLGRRIKRFKDPVAQFRLKSHPRVPSWSKVCDWSQVDDARLLLGVHYHGLGNWERIRLDERLLLVDKLAPQGATSADTSLPRSTHLEARVNALLRKELEVSGVINGNDEAERPLGGKGVYKRDWLDDSAKDRSAKLDIGLGRKGSGGSGSQKLNARDRAAKRLRAEQDVKEEGEISDTDEDNMGRQSKEEKWHHWCAQMMEDQTRTLERLQRLQTDFSLPKEEVLRRVKTYLQTLGHKIDSILAENATAPNPDRMATRLWNYVSTFSNLKGDKLAEIYKKLRLEPQ

SEQ ID NO: 17068 - protein, 292 aa, Aspergillus nidulans FGSC A4
MSEITHPTIKDGWFSEQSEMWPGQAMNLRVNQILHHEKSKYQDVLVFESSDYGTVLVLDNVIQCTERDEFSYQEMITHLAMNSHPNPKKVLVIGGGDGGVLREVVKHETVEEAILCDIDEAVIRVSKKYLPGMSIGFQHPNVKVHVGDGFEFLKQRQNEFDVIITDSSDPEGPAESLFQKPYFELLRDALRDGGVITTQAENQWLHLPLIADLKKACNEVFPVAEYAYTTIPTYPSGQIGFMVCCKDANRNVKEPVRTWSREEEERLCRYYNQDIHRASFVLPNFARKALGN

SEQ ID NO: 17069 - protein, 275 aa, Clostridium perfringens SM101
MKGSSKKNLIIIGGAEDKKGEKIILNFVADKFKESEGIMLIATIATESPNIVIEQYKNIFSSMGIREIKELRVIEREEAFDENNISLVNEASVIFFTGGDQLRITSLIGGTPLYDTLQKRSNEGCYFVGTSAGASVMSDVMIVGGEEGESPKKSSLNMSAGLGLIKNTLIDQHFAQRGRIGRLLSGVCQNPEVLGIGIDEDTAIVINDDELTVIGSGAVYFVDGRNIEYTNVSEKRQDEVFSIFNIKLHVLTAGKKMNLSTRVPFEEERNKNEDK

SEQ ID NO: 17070 - protein, 174 aa, Glycine max
DHMLSALHCCLLVATVLGFNLVQFVMFCSVEWNTKIMEGLNVYEKVVASLFQVTNARHSGESVFDLSSISSAILVLFVVMMYLPPYTTFLPVREHENDVKRNEKSVVECLVFSQLSYLVIFIILICITESNSLKEDPLNFNVWNITLEVISAYGNVGLSMGYSCARQLKPDATC

SEQ ID NO: 17071 - protein, 376 aa, Andropogon ternarius; identical to SEQ ID NO: 10152

SEQ ID NO: 17072 - protein, 507 aa, Vitis vinifera
MSASGFAMNIAGDHAQVVLISVFVAVLCLCLVIGHLLEENRWLNESTTAIIIGCITGTIILLLSKGKSSHILRFNEELFFIYLLPPIIFNAGFQVKKKQFFQNFITIMLFGVIGVFISSSIITAGAWWLFPRFGFTGLSAQDYLAIGTIFSSTDTVCTLQVLHQDETPLLYSLVFGEGVVNDATSVVLFNAVQKLDKSKLNGWAALRVLLDSLYLFSTSTALGVVAGLLTAYTLKTLYIGRHSTVREIALMVLMAYLSYTLAELFHLSGILTVFFFQESQPGMHIFATMSFIAETFIFLYVGIDALDIEKWKLSKLSFRTSVGIYSTVVLLISLGRAAFVFPLSTFSNYVHRRADRLSSISFKHQVIIWWAGLMRGAVSIALAFKQFTYSGVTLDPANATMVTTTIIVVLFTTLVFGFLTKPLISFLQPHHTNNNTSHGEPRSPKEDLSLPLLSLEESAETNILRAKESLSMLIERPVYTIHNYWRKFDDTYMRPVFGGPCRDQSAC

SEQ ID NO: 17073 - protein, 376 aa, Apluda mutica; identical to SEQ ID NO: 10154

SEQ ID NO: 17074 - protein, 470 aa, Thermobifida fusca YX
MIALTLDRIAKITRSRLRGSAQPTDTVDGPVVIDSREAAPGSLFVALRGSRVDGHDFAEAAVRAGATAVLCSRPVDAPHLLVDGGDDAVVAALAKLARAVVAELPDADIIGVTGSSGKTTTKDLLAQTLQRIGPTVAPPGSFNNEIGHPLTVLRADQTTRFIALEVAARGVGHIAHLCQIAPPRIGVVLNVGSAHMGEFGSRDTIAQAKGELVEALPAAAQGGVAVLNADDDAVIGMASRTAARVVSYGLAPDADVRAEGIALDERGRPRFTLAIGEDTAPVSLRLVGTHQVHNALAVAAVLRELGEPVTAIAAALSEAGPVSRWRMEVTERPDGVTIVNDAYNANPESMSAALRTLATLASGRRAFAVLGHMAELGSAHRTEHERIGRLVTESGVDVLITVGEQAASIADGAASVADWKGETVTVADVTEAVAVLKERLRPKDIVMLKGSRVAGLEQVAEQLIDVEAAE

SEQ ID NO: 17075 - protein, 380 aa, Glycine max
IRSATSAPPPRLMPDLSTLTRIPWNKQDEMVLADMCVKPGEAWEYCPRDALRRASKILKDEFDLEMNAGFENEFILLKSITREGKEEWIPFDSSPYCSSSAFDAASPILHEVAASLHSLGISVEQLHAEAGKGQFELVLKYTVCTKAADNLTFTREVVRAIARKHGLLATFIPKYALDDLGSGSHVHLSLSRNGQNVYMASDRSSKHGISTLGKEFMAGILHHLPSILAFIAPLPNSYDRLQPNTWSGAYLFWGNENKEAPLRATSPPGTPDGLVSNFEMKSFDGSANPYLGLAAILAAGIDGLRRKLSLPEPVDTNPNPETLQRLPASLSESLDALNKDDFLKEFMSDKLLTTIKAIRKAEIDHYTKHKDAYKQLIHRY

SEQ ID NO: 17076 - protein, 376 aa, Bothriochloa odorata; identical to SEQ ID NO: 10159

SEQ ID NO: 17077 - protein, 625 aa, Haloferax mediterranei
MASNKILGIDLGTTNSAFAVMEGGDPEIIVNAEGDRTTPSVVAFTDDGERLVGKPAKNQAIQNPEHTIRSIKRHMGDDGYTVDIEGEEYTPEQISAMILQKIKRDAEDYLGDEVEKAVITVPAYFNDKQRQATKDAGEIAGLEVERIVNEPTAASMAYGLDDESNQTVLVYDLGGGTFDVSVLDLGGGVYEVVATNGDNELGGDDWDEAIIDWLATEFKNDHGIDLREDRQALQRLKDAAEEAKIELSSRKETTINLPFITATDSGPVHLEYDLTRAKFESLTKDLIDRTVEPTEQALEDAGYGKDDIDDVILVGGSTRMPQVLDKVEEILGSEPKKSVNPDEAVALGAAIQGGVLGGEVDDIVLLDVTPLSLGIEVKGGLFERLIEKNTTIPTEESKIFTTAADNQTTVQVRVFQGEREMAEDNELLGEFTLSGIPPAPAGTPQIEVGFNIDENGIVNVSAEDKGSGNAESITIEGGAGLSDDEIDRMQREAEQHAEEDKERRRAVEARNEAEGAVQRAETLLEENEENVDDELRADIEAAIEDVEAVLEDDDASTDELEDVTEDLSKELQEIGKRMYQQQAQAQAGGPGGAGGPGGADGPGADADPEDFVDADADFDDEDDDE

SEQ ID NO: 17078 - protein, 962 aa, Chlamydomonas reinhardtii
MVRELLGELPLNALPTPQIKQPGKMPTSQVLTASATKLPDSEGSEEGLEDFSSGDEVAAKAPAQVAAPQQHSKLRRLAKNQASSRGSLSPDDDLLAGFSNLVLGSGPRPAAPSGSGALPAKPTSAIAATATSSYTSAAGAAAAAAATSGQGRAGRQVGAPAAAVLVPAFVAGREEQGDDEEEEDLDDSDSQDEDPAQEPGALVLRSAVDPGRKPYVLAAGVACRLYPHQVVGVRWLWSLYDMQRGGILGDDMGLGKTMQCAAFLAGLLGSGLARRALIIAPKTLLPHWAKELRVCGLAGLTKEYFGSSVAERNAALRANPKMKLVEQLRKLPARVRVIISGTPIQNNLMEMHSLFDFTTEGLLGDARAFKTNYERPITKGLDKEATARERQTGAAIAAALRRCAGARALAGLPLGRRCKRDVLTGKGDDDKAAGGEGGKAHEGGAQDAAAAGPSTSGSGTAAAAGGGGAQARAQSLPRKNDLVVWLRLTPLQRKIYTAFLHTDSVRQVLSHTASPLAAITVLKKICDHPALLSANAATSVIRGAHRWANDAKGGKAKAAGKATGHRRTSLDDFILRRAAHRARLSFLAVALADDLTGNLTAEWLSDEAGGGGDVSSASLHAELARELEQRGAEASCKSAFVLALLGRLAAAGHRTLIFSQSKVMLSILEAGVRAMDLEYCRIDGDVDDRQAHVARFQNSKTIPVFLLTSQVGGLGLTLTAADRVIIVDPAWNPSIDNQSVDRAYRMGQTRDVVVYRLITCGTVEEKIYRKQVFKGGLSRTGTEEGIQFRYFTQTELKDLFSVSSEGLRTSSTQQQLDGLHRHQRNATQQMEAHLAEVMRMEGVAGIHDHDLLFSQRPQEVAPTAQEGDKILSQMSRGASGGAAGVDALADMLGAGMRLGGAGTAAGVAATMAALKERAAFDAARRKVDELQAKIRSIERSSNITFMPDGGKRAALALLQALG

SEQ ID NO: 17079 - protein, 598 aa, Oryza sativa Indica Group
MASASVPAAGYGADGVYRSLRPPAPVASDPGLSLTDLLLRRADACPSALALADAAAGGRALTFAELRSAVLSTAVALSSRAGVRPGDAVLLLAPNCVLYPVCFFAVTALGAVGTTVNPDYTPREIAKQVSDARAKLVITISALVPKIAGLRLPVILLDDDANAAAASLPPDATVTLYTNLVAGVKEADYSRPPIKQSDTAALLYSSGTTGDSKGVILTHRNFIAAARMVTSDQDERREGPNVFLCFLPMFHIFGLSVITYAQLHRGNAIIAMSRFDINSLMEAVQRHRVTHLFCVPPVIIALAKHGKAGKYDLSSLKFIGSGAAPLGKDVMEVVAKKFPDSEIVQWALNWFIRKLVLSDLFGSIWYIPTVLDSRGVQAFLGYGMTETCGIMSLEYPEKGQAREFGSTGTLVSGVEAKIVDIKTLKHLPPNQVGEICVRGPNVMQGYFNNVQATEFTIKQGWLHTGDLGYFDGGGQLFVVDRLKELIKYKGFQIAPAELEGLLLSHPEILDAVVIPFPDAKAGEVPIAYVVRSPDSSLTEVDVQKFIEKQVAYYKRLKRVTFVGSVPKSASGKILRRQLIAQPFSKLVREGLCSIVKTT

SEQ ID NO: 17080 - protein, 694 aa, Oryza sativa Japonica Group
MASASVPAAGYGADGVYRSLRPPAPVASDPGLSLTDLLLRRADACPSAVALADAAAGGRALTFAELRSAVLSTAVALSSRAGVRPGDAVLLLAPNCVLYPVCFFAVTALGAVGTTVNPDYTPREIAKQVSDARAKLVITISALVPKIAGLRLPVILLDDDANAAAASLPPDATVTLYTNLVAGVKEADYRRPPIKQSDTAALLYSSGTTGDSKGVILTHRNFIAAARMVTSDQDERREGPNVFLCFLPMFHIFGLSVITYAQLHRGNAIIAMSRFDINSLMEAVQRHRVTHLFCVPPVIIALAKHGKAGKYDLSSLKFIGSGAAPLGKDVMEVVAKKFPDSEIVQGYGMTETCGIISLEYPEKGQAREFGSTGTLVSGVEAKIVDIKTLKHLPPNQVGEICVRGPNVMQGYFNNVQATEFTIKQGWLHTGDLGYFDGGGQLFVVDRLKELIKYKGFQIAPAELEGLLLSHPEILDAVVIPFPDAKAGEVPIAYVVRSPDSSLTEVDVQKFIEKQVLIYFTNELHYQVAYYKRLKRVTFVGSVPKSASGKILRRQLIAQREYETRASIISFHAKHMMHVIDNCLEAKGRGSDVCYAGSLAARVIVEDVRVGRRLDRRAPRLFYGSGACDLGEIREGKPAGEKREEAACEQQGCMPLAGHERKCRARGADRIVDGPNTGTRGPWFSGPLMDRSLAF

SEQ ID NO: 17081 - protein, 122 aa, Arabidopsis thaliana
  misc_feature (21)..(21): Xaa can be any naturally occurring amino acid
  misc_feature (39)..(39): Xaa can be any naturally occurring amino acid
  misc_feature (47)..(47): Xaa can be any naturally occurring amino acid
  misc_feature (58)..(59): Xaa can be any naturally occurring amino acid
  misc_feature (61)..(61): Xaa can be any naturally occurring amino acid
  misc_feature (69)..(69): Xaa can be any naturally occurring amino acid
  misc_feature (72)..(73): Xaa can be any naturally occurring amino acid
MASSMLSSATMVASPAQATMXAPFNGLKSSAAFPATRKXANNDITSXTSNGGRVNCMXXWXPIGKKKFXTFXXLPDLTDSRIGKTLFRQGGPWGWIIGARILPGSPGEPGLMGRSLPLFTSR

SEQ ID NO: 17082 - protein, 392 aa, Camarea axillaris; identical to SEQ ID NO: 10170

SEQ ID NO: 17083 - protein, 346 aa, Eriobotrya japonica
KGVMLTHKSLVTSVAQQVDGENPNLYYSTNDVVLCVLPLFHIYSLNSVLLCGLRAGAAILMMNKFEIVSLLGLIDKYKVSIAPIVPPIVLAIAKFPDLDKYDLSSIRVLKCGGAPLGKELEDAVRAKFPNVTLGQGYGMTEAGPVLTMSLAFAKQPFEVKPGGCGTVVRNAELKIVDPESGASLPRNQPGEICIRGDQIMKGYLNDPESTRTTIDKEGWLHTGDIGFIDDDDELFIVDRLKELIKYKGFQVAPAELEALLITHPSVSDAAVVPKKDEAAGEVPVAFVVRSNNSQLTEDEVKQFISKQVVFYKRINRVFFIEAIPKSPSGKILRKDLRAKLAAGFPN

SEQ ID NO: 17084 - protein, 543 aa, Moritella sp. PE36
MLDPVFYQFSTSTTLILLIGFYGLTFLFSTLASKKSSSVDGYMVANGAVGFGIAAASMTATWIWAASFYGAASSGYQYGLSGAMHYGFWGALMILFIYPYGQRFRELAPRARTLAEIMQARHGSSSQLILAVSNLVGSVISLMVNFTAAGALVSVLTPLSFEVGVVIAGIGVLSYTLWSGFRASILTDFAQVVAMMLVAIVLIPWIYFNMGGSEALSQGFSIITAEQADFFSTKAILEQGAPFFVAVLAYGIGNQTIAQRLFAVRKDLIKSSFITATLGYGSIVIGLGMLGMMALLMGMTPHEGDLNNLIPQVASAYLPPFAIGMLFILVIGSLSSTADSDLSALSAIVMTDIYAKNLAKGKIDNKKMLLLGRITMIVATALGLILASFSLDILVMLVFVGALWGTLVFPVIASCYWDRVTNRAFLSAVLGGLILFCLVRFEWIALVGLWAYSLEFIAAVGGGTVIGLMFFGFTNRNVALIAGSIVGVLCAFYFHDFLRDYTVLLGSLVAYGASTMICTAVSLTSNERFDFALIHERVQHFDD

SEQ ID NO: 17085 - protein, 392 aa, Heteropterys aureosericea; identical to SEQ ID NO: 10173

SEQ ID NO: 17086 - protein, 447 aa, Caulobacter crescentus CB15
MPSGRAPRLLHLDHLRLASARGSPAAGGGLHPDRAGAGLPMKRLTMGLGLAVLAAGPALAETGRLVIAGGAVDPANDALYGAFIAEAARHAADPRAPRFVIVPAGSAEPRGSAEAMIGHLVRRGVAREVIAVAEIAMVDDPETPAVDESRWRDGASLASEIAKLSTADGIWFVGGDQSRIIATLKTHQGGDTPFLARLRARWRTGAAIGGTSAGAAMMSGPMIVAGDSPAALVLPVGAAAGPLGEPLSMGQGLGFFSFGLVDQHFDRRKRLGRLARALGALSPTQRLGFGVDENTALVVDVDRHAARVVGAGAVTVLDARKPGRLRREPYALRSATLTMLTDGDAIDLRSLHVTPSSGKVLVATPLSERSRPEARLASELLALPVGAAHRLTQPIGDHARVDFSFARARGARVFVGPDQPDRSGVTLIDVKLSITSHIQSKEPQGRP

SEQ ID NO: 17087 - protein, 392 aa, Heteropterys bahiensis; identical to SEQ ID NO: 10175

SEQ ID NO: 17088 - protein, 392 aa, Heteropterys bicolor; identical to SEQ ID NO: 10179

SEQ ID NO: 17089 - protein, 392 aa, Heteropterys byrsonimifolia; identical to SEQ ID NO: 10181

SEQ ID NO: 17090 - protein, 302 aa, Brassica napus
  misc_feature (159)..(159): Xaa can be any naturally occurring amino acid
  misc_feature (166)..(167): Xaa can be any naturally occurring amino acid
  misc_feature (169)..(169): Xaa can be any naturally occurring amino acid
  misc_feature (179)..(179): Xaa can be any naturally occurring amino acid
  misc_feature (184)..(184): Xaa can be any naturally occurring amino acid
  misc_feature (186)..(187): Xaa can be any naturally occurring amino acid
  misc_feature (190)..(191): Xaa can be any naturally occurring amino acid
  misc_feature (211)..(211): Xaa can be any naturally occurring amino acid
  misc_feature (218)..(218): Xaa can be any naturally occurring amino acid
MESEDMHSKPDGGNQIVSEAVHHHSINSLNPWQRAAAAACNASSLVEEAGDKSIALESQDNWESTNGSKSPSSRDENGNKESPQVTSSPQESAGDYSEKSQELVHVGVTGPPHPQLVSHTVGWASSNPYQDPYYAGMMGAYPMAYVPYGGMPHSRMPLXPEVAQEXXYXNAKQYQAILXRRQAXAXXELXXELIKSRKPYLHESRHQHAMXRRPRGTXGGRFAKKTNTEASQPKPGEKNNATQSPTSSHSDQPEAWNDECRKQSEEMQSSASKRREEAEDRSGQQWNSISSNHTSQARLAIK

SEQ ID NO: 17091 - protein, 625 aa, Haloferax volcanii DS2
MASNKILGIDLGTTNSAFAVMEGGDPEIIVNAEGDRTTPSVVAFTDDGERLVGKPAKNQAIQNPERTIRSIKRHMGEDGYTVDIEGEEYTPEQISAMILQKIKRDAEDYLGDELQKAVITVPAYFNDKQRQATKDAGEIAGLDVERIVNEPTAASMAYGLDDESNQTVLVYDLGGGTFDVSVLDLGGGVYEVVATNGDNDLGGDDWDEAIIEWLATEFENDHGIDLREDRQALQRLKDAAEEAKIELSSRKETTINLPFITATDSGPVHLEYDLTRAKFESLTADLIDRTVEPTEQALEDAGYDKGDIDDVILVGGSTRMPQVRDKVEELLGSEPKKSVNPDEAVALGAAIQGGVLGGEVDDIVLLDVTPLSLGIEVKGGLFERLIEKNTTIPTEESKIFTTAADNQTTVQVRVFQGEREMAEDNELLGEFTLSGIPPAPAGTPQIEVGFNIDENGIVNVSAEDKGSGNAESITIEGGAGLSDEEIDRMQQEAEQHAEEDKERRRAVEARNEAEGAVQRAETLLEENEENVDDELRADIEAAVEDVEAVLEDDDASTDELEDVTEELSKELQEIGKRMYQQQAQAQAGGPGGAGAGAGAAGGPGGADPEDFVDADADFDEDDEDN

SEQ ID NO: 17092 - protein, 958 aa, Mycoplasma mobile 163K
MKKEKSSPDLNKMENYFLKINSHKTDNKLISISIFIEENNHFTSLFFKNEFSNIFYFIPGKIGVFKIEAKSKLNNIVNFLTEITVFNNSSILSFDMKLSNLNLLVEFSIKNELHFLYGNKEIEKININNSLPDMKWLQFKVYDSKRFLLESFLSVSNIEIISESNEFILFNITLKSKENIESNNIYFKNIKDAKEMIQLFKNLTKVSFTKSEIRNILEKYENLYNNLKNVKLDNFDLNTNFLKQFKEKSSCTKRLELYYDVTLQKIIVKVATKHLNEYKYLNESSLIKNDLDLNKNLEDKCDESEFLNSVLSFLDSFDNIKKQGYINSKEKYFKLKALIKRWKSLDDYEIYIDESFETKDNQSKFSINSLELKNNLLEMSLSLPLLSNEEVVEAIRSYLNKDEFFETKDNRLINLKNIDFENLEEDFKKINLNIYSLLSKNENNFYLNFHNSYYLLDFIENSNQPNSIDLAKKLKNIIKNAETEVKKLKINDDLKTKLHDYQFEGVKWFKKMIALNMGGILADEMGLGKTIQTIALLDNLYNYENIKKPSIVICPSSLIYNWKNEFKKFSEKLKIVVIDGKKNLRTKLINDNRDNNIIFITSYHQFARDSKEFENVEFYCSFADEGQMIKNYLTKFTKEIKKINSKYRFALSGTPLENNLLELWSIFDFILPNYLLSKNAYKRVFYKPFLEGNTKHLLAKINPFILRRLKSEVLDSLSDKEIKVIKIKQKSDEKTFYQKELSKIKYSLDILKNNSSLTTNNKHLIVLKAINHLKIIASSPFVKSDKFDTSEKLNYCINLIKSIKLLKQKVLIFTQFTKNIPFFEKNFIKSNIKYDIISGKTNKKERFKITEYFNESSDIDVLIISLRAGSLGLNLTSANNVILYDIWWNQSVESQAIDRVHRIGQKRGVNVFKLIMKDTIEEKVFELQSQKQKIIDIVLENSLETKNIDLDFLFNLLE

SEQ ID NO: 17093 - protein, 769 aa, Listeria monocytogenes str. 4b F2365
MLDSFKEDPKLRKLLFSGHFGLEKENIRVTSDGKLALTPHPAIFGPKEDNPYIKTDFSESQIEMITPVTDSIDSVYEWLENLHNIVSLRSENELLWPSSNPPILPAEEDIPIAEYKTPDSPDRKYREHLAKGYGKKIQLLSGIHYNFSFPEALIDGLYDKISLPEESKQDFKNRLYLKVAKYFMKNRWLLIYLTGASPVYLADFSKTKHDESLPDGSSALRDGISLRNSNAGYKNKEALYVDYNSFDAYISSISNYIEAGKIESMREFYNPIRLKNAHTDQTVESLAEHGVEYLEIRSIDLNPLESNGISKDELAFIHLFLIKGLLSEDRELCSNNQQLADENENNIALNGLAQPALKNCDNEEISVVEAGLLELNKMSDFIQSLRPEDTKLQAIIEKQKERLLHPEKTIAAQVKQQVTKEGYVDFHLNQAKTYMEETEALAYKLIGAEDMELSTQIIWKDAIARGIKVDVLDRAENFLRFQKGDHVEYVKQASKTSKDNYVSVLMMENKVVTKLVLAEHDIRVPFGDSFSDQALALEAFSLFEDKQIVVKPKSTNYGWGISIFKNKFTLEDYQEALNIAFSYDSSVIIEEFIPGDEFRFLVINDKVEAVLKRVPANVTGDGIHTVRELVEEKNTDPLRGTDHLKPLEKIRTGPEETLMLSMQNLSWDSIPKAEEIIYLRENSNVSTGGDSIDYTEEMDDYFKEIAIRATQVLDAKICGVDIIVPRETIDRDKHAIIELNFNPAMHMHCFPYQGEKKKIGDKILDFLFE

SEQ ID NO: 17094 - protein, 376 aa, Chionachne koenigii; identical to SEQ ID NO: 10186

SEQ ID NO: 17095 - protein, 391 aa, Zea mays
  misc_feature (134)..(134): Xaa can be any naturally occurring amino acid
  misc_feature (251)..(251): Xaa can be any naturally occurring amino acid
MEVGDARNGSAAAALTKGSADDAARKPLPPCCVKAKARVPETEANCHDTVVSGWFTEPRSRFGKTSKVQYFNNPMWPGEAHSLKVEKILFQGKSPYQEILVFESSTYGNVLVLDGIVQLTDKDECAYQEMVTHXFPLCSIPAPKNVLVVGGGDGGVLREIARHDSVETIDICEIDQLVIDVCKEFFPNLSIGFKDPRVRLHVGDAVDFLRNSPEGKYDAIIVDSSDPIGPAQALVEKLFIQTIARALKPGXGVLCNLAESMWLHTHLIQDMLAICRQTFKGAVHYAWTSVPTYPSGVIGFLLCAKEGRAVNFLTPVNPIEKIEGTTKAGRELRFYNSEIHRAAFVLPTFVRRELEAYTTPSTSAENEKPKESVSEPQKIKILSNNAILTAS

SEQ ID NO: 17096 - protein, 162 aa, Nocardioides sp. JS614
MSILDAKIARLDGTPSTLGEITGGRPALLVNVASKCGLTPQYAGLEELHERLADRGFTVVGLPCNQFRGQEPGTADEIAEFCSATYGVTFPMTEKIDVNGPDRHEIYRTLVDTPNESGESGDITWNFEKFLVDASGAVLARFSPGVEPGDPRLVAAVESQVG

SEQ ID NO: 17097 - protein, 238 aa, Oryza sativa Japonica Group; identical to SEQ ID NO: 13585

SEQ ID NO: 17098 - protein, 376 aa, Chrysopogon fulvus; identical to SEQ ID NO: 10188

SEQ ID NO: 17099 - protein, 445 aa, Silicibacter sp. TM1040
MKKFAMAALGGTLAGFVATTYVAAPLLAQESNNTTVYEQLDLFGDIFERIRAQYVEEVDEKELIEAAIGGMLQSLDPHSSYLSPDDASKMRVQTRGEFGGLGIEVTQEDGFVKVVSPMDGTPADEAGVEAGDFITHVDGESLLGLGLDEAVELMRGPVGSEIIITIVREGEDEPFDVSIIRDTIKLTAVRGRTEGDSVVLRVTTFNEQTTPNLEAKLEEQVEALGGMDNVNGIVLDLRNNPGGLLTQAISVADSFLESGEIVSTRGRNPEDGERFNATPGDLVGGKPIVVLINGGSASASEIVAGALQDHRRAIVVGTKSFGKGSVQTVMPLRSDGAMRLTTARYYTPSGRSIQALGVSPDIVVAQPRRRPEAEEDEPASSAFGPRSEADLRGRLNNDSLSEDEVRQIEADREKAEKAAELREQDYQLAYAIDILKGLSALGPKD

SEQ ID NO: 17100 - protein, 881 aa, Arabidopsis thaliana
MRVLKYFRAPSSLRHRSSPMAQFLRRFSSSPMANEDEFQSPVEPSQQQSQDCVSESYLIGFVIANIVGLKYYSGRINGREMVGLVREPLNVYDNNAIRVLNTRSEQVGHIERTVAAVLAPMIDSHTIVVEGIVPNTRSNSNRYRIPCQIHVFAKLEASSTVKSTISRGGLVLISESDTSFGLSEAVVVKEQMGNGDKRSVDKIFKLVDENVKLMGKLVAAEPPREVIKSELFAHQKEGLGWLLHREKSGELPPFWEEKDGEFLNTLTNYRSDKRPDPLRGGVFADDMGLGKTLTLLSLIAFDRYGNASTSTPTEEPLDGEGDKIEKKGKKRGRGKSSESVTRKKLKTDDVVGMNVSQKTTLIVCPPSVISAWITQLEEHTVPGILKVYMYHGGERTDDVNELMKYDIVLTTYGTLAVEESWEDSPVKKMEWLRIILDEAHTIKNANAQQSRVVCKLKASRRWAVTGTPIQNGSFDLYSLMAFLRFEPFSIKSYWQSLIQRPLGQGNKKGLSRLQVLMATISLRRTKEKSLIGLPPKTVETCYVELSPEERQLYDHMEGEAKGVVQNLINNGSLMRNYSTVLSIILRLRQLCDDMSLCPPELRSFTTSTSVEDVTDKPELLQKLVAALQDGEDFDCPICISPPTNIIITRCAHIFCRACILQTLQRSKPLCPLCRGSLTQSDLYNAPPPPPDSSNTDGEDAKSSTKSSKVSALLSLLMASRQENPNTKSVVFSQFRKMLLLLETPLKAAGFTILRLDGAMTVKKRTQVIGEFGNPELTGPVVLLASLKASGTGINLTAASRVYLFDPWWNPAVEEQAMDRIHRIGQKQEVKMIRMIARNSIEERVLELQQKKKNLANEAFKRRQKKDEREVNVEDVVALMSL

SEQ ID NO: 17101 - protein, 903 aa, Nocardioides sp. JS614
MSFVPVTGPATFRAADPPREGVVEFTDDRRTVSLPIRAALPVLTKARSRDDLHPSVGVLSGAALLALRLVAAGKFAPAGSSPPAWRVAGLDADDEQRIVLLARNGPDDEQLVRDLLDAVADAMPRTQPRTQPRSRPSAEPSGTTVSRERRPTFEERLQARLARHQRVDARALPQLVTISLRVEADEEELVAGAVRLVAQAHDEQNPLHLCDLALLWTGTPQEHGFGERARTHATIALRAAADAWPVLDRLLELRVPDQLTLDSDELVSLLDEGVGALRAAGVDVLWPKALGRDLTATTVLDRAAPMTREEPLNEPVLGAEALFAFNWQIALHGDPLTAEEMDRLATSASPLLRLRGSWTVVDPSIARKAKKRLVRTVKPAEAVAAALTGTAQIAAPGGEQSEQDVVVGASLLKVRDRLLGAATREPVEPPAALRATLRDYQRHGLTWLAEMTSLGLGACLADDMGLGKTVTLIALHLHRAERGHRGPTLVVCPASLLGNWEAEVRRFAPGVPVVRFHGTSRDVEAAGDGFVLTTYGTMRRDAEALGSVRWDLVVADEAQHVKNPRTATARALRSITSAARVALTGTPVENDLTELWAILDWTTPGLLGSRNAFRKAWAAPIESGREPAKARQFADLIGPFLLRRRKSDPGIAPELPAKTETDHPLRLTREQVVLYESFVRDTMARIERADPSDPVARRGLVLTLLTGLKQICNHPDHFLKRSGARLSGRSEKVDLLDELVGTVLAEDGAVLVFTQYVAMARLLEGHLARAGVPHQLLHGGTPVREREAMVARFQAGETPVFLLSLKAGGTGLNLTRADHVVHVDRWWNPAVEEQATDRAYRIGQTKPVQVHRMITRGTVEEKVAELLTRKRALADAVLSRGEAALTELSDDELRDFVALRRDP

SEQ ID NO: 17102 - protein, 315 aa, Microcystis aeruginosa PCC 7806
MAGSELKADLWVNEYITPWDIYSHGVSRILAYKKTAFQEMYIVESGAYGKALVLDGKWQSCTGDEFIYHEALVQPAMIAHQEAKTALILGGGEGATTRELLRWKTIEKVMMIDIDGDVVAACKEHLPEMHQGTFDDPRFELVVADALEVLDTTNDQWDIIISDLVDPIGEGPSFPLFTKEYFEKLQRVLAENGIVVVQSGPVSPPSVMYHARLVNTLKAVFPYVHSYCAPTPSYGSPWGFTLCANHPLNTRPDPDVVDELITDTTTGGLRLIDGITLLGMLQTPLYIRQAIAQNTEIYTLAKPPKFFGQGVISNQ

SEQ ID NO: 17103 - protein, 376 aa, Chrysopogon gryllus; identical to SEQ ID NO: 10192
  misc_feature (240)..(240): Xaa can be any naturally occurring amino acid

SEQ ID NO: 17104 - protein, 668 aa, Arabidopsis thaliana
MARSFGANSTVVLAIIFFGCLFAFSTAKEEATKLGSVIGIDLGTTYSCVGVYKNGHVEIIANDQGNRITPSWVGFTDSERLIGEAAKNQAAVNPERTVFDVKRLIGRKFEDKEVQKDRKLVPYQIVNKDGKPYIQVKIKDGETKVFSPEEISAMILTKMKETTEAYLGKKIKDAVVTVPAYFNDAQRQATKDAGVIAGLNVARIINEPTAAAIAYGLDKKGGEKNILVFDLGGGTFDVSVLTIDNGVFEVLSTNGDTHLGGEDFDHRIMEYFIKLIKKKHQKDISKDNKALGKLRRECERAKRALSSQHQVRVEIESLFDGVDLSEPLTRARFEELNNDLFRKTMGPVKKAMDDAGLQKSQIDEIVLVGGSTRIPKVQQLLKDFFEGKEPNKGVNPDEAVAYGAAVQGGILSGEGGDETKDILLLDVAPLTLGIETVGGVMTKLIPRNTVIPTKKSQVFTTYQDQQTTVSIQVFEGERSLTKDCRLLGKFDLTGVPPAPRGTPQIEVTFEVDANGILNVKAEDKASGKSEKITITNEKGRLSQEEIDRMVKEAEEFAEEDKKVKEKIDARNALETYVYNMKNQVSDKDKLADKLEGDEKEKIEAATKEALEWLDENQNSEKEEYDEKLKEVEAVCNPIITAVYQRSGGAPGAGGESSTEEEDESHDEL

SEQ ID NO: 17105 - protein, 606 aa, Dictyoglomus thermophilum H-6-12
MAKIVGIDLGTTNSLIAYLEGGRPTIIPNAEGSRLTPSVVAFTKDGQLLVGEPAKRQAIVNAERTIKSIKRHMGTNYKVKIDDKEYTPQEISAMILRKLKKDAEAYLGEPIEKAVITVPAYFSDAQRQATKDAGAIAGLEVVRIINEPTAAALAYGLDKEGHQKILVFDLGGGTFDVSILEIGEGVFEVIATAGNNRLGGDDFDERIVNWLVEMFMEEHGINLKEDRTALQRLFEAAEKAKIELSSKLQTEINLPFIAMKGNTPLHISVTLTRAKFEELTYDLVEKTKEPTERALKDAGLSPSQIDKIILVGGATRMPCIQEWIKKHFGKEPQRNVNPDEAVALGAAIQAGVIGGEIRDIVLVDVTPLSLGIETLGGVFTKIIERNTPIPVSKSQIFTTAADYQTSVEIHVLQGERALAKDNISLGRFILDGIPPAPRGVPQIEVTFDIDVNGIVHVSARDKATGREQRITISNAIRLSEEEIKRMTEEAKRFEEEDRKRREEIETKNQAEHLIYTARKTLKDYGDKVSKDLVQRVEDKIKNLEELIKPERINVEQVKKGMEELTQALGEIGQFMYQSASAAGNPGQGQTNENPGGKTIDGDYKVN

SEQ ID NO: 17106 - protein, 376 aa, Cleistachne sorghoides; identical to SEQ ID NO: 10195

SEQ ID NO: 17107 - protein, 485 aa, Arabidopsis thaliana
MSGVVRSSPGSSQPPPPPPHHPPSSPVPVTSTPVIPPIRRHLAFASTKPPFHPSDDYHRFNPSSLSNNNDRSFVHGCGVVDREEDAVVVRSPSRKRKATMDMVVAPSNNGFTSSGFTNIPSSPCQTPRKGGRVNIKSKAKGNKSTPQTPISTNAGSPITLTPSGSCRYDSSLGLLTKKFVNLIKQAKDGMLDLNKAAETLEVQKRRIYDITNVLEGIDLIEKPFKNRILWKGVDACPGDEDADVSVLQLQAEIENLALEEQALGNQIRQTEERLRDLSENEKNQKWLFVTEEDIKSLPGFQNQTLIAVKAPHGTTLEVPDPDEAADHPQRRYRIILRSTMGPIDVYLVSEFEGKFEDTNGSGAAPPACLPIASSSGSTGHHDIEALTVDNPETAIVSHDHPHPQPGDTSDLNYLQEQVGGMLKITPSDVENDESDYWLLSNAEISMTDIWKTDSGIDWDYGIADVSTPPPGMGEIAPTAVDSTPR

SEQ ID NO: 17108 - protein, 472 aa, Mycobacterium sp. MCS
MKLDESTLPDIPIAKPTYARGDVTVGIVHFGVGGFHRAHQAMYVDALLEKGLAAEWGICGVGVLPGDRKMADALGAQDGLYTLLLENPDGSRDARVIGSIVDYRYAPDDPEGVVELLAAPSTRIISLTITEGGYEVDKVDADSVNVFGLITDALALRRDRGVDPPTIVSCDNIEGNGDVARAAFMSYADRTHPGLSEWIGSNARFPNSMVDRITPVTTPEVIATVRDEFGVDDAWPVVAEPFTSWVLEDTFTDGRPPFEDVGVLLVDDVTPYELMKLRLLNASHQALCYFGYLAGYRLVHDAAADPLFAELLRRYMDSEATPTLRPVPGIDLPDYKRTLIERFANPGVRDTIARLCYGSSDRIPKWLLPVVRENLRTGAPIRLSAAVVASWSRYAEGVDEQGEPIDVQDQLADELVPLARAQRDNPTSFIENRLVFGDLVDEKRFVDEYVAALESLHRVGARATLEALVGKP

SEQ ID NO: 17109 - protein, 376 aa, Coelorachis selloana; identical to SEQ ID NO: 10196

SEQ ID NO: 17110 - protein, 442 aa, Methanococcoides burtonii DSM 6242
MNINTKEDVLKAIENNNVKFIRLQFTDIQGVVKDVEIPVTQIEKALSVGISFDGSSIEGFVRINESDMVLKPDTSSFAILPWNQKKGVVARMICDIYLPDGTPFEGDPRYTLKKVMKEAKEMGFSLNVGPELEFFLFERHDGKATTIPHDFGRYFEFAPADLAEDIRRDIVLTLMDLGFEIEASHHEVAFGQHEIDFKYGDALTTADNVTTFKYVTRTIAKLNGLHATFMPKPIFGENGSGMHVNLSLSKNGENIFYDADGDMQISDEARYFIGGLLKHVKAITAISNPLINSYKRLVPGYEAPVYIAWSGANRSSLIRIPAARGKGTRVELRSPDPSCNPYITFAAVLAAGLDGIRNKIDPGDNREENIFELTDKGLRDFGIETLPSTLNDSAKYLADDELLKEALGAHVHNSVLSLAKAEWDSYRIQVHDWEIERYLNTV

SEQ ID NO: 17111 - protein, 794 aa, Psilotum nudum; identical to SEQ ID NO: 10200

SEQ ID NO: 17112 - protein, 233 aa, Brassica napus
EFMNGLKLLSSMSHENLVKLRGFCCSRGRGECFLIYDFASKGKLSSFLDLQERETGRVLAWPARVSILKGIAKGIAYLHGSDQENKHAIVHRNISVEKILLDELFNPLIADSGLHNLLADDLVFSALKTSAAMGYLAPEYVTTGRFTEKTDVFAFGVIILQILSGKLMLTSSLRTAAENGEHFGFMDEYLGEGFDKTEAVALARMGISCTQEIPNNRPNIESLLREITCMKSE

SEQ ID NO: 17113 - protein, 1367 aa, Oryza sativa Indica Group
MVRGRRRGGDAGPVVVIDVEDDGEDAADDSAGGGGGAAAAVKRRVVVPGAVATRTRSRRMAIAQQAPVTPPAAAEEAPSRRRKRKGAASAEAGGGGPSKRRVRSSGSAGGRGARKRKEAEADEEEAEAEAEEEAEAEAGTPARGESMEVSQVDGGGSSGRADDASHNGNGESRVCNADGIDQASEERPSVAGGDLIEEEHCGNGEASVAGGDRIEEHCGNVEASVTNSNRDGGEIIAGEGTEDRGNTELAVVDPVNEELASDEDDYDDEMLEEKLVGDVIRAYSNGADLDTNGVDWEAEDEMEFADLDTNVVDWEAEDEMEFDDDNDNDADDDGDNFGGDADEGDKSVQMHDFSKVETQDLVSHNVNVSEVRPHEDEEAIKDEMESKGKGSLSFNEGSSYIEILDSDEEVKVVNDTGNALRRKPLVPAKLPIVPSCVAWRTRSSWGMKEERISYNTYFEVLSDEPKEDDDDTEVELDDEEDDENDDDCNSASCDEEDEEEEEEREEEEEEAQRRKQKKGIDSSDDEMIDDAVDCGIDWEEDYPEVDFTRPLTFQKDGSEAPVGSEAFTEQQKRSRFTWELERRKKLKLGMMTNHRLYERDLESDSNSSDSSQNRKNGCQGSGDHRTGRKRKNPLSKSGKKSSRMLKRQSLMKLLMDKMCSNDDGKSTPFDQKPQIEYSFKDLHPLVFSFGDDDPSPTDRSEQDAALDMLWADLDFTLESENIGTYYDDEGQEDSLLDHALAPITPCSRGKHEFIIDEQIGIRCKYCSLVNLEIRFILPLLHQREAFEFMWTNLVGDIRLNEIKHGAKPDVVGGCVICHAPGTGKTRLAIVFIQTYMKVFPDCRPVIIAPRGMLFAWEQEFKKWNVNVPFHIMNTTDYSGKEDRDICRLIKKEHRTEKLTRLVKLFSWNRGHGVLGISYGLYMKLTSEKVGCTGENKVRTILLENPGLLVLDEGHTPRNERSVIWKTLGKVKTEKRIILSGTPFQNNFLELYNILCLVRPRFGEMFLTKTRVGRRHCVSKKQRDKFSDKYEKGVWASLTSNVTDDNAEKVRSILKPFVHIHNGTILRTLPGLRECVIVLKPLPLQKSIIRKVENVGSGNNFEHEYVISLASTHPSLVNAINMTEEEASLIDKPMLERLRSNPYEGVKTRFVMEVVRLCEALKEKVLIFSQFIQPLELIKEHLRKIFKWREGKEILQMDGKILPRYRQNSIEVFNNPDSDARVLLASTRACCEGISLTGASRVVLLDVVWNPAVGRQAISRAFRIGQKKFVYTYNLITYGTGEGDKYDRQAEKDHLSKLVFSTEDEFSNVRNMLSKAEMEHCSKLISEDKVLEEMTSHDQLKGMFLKIHYPPTESNIVFTYNQIAPELS

SEQ ID NO: 17114 - protein, 420 aa, Zea mays
HRCRVVPAGRFYEITRNKGVGLTFAAMGMTSFCDGPADGSNLTGVGEIRLVPDMPTLVRLPWSRHEEMVMADMQIRPGEGWEYCPRNTLRKVTKVLLDEFNVTMKAGFENEFFLRRKLVSNGVEMWVPYDNTNYCSTSAFDGASSILQEVYSSLKDSGIVVEQLHAEAGKGQFEIALKYILCTVAADKLIYARETIKSIARKHGLVATFLPKPDLDDFGSGSHVHLSLWENDQNVFMGSSKDNFHGMSKTGEQFLAGVYHHLPSILAFTAPHPNSYDRIQPDTWSGAYLCWGKENREAPLRTACPPGVPLDLVSNFEIKSFDGCANPHLGLAAIVAAGIDGLRRHLKLPEPIESNPSDHSSKLKRLPQNLQESVESLSADKVLHELIGDKLVTTAIAIRKAEINHFAKNPGALKDLIHRY

SEQ ID NO: 17115 - protein, 535 aa, Mycobacterium sp. JLS
MDTSDPTSDRWKDHPALAALTLCLALLAATVVLAPAAQRLSVPYPAVMLAFGLALAFIPGVPVLSPNPELILPLVLPPLLFAAARRTSWREFLDNRRPIALLAVALVGVTAVAVGATLHALVPTVPLIAAITLGAAVAPPDAVAATAVAQKLGIPRRLRTILEGEGLSNDATSLVLYEVAVAGTMTGAFSAWGAGEALGLAVVLGVLVGLAIAVATRWLINKLPAHPAGSGLVLVVPFAAYAAADAVHGSGVLAVVTVALAMSRYGDTQSSQTRLATGTTWEIVELLLTGSAFAFVGLQMRAVADSIDMTFWELLQQGLIITLVVIVVRFLWIFPVATIDERMHRRKAHVAEPIGWREMTVSSWAGMRGVVTLAAVLALPPQFPERERLVFYAFVVIVVTLLLQGLTLPTVVRRLGVRASPHEEDDAVQALIRRARDAGFERLDEIRAREEADPEVIEHARDNAERMWQSVGFAPPDAESHHAHTDHAMTLNALKDEILAAAREAVVKARSESGTDPTVVDRVLRRLDTRGSQPE

SEQ ID NO: 17116 - protein, 552 aa, Physcomitrella patens subsp. patens
MSWRRSSAAAKLDDCALSEVCRSGFSGKIMHISFVDGHTAGNGSAARNWGSRTGDQIQSSFVTTSMQAPSSAPTDSESAIPTMQALPPQPGALPCFVEPNSLDKSSYATSGSEDQPPRPPTGVPTAGEYLLPHTQLELGHSMARAAYPFADPYFGGIVAAYGAQAVIHPHMLGVQQARMPLPSEMMEEEPVYVNAKQYHGILRRRQSRAKAESENKLIKSRKPYLHESRHQHALRRARGNGGRFLNTKAKEGDSKSNSDGNHGSHEGQSSQAGNVSSTRASHSGMDMLSGQGDSVNYHNTMMQHGQNNAYLNLHPPQSFHSSAFHTLPGGSESGDGGSNGNNLVWEQDMCAYMIFEVERWDKWHLEVDVSFAGLWQGCSNFCLWTCVKPMARREAQLLICEPSAHQSYLLLNTPEDPELFQLAEEFDAAEDIMIGRRIPVTSASPSLALESGLWLSRPSYTRISLQSVLGSETGSVHMTSKAAWSIASVVNFSFKCNNRVGEPFGTQVCKISSMTELCLKLLTKICCLGPPLYRRFFCHDALILKLLANLKS

SEQ ID NO: 17117 - protein, 377 aa, Picea sitchensis
MFPLKTEDAAYNKISSMIATLGDPFTRLVSPKEYQSFRIGSDGNLQGVGLFIGTEPYSGRLIVLSSVEGSPGARAGIHTGDELVEIDGEPLTGKSGEEAAQKLRGRVGTSVTIKLRNGGDSVEDPQTREVNLSRETILLSPVSSSIIPHKTKDGQLMKTGYVRLSAFSQTAAIDMENVIIALEDQDVHSYILDLRNNPGGLVKAGLDVAQIWLDGNETLVNTIDRDGNMLPINMINGRALTRDPLVVLVNEGSASASEILAGALHDNGRAKLVGHKTFGKGKIQSVTELDDGSALFVTVAKYISPAMHDIDQVGILPDVQCMADKLSPAKMDSNLEKPVRSGATNDSDPASSLEKDSCIMVAEDELDLERSSKGTPS

SEQ ID NO: 17118 - protein, 412 aa, Trichodesmium erythraeum IMS101
MKKRFLQIPLLLILPILLSWGLWISSATALTEEQGLLGEAWRIVNLAYVDDSFNHQNWWFVRQNLMKKPLTTREETYSTIQEMLASLEDPFTRLLKPQQYRNLQVDTSGELTGVGLQIALDSQTGELIVISPLEGSPAETAGIQAGDRVVKIDGHPTTEFSLDEAANRMRGTVGSPVILTILKESRDQPQDITIIRDQIEINPVYAKLKSNSQAGPIGYIRLSQFNANATAEISQVIESFEQKGAIGYILDLRNNPGGLLQAGVGIARLWLDDGTIVYTVNRQRVLGSFEAVGIAITNAPLVVLTNKGTASASEILAGALQDNGRAMLVGEKTFGKGLIQSLFDLSDGSGLAVTVAKYETPNHIDINKQGIIPDVVIKQDPILPNQITTEADKQYQAALELITSQFVLTNAA

SEQ ID NO: 17119 - protein, 489 aa, Bacillus licheniformis ATCC 14580
MEHINMEQFILLAALLLIIGVLTTKFSTRLGVPALVLFLIVGMIMGSDGLGIIYFNNPELAQLIGIIALVVILFEGGLQTKWSSVKAVAVPSLSLATIGVLLTTCVVAVAAKLIFNVSWMEGFLFGAIVGSTDAAAIFAVLKGQNIRDRLSSTLEAESGTNDPMAMFLTLSLIQLLTADHSSYFMLVISFFWQMGMGLLLGYLLGRFASFAINKINLDSSGLYPIFALAFALLTYSLTDVIGASGLLAVYIAALVIGNQDLTYRHSIFRFNEGFAWMMQILMFIILGLLVFPAQFLSFDIIFKGFLLSLILIFIARPVAVFLSTIKMGFNFNEKIFLSWAGLKGAVPIVLATFPMTMGLENSQLIFNVVFFVVLTSALIQGSTISVFAEKLKLNGPQKVEAPHSLELVSIGKANAEIIEFEVDDQAAITRQMLKDISFPKDALINAIIRNGDLVTPHGETKIKPGDILYILVSKKQKKELKKFLNREFD

SEQ ID NO: 17120 - protein, 472 aa, Haemophilus influenzae R2846
MPNANAIANVFKLIEENNVKFVLLRFTDIKGKEHGVSIPVSLVDEEMFEDGKMFDGSSVEGWKTINKADMLLMPMAETAVVDPFAQIPTLSIRCSVYEPTTMQSYDRDPRSIAIRAENYMRSTGIADQAFFGPEPEFFLFDDVRFNVSMNKASFSIDDIEAAWNTNKKYEEGNNAYRPLKKGGYCAVAPIDSAHDIRSEMCLILEEMGLVIEAHHHEVATAGQNEIATKFNTLTLKADETQIYKHVVQNVALEHGKTACFMPKPITGDNGSGMHCNMSLSKDGKNIFQGDKYAGLSETALYYIGGIIKHAKALNAFTNPSTNSYKRLVPGFEAPVLLAYSASNRSASIRIPAVTNPKAIRIEARFPDPLANPYLAFAALLMAGLDGVVNKIHPGDAMDKNLYDLPPEELKDIPAVASSLEEALNSLEKDYEFLTQGGVFAKDFIDVFISIKRKEVERLNMAPHPVEFEMYYA

SEQ ID NO: 17121 - protein, 468 aa, Lycopodium annotinum
MGRRKIEMQKIKNNNARNVTFCKRKTGLMKKAFELSVLCGVDVGLLMFAPATGKLSLYASKNRSIEELLLQVACVDEARQSDEDPEYIKAIEKINKDNKHLSQHQSRRRPTRDIDILHANLKMIQMKKAYTEFQIQLYQGIGIEKLSLEGLQNFESKLQLSIINTRAFKEQAILEMCMKNHEALRNRRLFYPNPMDGLIIGEFQQAFQAPTYKSSVSSAMVLANQGLCNVRQGHESSLFDTLQECDTPTYGPSVSSTTMLIDQYNNLNYIGQKQSNINNIFSQYCGYVEYEQVNHRLMSIQNCEVDPTGGHMHSRNMLSKDVYDGIDYDDQEDENSTCMNLQDFEAPTHGRGVFGGTVPVDRYDSSNCIVQVQANWMPISLQDCGYVEGQEANQTLTTMQDPTFMPKKDQEYPDCMTPQYTEFLKDEVLIGGSTENGDKHDAFDYFGQQRTFSSIIELELPLQNDSLR

SEQ ID NO: 17122 - protein, 494 aa, Bacillus cereus G9241
MPFATPPVCFGKGNSALKRRVAIIGMVVAFLIGAGGMFAGMSLFGVNPAEVTQTISSGNASTAQGNLAKINEAYALIDSRYVEDVKDEKLVEGAIQGMLSTLKDPYSTYMDKETAKQFSESLDPELEGIGAEVNKTDGKLIIVSPIKGSPAEKIGIKPNDQILSVDGNSVKDLSREEAVLKIRGKKGTTVAIEIKRAGVADPIVFKIKREKIPIFTVFSSVKQESGKDIGYMQITSFAENTAKEFKDQLKELEKKNIKGLVIDVRGNPGGYLNSVEEILGEIMTDKKPMLQVEQRNGEKKKFSTELKERKPYPISVLIDNGSASASEILAGALKEGEGYDLIGEKTFGKGTVQQAVPFKDGSNIKLTMFKWLTPDGNWIHKKGIAPTVEVKQPDYYHATPIQIEKTLSYNSNDVQVKHAQEMLKSLGYVTGREDGYFSKETESALKAFQNANKMEATGQLDKKTAEAIQTKIIEKIRSGENDLQLQSALKLMAK

SEQ ID NO: 17123 - protein, 296 aa, Oryza sativa Japonica Group; identical to SEQ ID NO: 12995

SEQ ID NO: 17124 - protein, 392 aa, Heteropterys capixaba; identical to SEQ ID NO: 10207

SEQ ID NO: 17125 - protein, 160 aa, Bacillus cereus ATCC 14579
MTVYDFSAKTITGEEKSLKDYKGKALLIVNVASKCGFTPQYKGLQEVYDKYKDQGLEILGFPCNQFGGQEPGTEADITSFCELNYGVNFPMFAKVDVKGDKAHPLYTYMTEQAPGLLGMKAVKWNFTKFLIGKDGKVVGRFAPQTKPVDLEVEIEKVLGE

SEQ ID NO: 17126 - protein, 392 aa, Heteropterys catingarum; identical to SEQ ID NO: 10209

SEQ ID NO: 17127 - protein, 727 aa, Xylella fastidiosa Ann-1
MSLRILNSLKVALLTLAITTSPALMAKSDSASPQVATPDQTTATKLVYGLLSDSRYAYRLRPLDETMSKDIFKRYLEALDNNKQFFTEADIDNFSAFKAEIPDSIRNGNLKPAFSIFTVYKKRVAERVTYANQLLKQNFDFSGQEKYEYDRSKAPWPASPQDLDDIWRRSIMNDWLRLKLAGKKPEDIRKTLKKRYANLLKTVNELKGEDVFQLYLNAYTNSIDPHTDYFTPRTADAFNQQMSLSLEGIGAQLQKQEDMVIIREVIPGGPTALDGTLKPGDRIVGVGQGKGGPIEDVIGLRIDDVVSKIRGKKDTQVRLEYIPAESGIDGAHRIVTLTRQKVRLAEQAAKGETITIEGSNGDAQRRIGIIKLPTFYEDFEGRRRNVANYTSATRDVAKLLTNFKTDKVDGVVLDLRNNGGGSLDEAIQLTGLFIEQGPVVQVRESGGRVTVNGDRDDKVTWDGPLAVLINRGSASASEIFAGAIQDYGRGLVIGETSFGKGTVQNIVDLDRWPANESRRFGQVKLTIAQFFRISGSSTQHKGVLPDIAFPASVGATEFGESTYENALPWTQIASLQHTQYGNFSPILSKLKKIHISRTANDIEFKWWQEDVHNFSLEKEKKYVILNEAKRLAERRKQETQHRERQTIRKNLGLQLDPLSEESDDGLIGNERDIAKDTAREKLADKRPDPLLHESAAILTDTINLLEKDQILSAQVLLQSTTPGHWAN

SEQ ID NO: 17128 - protein, 1128 aa, Legionella pneumophila str. Lens
MIFGFKRKAKTTTKLLCHEQQQDGIYQFIFQLESKNTIVPIQEWRNSNHPGAIWLLDYLHDNDLIQKDSLDNLTIRLYSEQLIEILKGQECYLQHLLELPPLFDGGLHIECQGLLAKDDYTLNYSWIDGNSRPITVSERRGIFLIFGNRKYLLSYFAWKFAEDIDAIREKLHSSNSMHARLETLENFKSIRSLLPEEESRKFSDDGSISNIKLYFANAFRIDAIPEGNSFKIQPVLLKRHETQNQDCVFENILPPVEQQRYNDQFSNSTKLQPYYTLGPGKYILINDQLNKALSTVHKIQHSNDTEKLNFLKNPKAALADSLEGMISDEELNLIFSDRVTGIGEWNAKVIPWIQLPPGEWIPDGKFPNSPFGIDIAGKKIQFETITDLSVILDKIKEAKKSGVLFVDHEGINIPVNDRSISALEKFIPRQPLNNEDNKHNQANSPDQDRILQTPVMLVKENLEYVEFHVVRIPRNRYPQSSKLPETIRTEPKQHQVEAYKWLCAHYKAGSRGVLLADDMGLGKTFQSLMFLEWLREGMIKEEICDKPLLIVAPTGLLKNWEAEVQKHLLNGLGNIARVYGSDLKSLRTNNSLNVSKIKSANLVLTTYDTLTRYQTSFGVISFSTVVFDEIQKLKNPGTQNYSAACSLNCDFWLGMTGTPVENRLCDLWSITDVLQPGMLGSIKEFSNKYEKCILDIDEYEQQNILKELQDGLTKGSEANPPFMLRRMKSSVLTGLPKKNVHIIPVEMPQKQASTYSQILNQVKNMESKNGVMLKAIHQLRACSLHPDYKRQDEYINDNEYIGGSARLKACFEILDKIYAKREKVLIFIEYNEWHRHDFLCQIIKTKYKLDRLPMAINGQINSKTRQHIVDKFQEERGKFDVMLLSPRAGGVGITLTAANHIIHLTRWWNPAVEDQANDRIYRIGQESDVHIYYPLAIHAEYENSCFDYNLHQLLEKKREVSQQVIIAPPMEQDAIDQLFAKTFNKSPHSKISINESYYGFDGNSYEEFILEKLQNKAPLFGFHAKATKKSWDKGADIIIESDNGNIVAIVQCKHVSCSTKTPPDIPEDLDKAVKHYVSQNNPPIFKIGITNASKLRKFDTDWLRSSSFNQILYADQGLRPELLLKLLS

SEQ ID NO: 17129 - protein, 246 aa, Glycine max
METDRPDGRTPNQLRPLACSCSILHRAHGSASWAQGETKVLAAVYGPKAGTKKNENPEKASIEVIWKPKTGQIGKLEKEYEMILKRTLESICIRTIYPNTTTSVIVQVVHDDGALLPCAINAACTALVDAGIPLKHLAVAICCSVTDSGCIILDPTKEEEEKMKAYINLVFPNTIVSVLPERSSQVGSEPMAHGIMTSVTQGAMSVDDYLHCLDRGRAASARLSEFVRKNIGPKSTWLGRMGFLCR

SEQ ID NO: 17130 - protein, 392 aa, Heteropterys chrysophylla; identical to SEQ ID NO: 10213

SEQ ID NO: 17131 - protein, 541 aa, Galega orientalis
MAFEMTSVVSKLQNLSTSDHASVVSMNLFVALLCACIVIGHLLEENRWMNESITTLLIGVCTGVVILLFSGGKSSHILVFSEDLFFIYLLPPIIFNAGFQVKKKQFFKNFMIIMSFGAIGTLISCCIITFGATQAFKRMDIGPLEIGDYLAIGAIFAATDSVCTLQVLSQDETPLLYSLVFGEGVVNDATSVVLFNAIQSFDLNRLNPSIAMQFLGNFFYLFIASTLLGVLTGLLSAYIIKKLYIGRHSTDREVALMMLMAYLSYMLAELAYLSGILTVFFCGIVMSHYTWHNVTQSSRVTTKHSFATLSFVCEIFIFLYVGMDAMDIDKWKFVSDSRGTSIATSAILLGLILLGRAAFVFPLSFLSNLTKKSQHQKISFRQQVIIWWAGLMRGAVSMALAYKQFTRSGHTQLRSNAIMITSTITVVLFSTVLFGLLTKPLIRLLLPHPKHTSSMTTTEPSTPKSVIVPLLGDHRDSEADLEGHEIHRPNSLRALLSTPTHTVHRLWRKFDDSFMRPVFGGRGFVPVEPGSPSERNGHQSP

SEQ ID NO: 17132 - protein, 219 aa, Aspergillus nidulans FGSC A4; identical to SEQ ID NO: 969

SEQ ID NO: 17133 - protein, 392 aa, Heteropterys lindleyana; identical to SEQ ID NO: 10214

SEQ ID NO: 17134 - protein, 392 aa, Heteropterys megaptera; identical to SEQ ID NO: 10215

SEQ ID NO: 17135 - protein, 135 aa, Zea mays
MGFSEAQEELVLRSWKAMKSDSESTALKFFLRIFEIAPGAKQMFSFLRDAGDAPLEKHPKLKAHAVTVFVMACESATQLRSTGDVKVREATLKRLGATHARAGVADAHFEVVKTALLDTIRDAVPDMWTPEMKAA

SEQ ID NO: 17136 - protein, 671 aa, Cryptococcus neoformans var. neoformans B-3501A
MSSTVLPQGAGYGVVIGMGLFFSLLMVGIAKLQTRYTSHKTSSAEEFNSASRSVPPGLIAAGIVSAWTWAATLLQSSATAYKFGISGPWWYASGAAIQVLLFAMISSKLKQHAPFCHTYLEIIKARWGRAAHLVFLFFALATNIIVSTMLILGGSATVTDLTGMNTVAACFLIPLGVSIYVLTGGMRATLIADYSHTLVLYCILISFALVAYATSPIIGSPSKMWELLNYAAEANPISGNAQGSYLTMRSKSGLIFGVLNIVGNFGTVFNDQAYWQRAIASDPKTSVKAFLWGGIAWFGIPLGIATSLGLSAVALAHGTSTPIITLTPDEVSAGLPAVKAASALMGQSGATAMLILLFLAVTSACSAEQIAVSSILTYDIFGTYIRPNPSEKQILWVSHVCIFSYALFMGAIATAFNYIGVSMGYLYELMGCIIGSAVVPIALCITWRKCNGTGACVGAVLGFCAGVAGWLGITSTLNDGVINVTTTFGDYEMLTGNLLSIGVGGIITVAWSYIHPANFDWDITRSINNKEDFTLTENTAPPLAYDDEKEKLDGEGEGFQGGAEPMRNTTHTTVEAQPTDMTKENEELQKAFRFAAIAALSLVVILIFVIPLPLFFTSHVYPVKGFTAWVCISLIWLFVGLGMVGVYPAWEAREGLMKVGKGIVRDITRQN

SEQ ID NO: 17137 - protein, 285 aa, Oryza sativa Japonica Group
MADPGHDESGNPPRSGGVREQDRFLPIANISRIMKKAVPANGKIAKDAKETLQECVSEFISFVTSEASDKCQKEKRKTINGEDLLFAMGTLGFEEYVDPLKIYLHKYREMEGDSKLSSKAGDGSVKKDTIGPHSGASSSSAQGMVGAYTQGMGYMQPQSNFHILVVLQSFAFPYMYQVAQIYCNKYEVSREQIWDTPQIMELSPWIPYTINRIWKETHGSQDIRIQGRPREAANSALDWQWPSKHSSLASNFYGTRVVGGHHEYQRSTKKDTTHVNFASGLGDLG

SEQ ID NO: 17138 - protein, 376 aa, Coix aquatica; identical to SEQ ID NO: 10220

SEQ ID NO: 17139 - protein, 209 aa, Brassica napus
MQSKSGRGNEEEANHHHADQQQQQQPMMYPEPWWKTNAFGVIPQERPSVLPSNSSSLDCPNGSELNDVHSASEDGGGPGNGENDAAWKDSQAVTSSPSVDQHGMEGSDPAHVAASMHGMHNQQPVQPPELVGHYMACVPPNPYQDPYYAGMMGAYGHQPLGFRPYLGMPRERTALPLDITQEPVYVNAKQYEGILRRRKARAKAELERK

SEQ ID NO: 17140 - protein, 376 aa, Cymbopogon flexuosus; identical to SEQ ID NO: 10222

SEQ ID NO: 17141 - protein, 202 aa, Arabidopsis thaliana
  misc_feature (17)..(17): Xaa can be any naturally occurring amino acid
  misc_feature (78)..(78): Xaa can be any naturally occurring amino acid
  misc_feature (108)..(108): Xaa can be any naturally occurring amino acid
  misc_feature (114)..(114): Xaa can be any naturally occurring amino acid
  misc_feature (131)..(131): Xaa can be any naturally occurring amino acid
MASSMLSSAAVVTSPAXQATMVAPFTGLKSSAAFPVTRKTNKDITSIASNGGRVSCMKVWPPIGKKKFETLSYLPDLXDVELAKEVDYLLRNKWIPCVEFELEHGFVXTREHGXNTPGYYDGRYLGKFWKXLPICFGCTRLPLQVVERKFERMPRKEYPRATLSLGIIGFTTPRQVQCITFLALQSPPSFTRSLNFFLKHFL

SEQ ID NO: 17142 - protein, 333 aa, Dichanthium aristatum; identical to SEQ ID NO: 10226

SEQ ID NO: 17143 - protein, 369 aa, Triticum aestivum
  misc_feature (151)..(151): Xaa can be any naturally occurring amino acid
GVLIVGVLAVVIGAAFCGIFAFSYYRRQKQKIGSSLEVSDSRLSTDHFQQKEACRRSASPLISVEYSNGWDTMSGGGCGSSGEVGDSFRFNLEEVECATQYFSEVNLLGKSGFAATFKGILRDGSVVAVKSLNKTSCKQEESDFLRGLKTXTMLRHENLVGLRGFCCSRGRGECFLVYDFMVNGCLSHYLDVKEGSEASVLDWPTRVSIIRGIAKGIEYLHSKKSNKPSLVHQNISAEKILLDHHFAPRLSVPGLHKLLADDVVFSALKASAAMGYLAPEYANTGRFTEKSDVFAFGIVVLQVITGRRAVSQVKVGTASSDLEGLIDPYLGGIFSTTEAARLAEVAVHCTSEAASQRPTMEAVVQQLSG

SEQ ID NO: 17144 - protein, 618 aa, Magnaporthe grisea 70-15
MTFDIAGNLLELTRRAAEEPEPGGMAVGLALRVFAVDGLQDLVSFDYQIFFNLLLPPIILSSGYELHQANFFRHIGTILTFAFAGTFLSAVVIGVILWLYTRVPLEGLTMNWIDAISVGATLSATDPVTIIAIFNSYKVDPKLYTIIFGEAILNDAVAIVIFESAQKSARGLTKGSAAGISTFFWGFWIFLRDFFGSLFIGALLGILTALMLKYTYLRRFPKLESCLIVLIAYATYYFSQAIHMSGIVSLLFCGITLKHYAYFNMSRRTQLTTKYMFQVLAQLSENFIFIYLGVSLFTDKDLQFQPLLIIVTVMAVCAARWVAVFPLSWAINWFHKYRAERRGIKNVPEELPYKYQGMLFWAGLRGAVGVALAALLTAKDHRAFKATVLVVVVLTVIIFGGTTVNVLEILEIRTGVTDEIDSDDEFDIEAVGGYYKRSGNGIGYSPAGRNGVVPLDTRPGRRRDSNGAVGGRDASGWSSGHRSPLSAARPGSLVRTGSTREEAERLDLLGNPGGSTDSDDFGSDIDTSDLPPPAPRRRSSPMPPTGDEEAAGLPAGGSRTRSNTETGGLSATAAIRQLFSTEDPTALFRQLDEDYIKPKLLLDGGAGRGNGGGAGGSS

SEQ ID NO: 17145 - protein, 526 aa, Burkholderia vietnamiensis G4
MSNVELFHYLLLLICGAGALTWLAERVSIPPAVVLLVGGCVVAVAGKRVPDMDPALLLAAVLPPLLMSSGFYTAWKEFRHELASIASLALGAVAFTTVAVALAVHAANPALPWAACFTLGAIVSPPDAVAAKAILQRHPLPARLVAVLEGESLVNDASGLLLYQMAVSAALAVTITTAGATALFFSLTLIGIVTGLVCGHAMCWVLQRVREPMLGIVVTFAMAWGSYGIAEAVHGSGVLSVVTCGLVLGVRQHRVFGADLRIKAKATWEAVVFVLDALVFILIGLALHAILARVNQEGAVLMAGLRVALPATAAAIAARVVWVFVAMWLPARLRAPRAGHPPWSWREAVVLGWSGMRGVVSLAAAIALPADFPARDLILFSTFLLIIATLVVQGGTLAPLIRVLKLRPAVRRTMSEHAVRAHTFGAALAALDARGPDGDGLERASRERLLTEYRNRVAFNERAHRDGAQPAQVRARMLGVELEMVGVSRDALLALHRDGRVDDAVLHRIESELDFEELRLQRLLEP

SEQ ID NO: 17146 - protein, 376 aa, Elionurus muticus; identical to SEQ ID NO: 10228

SEQ ID NO: 17147 - protein, 429 aa, Verrucomicrobium spinosum DSM 4136
MKNLSTSATRSLLLGLGLGLATLVSPPLGAQAPVGVPAADQEADVATVTALVNEAVGQIYKSAYRTEPIPVIYTKALRGLLTSLGEGAQAQAKDLSGMIDGAAEAEFISALQAIATAPGQRQSLRDLAETAIKTYCKQHDPYTRYIEADDVRISQLMGKASGSGVGMSINEKNGIFLCYPLPGSPAEAAGVKAGDKLLTVDGKSVNEKPLEYLAGLIRGAPGTEVNLRVEHGFGRAQTVRVTREALTTPTVFVEKKVTGVVLRVRKFSKELLDEARAALGQLTAGSTLTLDLRGCPGGDLDVAIAFTSLFLEAGEPVVTVRTRGRPDEVSTATKPREFKPAAIVLLQDEGTASAAELVIAALVNSKTARAASQGVKTYGKGVLQTRIELRGGGVLMVTTGELIAPQGQTWDLTGLLPSLENRGRIFPKE

SEQ ID NO: 17148 - protein, 71 aa, Brassica napus
  misc_feature (7)..(7): Xaa can be any naturally occurring amino acid
MTSPSPXTFRPKLKDQEYMELVFENGQFLAKSQRSEAFSLENQRTKSIVDLFEDEYNEDFMKSIIHGADKL

SEQ ID NO: 17149 - protein, 1020 aa, Microcystis aeruginosa PCC 7806
MTTLHGNWLIGSQDSVFFLWGEQWQGKELSETKENHPFCLESGALAQFIEKFSPQLNRYSPESIKLSLPSYSPPRKKYFLPLLSGQILEPTAKSLSWQPWQVSGLTFSAGTIVQLWEKLPLAKAKFIGNDLRFWLYLHRWSLDILARGKFLAGINQGESCWYPLLDSTIDRTRLAKFIQTIPPVCLAYQENSEPQTIILDCLKNIVDARLRQKIDSTVNISPSLMVKPWLQSLSGDHHDIALEAKNLQRLENAYNNWVFPIQESLVNGNNRQLIENQYRVCLSLQPPSLGTAWKLTYYLQALDDPEFLISAKLIWLEGKESYHSYQRVVNNPQEILLKGLGLASRLYEPIRISLEQRHPEECSLDSIEVYQFIRSIAWQLQDQGLGVILPTGLTAGSNEQRLGIKIAASVTPKKGERLSLTSLLNFQLKLVVGEQEISKKGFDKLLEKKSPVVEVGGKWLILQPTDVKAAQAILNNTIAPLNLSVEDALRLSSGDNNLIAKLPVVNFQAEGALKELIDNLNNNQGIQLINPPREFQGELRPYQLKGVSWLAFLEKWGLGACLADDMGLGKTPQLIAFLLALKEEDMLVNPVLVVAPTSVVNNWEHELRKFAPTLAVFVHHGEKRLKGKAFAQAVKNQSVVITSYPLIYRDLSSLEAVQWQGLVLDEAQNIKNSTAKQSQAVRKIPAGFRIALTGTPVENRLTELWSILDFLNPKFLGTQAFFQRRFALPIEKYGDQESLHNLRSLVRPFILRRLKTDKTIIEDLPEKQEMNVLCGLSKEQGQLYQQLVETTLQKIEETQGIQRHGLILTLLMQLKQICNHPAHFLKENSLETSQRSGKLLRLEAMVEEVIAEGDRALIFTQFAEWGKLLQTHLQKKLAEEILFLSGSTKTKDRVEMIERFQNDPQGPKIFILSLKAGGTGLNLTRANHVFHIDRWWNPAVENQATDRAFRIGQKRNVQVHKFICTGTLEERINEMIESKKQLAEQTVDAGENWLTELDTDRLRDLLLLDRSAIIDEEETD

SEQ ID NO: 17150 - protein, 554 aa, Suaeda corniculata
MLSQLSSFFASKMDMVSTSDHSSVVSMNLFVALLCGCIVIGHLLEKNRWMNESITALLIGLSTGIIILLISGGKSSHLLVFSEDLFFIYLLPPIIFNAGFQVKKKQFFRNFITIILFGAVGTLVSFIIISLGSIAIFQKMDIGSLELGDLLAIGAIFAATDSVCTLQVLNQDETPLLYSLVFGEGVVNDATSVVLFNAIQNFDLTHIDHRIAFQFGGNFLYLFFASTLLGAVTGLLSAYVIKKLYFGRHSTDREVALMMLMAYLSYMLAELFYLSGILTVFFCGIVMSHYTWHNVTESSRVTTKHAFATLSFVAEIFIFLYVGMDALDIEKWRFVSDSPGTSVAVSSILLGLLMVGRAAFVFPLSFLMNLSKKSNSEKVTFNQQIVIWWAGLMRGAVSVALAYNQFSRSGHTQLRGNAIMITSTITVVLFSTMVFGLLAKPLILFMLPQPKHFTSASTVSDLGSPKSFSLPLLEDRQDSEADLGNDDKEAYPRGTIARPTSLRMLLNAPTHTVHHYWRRFDDYFMRPVFGGPGFVPFVPGSPTEQSTANLTQRT

SEQ ID NO: 17151 - protein, 497 aa, Nocardioides sp. JS614
MSTSTRFVEQYGLYSSEQQRAAKQSLEKVLEHGIEIVRLVWPDQHGLLRGKALTVDAYIGALETGNEITMAPFFFDPANAIVFNPFSPDGGFAIDGLGGSPNVKMVPDPGTFTVLPWARNTALVFCDLYMTNGQPFPLAPRTILKDALAALAQHGAKLVTGVEMEWYLTRLVDDQLATGSLGAPGSPADPPQVAPVARGYSYLLMEHLDEIDHVLEPIRKAVLQMGLPLRSIDDEWAPSQVETTFDVLEGLAAADSAALFRTTVKQIAKRHGHLASFMCTPAIAGFYANGWHLHTSLADIDSGANLMVPTDNSPLSEIGRHYVGGTLEHGIAASVFTTPTINGYRRRRPYSLAPDRLAWGQDNRAAMMRVISAPNDKASHVENRVGDSAANPYLYVAAQAASGLDGVVNKIDPGPISLDPYAADVPQLPTTLADAVDALESDGFFRKVFGDVFVDYMVAMKRSEVDRYQAWVEQNPDPDTYVNGVTGWEHREYFELF

SEQ ID NO: 17152 - protein, 376 aa, Heteropogon contortus; identical to SEQ ID NO: 10230

SEQ ID NO: 17153 - protein, 174 aa, Synechococcus sp. CC9605
MYGRYSRLTSALHPCFTMAISVSAVSVTTPDGSSKSLGDYAGKVLLIVNVASRCGFTKQYAGLQALNEAYAAKGLAVLGFPCNDFGAQEPGSLDEIKSFCSTTYGADFELFEKVHAKGSTTEPYTTLNQMEPSGDVEWNFEKFLVGKNGTVIARFKSGVTPEDLKSAIEAALAA

SEQ ID NO: 17154 - protein, 463 aa, Helicobacter hepaticus ATCC 51449
MIIKKNVSYKDRSFIALTDDTRVIESLLKGEGDKFGLQKDADTDKVLFVKNKQNKNFITPQIAQSCSMVESYELNDILMANFSHNSPNIVGITGTNGKTTTAAIIYSILLDLGFNVALLGTRGFFINEHRIKPKGLTTPSMLELYENLCIAMEQKCNFFIMEVSSHAIEQERIAGLDFALKILTNITSDHLDYHKSVEEYRRIKNSFFEGEGRKLLNADEPYIYCTDKAAYFYGIEKKGNLSVDVYALENGIDGYISWRERDYKTNEQSAIQAHLYGKHNLYNTLAAIGAVKILTQEPLERIAEALEHFGGVSGRMEVVHNMPLVIVDFAHTYDGMYQIFESFRHCKIAVVFGAGGDRDKSKRPKMGACAQQFAHKIYITSDNPRTESPKSIIEDILSGMQDGEYVFVEADRKKAIYMALESLESDEVLLILGKGDEDYQIIGNEKIYFDDREVVRNYFASRT

SEQ ID NO: 17155 - protein, 161 aa, Shewanella sp. MR-4
MTSTIYSHSANDIQGNPTALAQYQGKVILIVNTASECGFTPQYKGLEALYQKYKAQGLVVLGFPCNQFGAQEKADEKGIQSFCELNFGVSFPLFSKIEVNGEHTHPLYQYLKKAAPGVLGTERIKWNFTKFLVNRQGEVVARFAPTTKPEAISDKIEALLK

SEQ ID NO: 17156 - protein, 471 aa, Polaromonas sp. JS666
MAKTVADVMKMVKENEVKFVDFRFTDTRGKEQHVTVPVSHFDEDKFTSGHAFDGSSIAGWKGIEASDMQLMPDPNTANIDPFFEETTLFMSCDVLEPSDGKSYDRDPRSIAKRAESYLKASGLGDTAYFGPEPEFFIFDDVRWNTDMSGTFFKIEEYEAPWNSGSKLEGGNRGHRPTVKGGYFPVPPVDSTQDMRAEMALILESLGIPVEVFHHEVAGAGQNEIGTRFSTLVQRADWTQILKYVVQNVANAYGKTATFMPKPIVGDNGSGMHVHQSIWKDGKNLFAGDGYAGLSDFALYYIGGIIKHARALNAITNPGTNSYKRLVPGYEAPVKLAYSAKNRSASIRIPYVANPKGRRIEARFPDPLANPYLCFSALMMAGLDGVENKIHPGEAATKDLYHLPPEEDAKVPTVCHSLDQALDCLNADRGFLTKGGVFTDSMLDAYIELKMGEVTRLRMATHPIEFEMYYSL

SEQ ID NO: 17157 - protein, 127 aa, Brassica napus
  misc_feature (69)..(69): Xaa can be any naturally occurring amino acid
  misc_feature (78)..(78): Xaa can be any naturally occurring amino acid
DEHCKRYMFMTEEDITSLPCFQNQTLLAIKAPTASCIEVPDPDEVMSFPQRQYRMVIRSRMGPIDVYLXRTKHGCSKXKGDSSMETDESAVDTSSLKIVTSDTDLKTDYWFESGEEVTLTDLWNNFC

SEQ ID NO: 17158 - protein, 706 aa, Yersinia pestis KIM
MCAQNTCSSDTEANLGMNKFVRLAAIAGLLLAGASYATDTTYRIDQLPQLRQEPEHATVSERVTSRFTRSHYRQFALDDQFSAKIFDRYLNMLDYSHNVLLASDVAQFADKKYSLDKELKSGQLDTPFALFNLAQKRRFERYQYALSVLDRPMVFTGNDTIDIDRAKAPWPSSEAELNALWDAKVKYDQLNLKLAGKTDKEIKETLTKRYQSAIKRLTQSNSEDVFQLIMNAFAREIDPHTNYLSPRNTEQFNTEMSLSLEGIGAVLQMDDDYTLINSMVPGGPAAKSKTIAVGDRVIGVGQAGKPMVDVIGWRLDDVVALIKGPKGSKVRLEILPAGKGTKPRTVTLTRERIRLEDRAVKMSVKTIGKERVGVLDIPGFYVGLTEDVKVQLQKLEKQNVSSIIIDLRSNGGGALTEAVSLSGLFIPSGPVVQVRDNNGKVREDSDTDGVVYYKGPLVVLVDRYSASASEIFAAAMQDYGRALIVGEPTFGKGTVQQYRSLNRIYDQMLRPEWPALGSLQYTIQKFYRVDGGSTQRKGVTPDIVMPTGVDPAETGENFEDNALPWDRINAASYTKTGDLKPWEPELLKNHAERIAANPEFQYIQKDIERYKALKDKRNIVSLNYAQREKENRDDDMTRLTRLNERFIREGKKPLKSLDDLPKDYQEPDPYLDETVNIALDLAHKEKAQPQIASRPVAAATAGATVK

SEQ ID NO: 17159 - protein, 490 aa, Thermotoga sp. RQ2
MNISTIVSNLKDLILEVRAPYDLEITGVSNHSSKVKKGDLFICRRGEKFDSHEIIPEVMEKGAVAVVVEKEIDLDFPHIQVFDSRYFEAKVASLFFEDPWKDVLTFGVTGTNGKTTTTMMIYHMLTSLGERGSVLTTAVKRILGSSYYDDITTPDAITILSAMKENKEGGGKFFALEVSSHALVQKRVEGVRFDVGIFTNISRDHLDFHGTFENYLKAKLHLFDLLKDDGVAVLNESLADAFNRKSRKITFGTSKNADYRLGNIEVNWEGTQFVLETPDGLLKVFTKAIGDFNAYNAAAAIAALHQLGYDPKELASSLETFTGVEGRFEVVRGAKKIGLNVVVDFAHSPDALEKLLKNVRKISQGRVIVVFGAGGNSDRGKRPMMSEVASKLANVVILTTDDPRGEDPEQIMEDLIKGIDKRKPYLVLFDRREAIETALTIANRGDSVVIAGRGHERYQIIDEEKKVPFKDREVVEEILREKLKGRKYAQ

SEQ ID NO: 17160 - protein, 141 aa, Coccidioides immitis RS
MSDREFTSNDDLSLPKATVQKIITEILPPSSGQNFAKDARDLLIECCVEFITLISSEANEISEKEAKKTIACEHIEKALTDLGFGDYVPDVLAVAEEHKEQLKSRERRTNKIEQSGMSEEQLYQLQQELFRSAGEKYHAGS

SEQ ID NO: 17161 - protein, 181 aa, Lentisphaera araneosa HTCC2155
MKKILSLFTMIFTACSNPQYDVKEKSLHEFIVKDIDGKEFKLETLKGKTVLVVNVASKCGLTKQYTDLQKLYENYKDKDFVIIGFPANNFMGQEPGTNEDIKTFCSTKYNVDFPMMAKISVKGDDIAPIYKFLVSDPKHGGKIKWNFDKFLVNKEGKIIQRFSPRTKPLDNKLTKAITDTF

SEQ ID NO: 17162 - protein, 469 aa, Shewanella violacea
MSAESVLQQLKELEVKFVDLRFTDTRGKEQHVSIPSHQVDEDFFEDGKMFDGSSINGWKGINESDMVLMPDPASFVLDPFTAETTANIRCDILNPGTMTGYNRDPRSIAKKAEEYLRSTGIADTVLLGPEPEFFLFDDVKYGADMSGCFYKVDAEEAAWNSGTSYEGGNKGHRPSVKGGYFPVAPVDSSQDIRSAMCLVLEEMGQVVEAHHHEVATAGQNEIATRFNTLTLKADEVQVLKYVVHNVAHAYGKTATFMPKPIVGDNGSGMHVHISLAKDGTNLFAGDKYGGLSEMAIYFIGGVIKHARAINAFSNPATNSYKRLIPHFETPVMLAYSAANRSASIRIPLVPSPKGRRIELRFGDPMANPYLAFSAMLMAGLDGIQNKIHPGEAMDKDLYDLPPEEAAEIPTVATSLENALECLDADREFLTRGEVFSNDFIDSYITLKSEDVERVNQTTHPVEFELYYSL

SEQ ID NO: 17163 - protein, 161 aa, Glycine max; identical to SEQ ID NO: 11581

SEQ ID NO: 17164 - protein, 737 aa, Dehalococcoides sp. VS
MTSKNTRALTLFAGLLLTAPLALLARPDGAASANSVSTLPSAPTADQTTAAKLVYGLLSDSRYAYRPRALDDALSADMYKRYLESLDPNKQFFSAADIARFDAFKNKLDDAIKSGDLTPAYTIFSTYRQRVDERVAYARTLLKQPGNFEFTGSERYDYDRKEAPWAADTAAVDALWKQSVRNDWLRLKLAGKKPDDIAKTLDKRYANMAKSIGELKGEDVFQTFVNSYANAIDPHTDYLTPKSADNFNMTMSLSLDGIGAQLQKQDDVVAIREIIPGGPAARSHLVKPGDRIVGVGQGDSGQMEDVIGWRIDDVVAKIRGPKGTKVRLDVIPAEAGQDSKPNRIVLVRDKVRLEEQAAKSEIIDIPAAGDGPAKRIGVIKLPGFYQDFEGRRKNANDYASATRDVAKLLVKLRADKVDGVVLDLRNNGGGSLNEAIELTGLFIDRGPVVQVRESGGRVSVEGDSDNGIAWEGPLAVLINRGSASASEIFAGAIQDYGRGLVIGETSFGKGTVQNLVDLDRWPANETARFGQVKLTIAQFFRVSGGSTQNKGVVPDLAFPVSVDATEYGESTYDNALPWTKIAAVQHTSYGNFAPLLPKLETLHSVRIAGDKEFQWWSQDVAQFREERAKKWISLNEADRRAERDREDAKRKQRQEERKTLGLALDPLADDATDDGLASSERDIVKDAAREKLADKRPDPLLRESASILADAVRLLNADRQLSAQVLPTATRPGHWAD

SEQ ID NO: 17165 - protein, 392 aa, Heteropterys nitida; identical to SEQ ID NO: 10240

SEQ ID NO: 17166 - protein, 68 aa, Populus trichocarpa
MTTSRRLADRKVDRFDKKVTKRGAVGETSTRKGKDYPVGPLLLGFFIFVVIGSSLFQIIRTASSGGMA

SEQ ID NO: 17167 - protein, 392 aa, Heteropterys pauciflora; identical to SEQ ID NO: 10243

SEQ ID NO: 17168 - protein, 194 aa, Xylella fastidiosa 9a5c
MNMLNVLRFPVLALALALAFVSSGVLADAGSLLDLDYRPLAGKETVNLQRLYGGKVLLVVNTASKCGFTPQYEGLEALHQKLSPLGFAVLGFPSNDFKGQEPGDEQQIQKFCTLTYGVKFPMFQKVHVKGDEVTPLYQRLTQTTGVAPGWNFHKYLIARDGHVVAQFDSRTRPDDPILLEAIKRELAKPVQVAH

SEQ ID NO: 17169 - protein, 473 aa, Idiomarina baltica OS145
MTEFALDTQTALFIIVGFALVWIAFGVWLGRKNKSHEDFALAGRNVGFAFAAATAMATWVTSNTTLVAPQLTYQLGVWGMVGYSFAALGLLLFAPMAKRIKQLLPQGYTSGDFVRLRYGRFAWAVFLVISVVYAFGWLVSLGMAGGILLEALSGLDYYIGMTIILAMCVGYTLFGGLRAVIATDFIQALIIIVGVAVVAYWLIDNVGLTSIHTELSEAHPQLLDLLFPAAVMFLFNNIFFGLGEIFHSNVWWSRALSFRKDVAYKAYLTGGLLWLPIPVVTGFIALAAPQLGIFPASADMIGPAVAASVLGKTGAILVFIVVFSALASSLDSLLAASSDLVTQDIYHKLIKKHASDQQLMRFNRYCLLGIGVMTWLLCLPRIATLGALLNFAGAFVASTIWPIVIGLYWRRLQGTFAGIAMAAGTIAGLIAYFWIGFYVAALVSCAVSGLICAIGIVFNKRQFSWHELQENGQ

SEQ ID NO: 17170 - protein, 392 aa, Heteropterys rhopalifolia; identical to SEQ ID NO: 10244

SEQ ID NO: 17171 - protein, 442 aa, Methanothermobacter thermautotrophicus str. Delta H
MSDKIGRIIAKMDECGVKFVRLQFVDIHGKPKNMAIPLVRPDQIEDIIKDGLLFDGSSVEGFVDINESDLVLKPDPDTFSTLPWRPEEKGVCRFICDIYWPDGKPFEGDPRYVLKRALDKYAHLGYEYNVGPEPEFFILDQDEDGNIIPHDCGAYFDVEPVDQGTDFRRKLVMDLEALNFDVEVSHHEVAPGQHEIDFKFDKALKTADAVITFKQAIKAIVDKIGYMVTFMPKPFFGENGSGMHCHQSLFKDGENVFYDPDTETQLSEEALYFIGGLLKHAPALTAVCAPTVNSYKRLVPGYEAPVYIAYGLKNRSTLIRIPASRGKGTRVELRMPDPSCNPYLAFAAMLEAGMNGIQNKIDPGEPTEIDVYEKSMSELREMGIETLPSSLWEAYHALEEDDVIKGALGGHVYEKFMEIKHREWDDYRVRVFKYELERYLDI

SEQ ID NO: 17172 - protein, 392 aa, Heteropterys sanctorum; identical to SEQ ID NO: 10246

SEQ ID NO: 17173 - protein, 524 aa, Burkholderia mallei ATCC 23344
MRMKLKNIGLIAAGLATGVFATLQISASAQQAVTTAAAPLPLDQLRLFAEVFGQIKREYVEPVDDKKLLTAAIKGMVSSLDPHSSYLDKTDYQELQEQTKGRFAGLGIEISQEDGLVKVISPIEDTPAFRAGIRPGDLITRINDRPVRGMTLDKAVKQMRGEPGTKVTLTIFRKSDDRTFPVTVTRAVIRVQSVKMKLLDPGYAYIRITSFQERTTPDLAAKLQDIARQQPNLKGLILDLRNNGGGLLQSAVGVAGAFLPPDSVVVSTNGQIPDSKQIYRDNYENYRLPSFDSDPLKNLPAVFKTVPMIVLTNAYSASASEIVAGALQDSHRAVIMGKATFGKGSVQTVRPMTADSALRLTTAYYYTPSGRSIQNKGILPDIPVDQYADGDPDDVLVTREVDYTNHLANTQDPNEKKELEEREQRRMEQLRILEEQNDKKTPEQRQKDRERKPIEFGSADDFMMQQALNKLEGKPVEQSKMIAADSTAKSAAAKAGAASAAKGASGAAAKPASAAKPASAPQPQ

SEQ ID NO: 17174 - protein, 392 aa, Heteropterys sericea; identical to SEQ ID NO: 10248

SEQ ID NO: 17175 - protein, 892 aa, Fusobacterium nucleatum subsp. nucleatum ATCC 25586
MLVEGEDNLYLALYDSEKNLISSYSNLNQNDINNYIENLENEKEFFISWEEKESSNYLKLDKTLLEYLLEKDNFVNSNFETIAKKEIENLSLLIRDNNEIEDRLDIYVEINDNLLIKNNIVGNYIYSQGIFYKIDIEEDSQFPLIDLFQKIDKYELESYCTLILKNYKNIDLKYEDYETIISDEKTAIPQIIIEKIAFDNSLYLKINSIISTMDYEFFTKNQIEAVLTVNELEKKLEISKINLENLSSDMFEIVKVLTKLQKSIGLKSSYYIDNENFIILNEELAKEFVKKELLQLTGKYSIIGTDRLRKYNIKAVKPKISGKFSYNLDYFEGEVEVEIEGEKFSIQQLLNNYKKDEYIVLSDGTNALINREYIEKLQRVFKEEDGNKIKVSFFDMPIVQDLIDEKSFENDFMGSKDFFEGINKLAEENIDYPKLKATLRDYQKYGYKWLKYLTDNNLGACLADDMGLGKTLQAITLISKMHEEKKKKSMVIMPKSLIYNWENEIKRFSPKLKVGVYYGINRDFSSLKKVDVILTTYGTIRNDIESLLKQKIDLLVLDESQNIKNINSQTTKAVLLLNAKKRVALSGTPIENNLLELYSLFRFLNPEMFDSVQKFTNDYIVPIQKYSDTSTIEELRKKIYPFLLRRIKKEVLADLPDKIEKLVYVDMNDEHRRFYEERRKYYYSLLEKNTSSQGNFDKFFVLQAINELRHIVSSPELESKKIISSKKEVLIENVIEAIENNHKVLVFVNYLSSIESICDSLKENKIKYLKMTGQTKDRQNLVDKFQNDSRYKVFVMTLKTGGVGLNLVSADTIFIYDPWWNTTVENQAIDRAYRLGQDKTVFAYKMIMRNTIEEKILKLQEIKNKLLDDLISEDNLSTKNLSKSDIEFILGS

SEQ ID NO: 17176 - protein, 593 aa, Zea mays
MEMSAMEEALPKAMERRKGGLRTIPFIILNEIFEKVATFGLSANMILYLTERYLMTNAFATVVLYFWHAFSNFLPILGAVLADARLGRFRVITLGSCVSLFGMCLLWLTAILPVYKNTPECAPGRPVGCAVLPWQLPLLFTSFAFMSLGSGGIRPCTLAFGADQLDKRDNSANNVRTLQTFFNWYYTVLGLSIVFASTVIVYIQQARGWVVGFAVPVVLMVTALTLFLLGSPFYIKAAANSSVVIGFVQVLVASYNNRHEPLPPETADSSSFYNKAGCKPRTPTNKLMYLNRACVLRNPSKEISPDGAACDPWRLCTVQQVEDTKAVIRVLPIWSTGIMPGVVVGQQMFPTLQAKTMERRVGKLEIPPASFGVFAILTLTVWVAVYDRVLVRPLSRLTGHARGLSLRQRMGAGLVLFAVAMAVAAHTESVRRAAALAEGLRDSNPLTGERPVRMSAMNLVPQHCLTGLAEGLNLIGQIEFYYSEFPKTMSSIGVSLLALGLGFGAVLGSAIVGVIDAGTRSGGSHDGWLPSNLNRGHYDYYYLVLAVLCAANVLYFAVCGWAYGDEGQNRVVAADAAVDDVDDKEEEQKAVII

SEQ ID NO: 17177 - protein, 1168 aa, Arabidopsis thaliana; identical to SEQ ID NO: 10251

SEQ ID NO: 17178 - protein, 152 aa, Brassica napus
  misc_feature (112)..(112): Xaa can be any naturally occurring amino acid
  misc_feature (138)..(139): Xaa can be any naturally occurring amino acid
  misc_feature (143)..(143): Xaa can be any naturally occurring amino acid
  misc_feature (146)..(146): Xaa can be any naturally occurring amino acid
  misc_feature (149)..(149): Xaa can be any naturally occurring amino acid
MAYSMLSSAAVVTSPAQATMVAPFTGLKSSSAFPVTRKANNDITSIVSNGGRVSCMQVWPPIGKKKFETLSYLPDLTEVELGKEVDYLLRNKWIPCVEFELEHGFVYREYGXTPGYYDGRYWKMGKLSLVRDAPTPAXXVKEXPEXKTXYPN

SEQ ID NO: 17179 - protein, 821 aa, Oryza sativa Japonica Group; identical to SEQ ID NO: 11400

SEQ ID NO: 17180 - protein, 139 aa, Glycine max
MESRKPQRSALVDSYVVPGDVILDLADMTNQTIKLGAGLRQDCDTIQATSAGRLRLSKPNKYWVENSQKRYVPSVEDTVLGIVVDTKPDNFLVDIKGPNLAFLPVLSFEGGTRRNIPKFEIGTLIYARMVKANSIMNPE

SEQ ID NO: 17181 - protein, 376 aa, Hyparrhenia hirta; identical to SEQ ID NO: 10253

SEQ ID NO: 17182 - protein, 1132 aa, Arabidopsis thaliana; identical to SEQ ID NO: 14896

SEQ ID NO: 17183 - protein, 376 aa, Ischaemum afrum; identical to SEQ ID NO: 10256
  misc_feature (261)..(261): Xaa can be any naturally occurring amino acid

SEQ ID NO: 17184 - protein, 388 aa, Buchnera aphidicola str. Sg (Schizaphis graminum)
MRALHFGAGNIGRGFIARVLLKSDFNLIFSDVDQNIINAINNYKKYKIKLIDNSFEKIININNISAINSYDPNVLNVISHVDLITTAAGVNALYKIASILIEGIILRINLKCKKPLNIIACENKIKATSFLKKIIFDKIPLKYHDYFDEYIGFVDCTIDTIVPTFSSFKEENSLFVIAENFKEWIVDVNQFKGMVPKIIDMTLSDNLTSFIDRKILTLNTGHAIAAYLGLMKNYKNICEAMSDFSIQRIVKDAMYESGLVLIKRYNFNKKDHLSYIDKIFVRFKNPFILDKLERIARNPLQKLSKDERLIQPFVEAMKYNLPYFNLVKGIAAALHYRNINDIQSIKLSSLIKEEGLEETLVKVCKLNANSNEIRIIISEYHSIIKDFL

SEQ ID NO: 17185 - protein, 540 aa, Zostera marina
MDLGVITEMANQVTVSTSDHASVSSISLFSALLCGCIVIGHLLEENRWVNESITALLIGLVTGVVILLTTKGKSSHILVFSEDLFFIYLLPPIIFNAGFQVKKKQFFRNFMTITLFGAVGTLISFSIISFGAIILLKNGRSLTDIGDYLATGAIFAATDSVCTLQVLNQDETPLLYSLVFGEGVVNDATSVVLFNAIQNFDLVHIDGTIALKFFGNFLYLFLASTVLGVATGLLSAFVIKKLYFGRHSTDREVSLMMLMAYLSYLLAELFYLSGILTVFFCGIVMSHYTWHNVTESSRITTKHTFATLSFIAEIFIFLYVGMDALDIDKWRFISDSPGKSIGISSILLGLVMVGRAAFVFPLSFLSNLSKKFSHEKIEFKQQVTIWWAGLMRGAVSMALAYNQFTSAGHTELPANAIMITSTITVVLFSTSVFGLLTKPLVFLLLPHKGLKQQMSSIDDPTSPKSFLAALLGSVHGSEIEEPTSIPRPSSLRLLVTSPTRAVHYYWRKFDDAVMRPMFGGRGFVPFIPGSPTEEPSVHPF

SEQ ID NO: 17186 - protein, 323 aa, Microstegium nudum; identical to SEQ ID NO: 10260

SEQ ID NO: 17187 - protein, 373 aa, Paspalum simplex; identical to SEQ ID NO: 10262

SEQ ID NO: 17188 - protein, 156 aa, Vitis vinifera
MSGPQKMDNEVTRLKAEVERLYAEECRLDDCIREKQELLRAIAGDENCQKHLFLTEEDITTLPCFQNQTLIAIKAPQASSVEVPDPDEDIGFSQRQFRIIIRSTTGPIDLYLLRYFSILYLAKLISLSLSHTHTHMHNMTPMHATCTTCAHTGGGI

SEQ ID NO: 17189 - protein, 68 aa, Picea sitchensis
MTTSRRLADRKSAKFQKNILKRGAVPETTVKKASSYPVGPIVLGFFVFVVIGSSIFQIIRTASSGGMA

SEQ ID NO: 17190 - protein, 333 aa, Phacelurus digitatus; identical to SEQ ID NO: 10267

SEQ ID NO: 17191 - protein, 1344 aa, Zea mays
MGIFNKFSFIFLVIFLALSANAEVQRHRFVIQATKVKRLCKTHNIITVNGMFPGPTLEIKNGDTLEVQVVNKARYNVTIHWEATRTGAAPNVSDAYTINAQSGDLYKCSSKETTVVPIDSGETNLLRVINAALNQPLFFKVANHKLTVVGADASYTKPFTTSVLMLGPGQTTDVLIQGDQPPSRHYMAARDYQRAQNAPFDNTATTAILEYKFASCAAKKCNGPTPIMPSLPAYNDTNTVTAFSQSFRSREKAEVPTDIDESLFFTIGLELNNCPPNFRKRRCQGPNGTRFTASMNNVSFVLPRNFSLLQAHQQGIPGVFTTDFPANPPLKFDYTGNVSRSLFQPVPGTKLYKLKYGSRVQIVLQDTSIVTPENHPIHLHGYDFYIIAEGFGNFDPKKDTSKFNLVDPPMRNTVGVPVNGWAVIRFVADNPAFEVFVQDSWQAVELIRIKNGFMTLHLIDGQYLIEKKPFSDLRVKSRKATLPDCTCFLRPGIDICILSRPQETESLDEETPEPVWVDAKISSIERKPHDSECSCQFYINLYDNRAPLGSEKGTLSKETEVIGINDICILQKLEKNACEDQHYRWNFSEDCSTLKRTKIFLGKFSSDISWLLVTSVLKQIAFDVRSVQNKIVYQILDQDDDSPLKYNNYFHAVNIKSDNGISVSNVVQFDPLGNNEADAVYSVDETNQWPVYDAMNLRRSKRRFVQPERFVGCDHPGGTDTSWHLTAACRTSNWREEGEVQEADMNMPLSHLLCINASPTEELTLSEKRDTMSKSKNVSKEVKSDVTTPRKPSVGNPSRSGVKYPRRPRVKNPRKDENTLAIVPVSSETGDPAFGNCHMQRTPTNLSEEIEQLSLHYYNMKRYTANKKKKIPALEYLDYGTGWKGRPQPTKAQSKSYRSSQTRMEDFDELKTYKKTTLSAGAYNKLINSYMKNIDSTSVKDESHIIDRWNQFKEATSAEMNKKTEPEEPPVEEEEEMSETEMLWREMEICMASSYFDDDENNFCEYFNTLCLARPKFVFEVLRRLDPKYKRKKRFDKARNLLENRARKLFLDKIARKIDASVGEERMEGLNMLRKITNGFIDVYEGGNFDCLPGLQIYTLMMNSTDIQHEILVKLHKIMSTYTGYPLELELLITLASIHPSLVRTSNCSAKFFSTEELLELEKIKFDFRKGSKVMFVLNLVYRIIKNEKVLIFCHNIAPIYLLAEMFERIFRWRKGREILVLTGDLELFERGRVMDKFEEPGGASRVLLASITACAEGISLTAASRVILLDSEWNPSKTKQAIARAFRPGQQKVVYVYQLLATGTLEEDKYRRTTWKEWVSSMIFSEAFVEDPSQWQAEKIEDD

SEQ ID NO: 17192 - protein, 469 aa, Shewanella benthica
MSAESVLQQLKELEVKFVDLRFTDTRGKEQHVSIPSHQVDEDFFEDGKMFDGSSINGWKGINESDMVLMPDPESFVLDPFTADTTAIIRCDILNPGTMTGYNRDPRSIAKKAEEYLRSTGIADTVLLGPEPEFFLFDDVKYGSDMSGCFYKLDAEEASWNSGTSYEGGNTGHRPSVKGGYFPVPPVDSSQDIRSAMCLILEEMGQVVEAHHHEVATAGQNEIATRFNTLTLKADEVQVLKYVVHNVAHVYGKTATFMPKPIVGDNGSGMHVHISLAKDGTNLFAGDKYGGLSELAIYFIGGVIKHARAINAFSNPATNSYKRLIPHFEAPVMLAYSAANRSASIRIPLVPSPKGRRIELRFGDPMANPYLAFSAMLMAGLDGIQNKIHPGEAMDKDLYDLPPEEAAEIPTVATSLENALECLDADREFLTRGEVFSSDFIDSYITLKTEDVERVNQTTHPVEFELYYSL

SEQ ID NO: 17193 - protein, 607 aa, Glechoma hederacea; identical to SEQ ID NO: 10274

SEQ ID NO: 17194 - protein, 1082 aa, Desulfitobacterium hafniense DCB-2
MPFPIINELEIRTLASSKKAYELGVAYALKGRVSQLSHDGERNLISAVVMGTWLYEVEIILSRNGSIHSCHCTCPAFAEYPGACKHVIAALKAVQRKLTGSQPRLAVVKESVADFMALFANPDPKSVRETLNLEFELQIEIHRRVHAQLQIKVGQNRLYIVKNLEEFLAAIQGGHLLTFGKQFTYDPFLHTFSDEDQTIIHMLQEMSKQYEAFNEQRSFHYASPFSQKPFVLTEYYLGKFFDALGAKHFSLALTSSRGGLPELSPSLQIIRQDIPLDFAIQSKEQYLTLALQSKLPLQLTEDGRYYLYDQNIYQVSSEQQSFLPNLIKVMSGKNLQTLTFPDHQKDFFASEAIPLIEQMGSVAIDPQLAEKFVREELQARIYFDRMGDYGIRARLEFHYGDHIINPFTSQTGANRQEAADAQILIRNIERERKILGIFEQAEFIVSQGVISLEDDEKLFAFITTWLPQLQDCAETFYSDDFKLTIRTSTSFSGRVRLDESSDLLEISFQYSDIDRDELTHIFHSLQVKRNYYRLRDGSFLDLRQPELESMAMFLEHLNLRGEDLNEQTLRLPKFRAMYIDSFLRQANLPGIQRNKAFKQLVQSILEPQDGEYDPPPSLMSVLRDYQKTGFRWLKTLAAYGLGGILADDMGLGKTLQTLAFILSEKLSSPALVVAPTSLIYNWQAEGEKFAPGLHILVVDGSPQERQEQLKGLDQADLVVTSYALLRRDIETFAQVDFSYCFLDEAQNIKNPQTLNAKSVQRIKAKSYFALTGTPIENSLAELWSLFNFCLPGYLLSHQEFQKKYSTPIIKDGDPLALRELSRHIKPFILRRLKKDVLKELPPKIETEIKAALTEEQRKIYLAYLQQTKSQIAQELATHGFAKSQIQILAALTRLRQICSHPGMFIDNYTGESGKMLLFQELLEDSLAGGHRVLVFSQFTSMLDIIGEYLHSENIDYFYLSGSTKALERSRMAASFNNGEGQVFLISLKAGGTGLNLTGADTVIHFDPWWNPAVEDQATDRAHRIGQQNSVQVIKLLTQGTIEEKVNALQAKKKKLIDSVIQPGETMLSKLTEKELRELFELN

SEQ ID NO: 17195 - protein, 136 aa, Triticum aestivum
MSEAVGTPESGGAKEQERFLPIANIGRIMRRGVPENGKIAKDAKESIQECVSEFISFITSEASDKCMKEKRKTINGDDLIWSMGTLGFEDYVEPLKLYLKLYREMEGDTSKGSKSEQAGKKEVALNGQPGSSFNGM

SEQ ID NO: 17196 - protein, 617 aa, Hyobanche atropurpurea; identical to SEQ ID NO: 10275

SEQ ID NO: 17197 - protein, 559 aa, Solibacter usitatus Ellin6076
MKLAAVDYAILALYFAFVLGIGWRLRKKISTSGDFLTSGHSVPVWITSLAFLAANLGAQELVGMSGNGAKYGIMTAHFYWVGAVPAMIFVGIFMMPFYYGSRARSVPEYLKLRFDEKTRALNALTFAGMTIFSSGISMYALGLLLRLVLGWDFTTSVLCSAAIVLAYTFLGGLTSAIYNEVLQFFLIVMGFSPLAIMAVMKAGGWSGMSARLAQMTLPGGINGSVMTHSWKYMAHTSENPMGIEIFGLVAGLGFVMSFGYWCTDFLVIQRAMAANSMSASRRTPVIAALPKMMMPFIVIVPGIAALALSQMGVGYDLPMKNGGPDYDQVLTTLMGKFYPAGMLGVGLTGLMASFMSGMAGNVTAFNTVFTYDLYQTYIKPGQPDHHYLTVGRITTVVGVALSICTAYLAQQYNSINDLLQLVFSFVNAPLFGTFLLGMFWKRTTGHGAFFGLLSGTAAAALTQGLTVAEGKGGWMANLHEFPSSMAQNFWIAITAWTVCFAITIAVSMVTTPRPEKELHGLVYGLTELKHDEGVSWYLRPVPLAIAIGALALFLNFWFA

SEQ ID NO: 17198 - protein, 160 aa, Alcanivorax sp. DG881
MGIYDYSATTLSGEEKSLSEFQGKVLLIVNTASKCGFTPQYKGLESLYETLQPKGLEILGFPCNQFGKQEPGAADEIGAFCEKNYGVSFTMFDKVDVNGSGAHPLYDYLKKAAPGVMGSKGIKWNFTKFLVGKDGKVVKRYAPTDKPEAIRKDIEKLLEA

SEQ ID NO: 17199 - protein, 234 aa, Arabidopsis thaliana
MERGGFHGYRKLSVNNTTPSPPGLAANFLMAEGSMRPPEFNQPNKTSNGGEEECTVREQDRFMPIANVIRIMRRILPAHAKISDDSKETIQECVSEYISFITGEANERCQREQRKTITAEDVLWAMSKLGFDDYIEPLTLYLHRYRELEGERGVSCSAGSVSMTNGLVVKRPNGTMTEYGAYGPVPGIHMAQYHYRHQNGFVFSGNEPNSKMSGSSSGASGARVEVFPTQQHKY

SEQ ID NO: 17200 - protein, 682 aa, Escherichia coli O157:H7 EDL933
MNMFFRLTALAGLLAIAGQTFAVEDITRADQIPVLKEETQHATVSERVTSRFTRSHYRQFDLDQAFSAKIFDRYLNLLDYSHNVLLASDVEQFAKKKTELGDELRSGKLDVFYDLYNLAQKRRFERYQYALSVLEKPMDFTGNDTYNLDRSKAPWPKNEAELNALWDSKVKFDELSLKLAGKTDKEIRETLTRRYKFAIRRLAQTNSEDVFSLAMTAFAREIDPHTNYLSPRNTEQFNTEMSLSLEGIGAVLQMDDDYTVINSMVAGGPAAKSKAISVGDKIVGVGQTGKPMVDVIGWRLDDVVALIKGPKGSKVRLEILPAGKGTKTRTVTLTRERIRLEDRAVKMSVKTVGKEKVGVLDIPGFYVGLTDDVKVQLQKLEKQNVSSVIIDLRSNGGGALTEAVSLSGLFIPAGPIVQVRDNNGKVREDSDTDGQVFYKGPLVVLVDRFSASASEIFAAAMQDYGRALVVGEPTFGKGTVQQYRSLNRIYDQMLRPEWPALGSVQYTIQKFYRVNGGSTQRKGVTPDIIMPTGNEETETGEKFEDNALPWDSIDAATYVKSGDLTAFEPELLKEHNARIAKDPEFQNIMKDIARFNAMKDKRNIVSLNYAVREKENNEDDATRLARLNERFKREGKPELKKLDDLPKDYQEPDPYLDETVNIALDLAKLEKARPAEQPAPVK

SEQ ID NO: 17201 - protein, 197 aa, Yersinia pseudotuberculosis
SSIGGWKGINESDMVLMPDASTAVMDPFFADSTLIIRCDILEPGTMQGYDRDPRSISKRAEDFLKSSGIADTVLFGPEPEFFLFDDIRFGSSINGSHVSIDDVEGAWNSSTKYEGGNKGHRPAVKGGYFPVPPVDSAQDLRSAMCLTMEEMGLVVEAHHHEVATAGQNEVATRFNTMTKKADEIQIYKYVVHNVAHA

SEQ ID NO: 17202 - protein, 413 aa, Candida glabrata CBS 138
MNHDAIDSLENVGLWKKLSNLEYFTFCMIGIGLLWPWNCVLSAVLYFKHSFFQDVTNWAKVFASSMMAVSTITSLVFNVWLANRQRNYTQRVVRGLVWQVMAFVVLAIICMVHNMLPMWFSFLFIMVVILFSSVATALTQNGILAIANVFGSEYSQAVMLGQAVAGVLPSVVLFGISYIGDSTAAETGEQSQAGIIVYIITTAIVCGISTTLFKFTGIGGQFMAIMREESIDVDDNDEQIPFRVLFDKLRLLVLSILLTFVITLIFPVFASTVRSTGLGMKDEHYMPLIFTLWNLGDLYGRVLADLPYFQSPSFTPLKTFIYALLRFLHIPFFFYFSSRNDGHSVALDIGYMLLQFVFGLTNGHVISLSFMKVPQVLDNDLEKEAAGGFTNIFVSVGLALGSLVSYIFVFLIN

SEQ ID NO: 17203 - protein, 2174 aa, Physcomitrella patens subsp. patens
MASDPSVEQEAAKFLDKVGDEDKKDPKKLASKLYAVHHNPLSRFSLTCGKAFDIVVKQYNFAASTTVQGPVTTASAGNGTQCGGTSEDKKEVPSVSAPQLVQDNQSGHSAEEKKQCVQVNDGTTVSAVSQEDSPRVSVQAVGSVTAPTSVSGVVPPASSLLTSTAPKLHSDISNQEESVLSGEKSQVEQSSALSEKTSHSQQILPTNHLPNLSSGESEAVALPTSAAPPVSSASLISSVAPSSAVVPVIVTNADTSATSTSPIVDNSVGKGKKRKQPATKPEVEMTPRQTRRKTCNTDSVGPKSVDPPKTRGQAKAAQQTIADFGSKSPCPAVVTRTRARLLEKAVSNTATKKGEKTDDLDDPSSTTPSQSAGTSSTGAQISDVAVSSEKPDRAAATIADEGVNHVATASGGSAGALGTSPTVTVEGKLQEQISKDGSKSPGNEPHMVKQVGDGLVEALKVSSTSFTDDSLTSSAVDMQGSVQCTIISESAGGTGRDNFSGGDSQFTQPVLVSFKNSLVHENHPGSGNGASQNNEAFTIEQLNSSGQLAALSSSLPSVATSVAVVDKSSAGVKGGGQTPQQRKGKTTKNSHATGSSEVVAEAASSGKKNLKCPKKKSAEFSSLLKDSDQSMPPGNSSSSLGDVQPGLAAEAASAPVFSDYQLKQLRAQCLGIQGAKENADATGLAQPEEESWFYEAPRGGRRTKGDELGLEEKSGNVPELPSGLTSFNPEKVEVPATSSIDSMLAVGPPSLKPNEGSVHTDSMVLSYPPPTEGVCMKNQEQLQVQKPVDASILEGADEPAERILNSTTRREELNPAISEVKVLTNGAAVLEFGGCSTAEVSPGHVDSSSLTTPAENQDLDGQNVRAETSTDKHVTQQVVESCTGTTVSPEENNASSRELQSLTRDFQSVADSVRPSESDGNNAALMTDISPDNLPNTVRADGAAANAGGERAEVLAQATETHTEVSELRNIQLQKRTDDNIGAGLPRSLASQVSQEGQNSMISIPPSIGMKRFSDLHPVVQAQDPKSQPGIVANHAQLSELARKLEASKNPNLYKNQLFRVAHGDGIPGQPYLQAANAYNLSMRANATPPEDPSFMTPPQPKRRSGLYPTGTSNTSSPHQLPQVHQRNGALHANQMKQGFKLPERTPMSSSSEFHGNWRTPIEDGPAMNRMEVDIPQLNAPPTGPPKYTIMDKLTLYERKRKAIADQNWSFKQKKTEEHIAIRYHEVKETVRSTEDISIKTRSVIELKKLQLLQLQRQLRRDFLHDFFKPVMADMATLRTMKRNRAGRRLKQLEKLELKQKEERQRRNREKQREFCREVESHREKMDELSKRKAHRLLGFNRYVKEFHKKKERIYREKADKLQRDRINALKNNDVAGYLRMVQETKSDRVEKLLRETEGYLQKLGVKLQKQKELARLENDHSENNSVFEVAKQPDAKDNTQHYLESNENYYSLAHSVKEIVDEQPLTLEGGKLREYQLSGLRWLVSLYNNHLNGILADEMGLGKTVQVIALICYLMEAKNDHGPFLIVVPSSVLPNWLAELSRWAPRVSVIAYCGAPDERRRLYKEEIQPQQFNVLVTTYEFLMSKHDRPKLAKIPWHYIIIDEGHRIKNASCKLNAELKQYQSTHRLLLTGTPIQNNLEELWALLNFLLPSIFNSSDDFAQWFNKPFENVADPTAEEQALLTEEENLLIINRLHQVLRPFMLRRLKHKVENELPEKIERLVRCEASAYQKLLMKHVKDKMKSLNHAKGRSIQNTVMELRNICNHPYLSQLHSEETEKVLPPHYLPIVVRFCGKLEMLDRILPKLKAANHKVSLMTSRKGHSVLFFSTMTRLLDVMEDYLEWKGYKYLRLDGSTGGSERGALIQDFNAPQSEAFIFLLSIRAGGIGINLQAADTVIIFDTDWNPQVDLQAQARAHRIGQKRDVLVLRFETVKSIEEHVRASAEYKLGVANQSITAGFFDDNTSAEDRREYLESLLREPKKEEVALVLDDEALNDLLARSDAEIDIFEAVDKQRAQEEQIAFLDQDVLTTKSMPVYARWKQCVKVKLGCEPPPLPPRLIGESELGPIVKVLTNKLTKKPGSSKGGSSKGGAAEIQDYGRGKRAREIRSYGEQFSEREFEKLCQVDNSSSDDDDDEDVHPKPPPPPKKTEEGRGRGRPRKVKAESSIKNDMSKSAL

SEQ ID NO: 17204 - protein, 931 aa, Kluyveromyces lactis NRRL Y-1140
MNHYVNKPFKRPRMVGRPGRDTLSEQIHTGLRPKSHHSHTKITNTSSETVKLTYAGPKSLKTSVNAPVGVSKSSQEVSLFTANYRRVTNKKNKTWDGDGYANMTSDDKLKFYNEAGVSLGSVPIKDRDLYETIWRIGSTEFQIDYRISDQEELSSVQDICKIKVSHTLGITDIPVAKKHKATIESKPPIQTFIPKITTKFKPLRKHLNGEPKVPPAQKQLVDQPTVKSALPPLSQELIGQITYSPLFDPVSIKDPLIMNKTENHKVSVIVDPLLSKTLRPHQREGVKFLYDCVMNMVHTKGDESMILERDDDIKGCLLADEMGLGKTLMTITLIWTLLKQTPYPTIINQRGVTLAGEISKVLIVCPVTLIGNWKKEFKKWLPMNRIGVLTLHSRNSPTEDKAQVRSFLKVPRTYQVLIVGYEKLLSIKDELQNEKRNLDLVICDEGHRLKNKDSKILKVLQSLDIEKKIVLSGTPIQNDLEEFYTIIDFINPGILGSFGRFKREYILPIARSRDVNAKQNQTLVEQGLLRSDQLIEITKRFILRRTNEILQQYLPPRTDLIIFCKPTAEQVEAFHKILTEGQLNFSNMTFNSSLGLITLFKKICNSTRLIKTDPYYEERLSQVQTSSTSGKFTSGKLRILLSLLHELKTKTDEKVVVISNYTQTLDIIEGHCSSEGYTSARLDGSTATKTRDQIVTSFNNDPSIFVFLLSAKSGGVGLNLIGASRLVLFDNDWNPSIDLQAMSRIHRDGQRRPCFIYRLVTTGCIDEKILQRQLMKIALSKKFLDSATDQSKNDDDLFQQEELKDLFTINLSTLSNTHDLICNCSGEVEVLEEEEITGTDEANAQPEYQAAATPSNNPPASIWINALEAQKIIEKEEILRNGTKSEIMRKCLLGYKHIDPQKTNDLIDEAMNNVFDDARQYITYALVKDSV

SEQ ID NO: 17205 - protein, 112 aa, Arabidopsis thaliana
MADTPSSPAGDGGESGGSVREQDRYLPIANISRIMKKALPPNGKIGKDAKDTVQECVSEFISFITSEASDKCQKEKRKTVNGDDLLWAMATLGFEDYLEPLKIYLARYREVW

SEQ ID NO: 17206 - protein, 376 aa, Saccharum officinarum; identical to SEQ ID NO: 10291
  misc_feature (131)..(147): Xaa can be any naturally occurring amino acid

SEQ ID NO: 17207 - protein, 1004 aa, Oryza sativa Indica Group
MAAAGRDPLATPSSRMYYRRQRKASSEVNANVFVPGGQNGISFPASNRAHDWGYGGVREEWEASYARKLQLINFLSSLHQRTANSLITTRMDANMDTPLEQKQKDSSAIVVLDSDDEDEAERCEQLASENNKQQAPSGPTSPCTTWIVSSAKDQVNGTLHVDGVQSTQIVPYGQNAPLINQSPLQTSWQPSIQYERVILQRRPEEQRVQDLVAASHAEKIAETQVFLTLPTLPNERKRRKSEPTTLVDGDGGTNLGKGKRKNHQNQAAVDSILDLQQNVVPLQQNDVPSQSYRTMIEEEKPVKESDGLEDLWKDFSLAAECTKLDTNEDMSNEKDVDDENEMDDDCNHDIRIHEDLGHVCRICGMIVRKAETIIDYQWKKKNLLWGTFSLLKYFLKWESVFITNYIDIDTALEFIASRTRTNYYESRSKDADDIDTGAVKVSEDFIVSDIAIHPRHAKQMRPHQLEGFSFLVKNLVGDKPGGCILAHAPGSGKTFMLISFIQSFLAKYPSARPLVVLPKGILGTWKREFQRWQVEDILLYDFYSVKADKRTEQLEVLKSWEARMSILFLGYKQFSRIICGDGDGNIAAACRDRLLMVPNLLILDEGHTPRNRETDVLASLKRVQTPRKVVLSGTLFQNHVSEVFNILDLVRPKFLKMESSRPIARRIMSQVAISGIRSLKGVHDSAFTESVEDTLLNDDNFTRKAHVIRSLRELTKDVLHYYKGDILDELPGLVDFSVFLKLSTKQKEIVHKIEAYEKFKRSAVGTALYIHPCLSEISEGDAADRATNLTDATVDSLIESIIIKDGVKAKFFFNILSLANSAGEKLLAFSQYILPMKFLERLLVKRLGWHVGKEIFMISGDTSADDREVAMDQFNNSADAKVLFGSIKACGEGISLVGASRVIILDVHLNPSVTRQAIGRAFRPGQQKKVFVYRLVAADSPEVKFHETAFKKEVIPKLWFEWSELCTTEDFKLNQVHIDDSEDELLEANAIRQDIKALYRRVWQ

SEQ ID NO: 17208 - protein, 182 aa, Marinobacter sp. ELB17
MFRWPISVALVLLWGAAPVVADETAGCPAFLDHDLPKLHSSESVNLCELAAGKPMLVVNTASFCGFTNQFKGLEQLHQRYGKEGLVVVGFASNDFRQEADTEEEAATICFKNFGVTFTMIAPGPVTGAGATPVFAHINQQSQPPRWNFTKYLLNDRGEVVESFPSSVRPGDKQVTQAVESVL

SEQ ID NO: 17209 - protein, 332 aa, Schizachyrium scoparium; identical to SEQ ID NO: 10297

SEQ ID NO: 17210 - protein, 1168 aa, Arabidopsis thaliana; identical to SEQ ID NO: 10300

SEQ ID NO: 17211 - protein, 124 aa, Glycine max
MCKGAEGEKQHGFCSSFLHKESATRSAICCELCGLQASLYCQADDAYLCKKCDKRVHEANFLALRHIRCFLCNTCQNLTRRYLMGASLEVVLPANINWTIRNLLNNRGIYRKCSRMHNSPSLFL

SEQ ID NO: 17212 - protein, 517 aa, Triticum monococcum
MGSLHVSSNATQHSKLERAYQLLVFHVHPFWLQLLYFVSISFFGFVILKALPMKTSTVPRPMDLDLIFMSVSATTVSSMVAVEMESFSNPQLLLLTLLMLLGGEVFTSMLGLHFTYVKSKKKEAQAPHDHDDGDKGKPAPSCSLKLAATTCMDDVDRVEQGFKDQPRYDRAFLTRLLLFIVLGYHVVVHLAGYSLMLVYLSVVSGAGAVLTGKGISLHTFSVFTVVSTFANCGFVPNNEGMVAFRSFPGLLLLVMPHVLLGNTLFPVFLRLAIWALRRVTRRPELGELRSTGYDHLLTSRHTWFLAFTVAAFMLAQLSLFCAMEWGSDGLNGLTAAQKLVAALFMSVNSRHTGEMVVDISTVSSAVVVLYVVMMYLPPYTTFLPVEDDSDQQVGADQHDHKRITSICHKLLMSPLSCLAIFIAVVCITERRQISDDPLNFNVLNITVEVISAYGNVGFSTGYSCGRQVTPDDGDCRDTWVGFSGKWSWQGKLALIAVMFYGRLKKFSIHGGQAWRII

SEQ ID NO: 17213 - protein, 376 aa, Tripsacum dactyloides; identical to SEQ ID NO: 10303

SEQ ID NO: 17214 - protein, 168 aa, Populus trichocarpa
MASQSSAQSVHDFTVKDARENDVDLSIYKGKVLLIVNVASQCGLTNSNYTELTQLYDKYRDQGLEILAFPCNQFGSQEPGNNEQIVEFACTRFKADYPIFDKVDVNGKNAAPIYKFLKSSKGGLFGDSIKWNFSKFLVDKDGKVVDRYAPTTSPLSIEKDVKKLLGIA

SEQ ID NO: 17215 - protein, 1592 aa, Magnaporthe grisea 70-15
MEERDDDPFNFDTERLVKELCTDNRSWKPSQPEKCPNRVLLEAKIRESEADGEFLIWESEESGSFKDVYDQFEIKKVPHKRFIRQAAEHFRKRSRKYKQKLAELRGKDPAEDDLPAELPAFAQATAATVAPEPAQKKRRIAPTQLSETPVHAEPVRILTEADVIKHADASSINRKVATVKLSKCRNAPRYQYYSAAPITSSHFEPDLDDDDREFQFASGTYDNLPGHSLAISRGIQRYFGVRLKTETTLPQDEEHPLFGESGSEAGYDSDTMQEIEAEKTERAHASQQSQTERREDVAEALRAVLSDLEVQWRTEKLPKLNAKANKIWNEARSRRSSRINMIEKAKITSHHLQARLAKMCTQIEEDPNFRSKDVVTVRQAFENTVYEKLETEWRADLLSRTSEPERVVTRRVRREKAPRVVLEDGVEGDVLTSDSDSDGFIVEDAMENAPQGKEEKEEETSAAGEHEADSAPSPIDLTLDTPKKPRDDSSASDISDEEPSPSKKRRVKRDKAAQDMRDLDRRRMEEQEERSRELRAQLAKSDMSGLQSRLIINEAKKASQGFIYVPEPIAQNIKDHQIEGVRFMWNQVVNDDRSQGCLLAHTMGLGKTVQVICLLVAIQHAAQSPDPSVVSQIPKELQRSQTLVLCPPGLLNNWLDEFSRWVEPYDALGRIYKIDSEIPAEARAASIEPWVNTGGILLMGYSLFRSLVSSGDSKMQTWLTELPSIVVADEAHTIKNERSKISEAMANFKAKAKIAMTGSPLANSVGDYFSMINWVAPNYLGPRKEFTHFFASPIQEGLFVDSSPAEKRRAMKLLKALKDTVSPKVHRMTTTALRGQLPEKREYVIVVPLTEYQKSAYEVYMRWVATRADATTVSLLGYICQLSTLLVHPRIFLQYFVELANEYDKDVRKSDSGREIPRHVIGNLIAEVNRRDIHNLDHSYKITVLTRILDEAKRVGDKVLIFSSRIPVLNFLENLMKMQKRPYSRLDGETKISTRQASVANFNANNDEVYLISTNAGGVGLNIQGANRVVMMDFQWQPANEQQAIGRAYRIGQTKPVYVYWLIVGGTYEPKLHAAAIFKTQLASRVVDKKNPNPHAPKVKTWMQPPEIVKREEATLVKVRGSDPEVLDHILDSPTSGQICKIMIGDIFEQEEPDHQLSPEELKEAVDLVKMNRLRITNPEEYNRLMQPALVPAHPFPGPLNIAAVHPHGHAPMALNSQQVTGLREQGGGDVGMKPRTPSKMHLPRTSTSTTSYLPHEAGPGYPLPLPKANTEVMGQGPTTTEAGSEQVPPIPGAGTFTKPQPQERGPIKTGALGTDWGDRFLQEALKTMWGTSLMTRDLYKLAIQVQRAIEAKNLSGLPGLNSLRLLLLAFQDETILECVLSGQLQIDRLVTAKKAEFDAQLAKAKGEAPSQDGPGSNTLPVPQPTASITSGLGLIPTQARVLNATASPSPVLPPTTEKSSSGSHSTDSIRGSISGPKSPGSTAQNPLTNPVRPSQSNPGSSTKQSRPNRTGLNPHAQTPSQATQEILDRKAKKKKKKKLKLKTETEREPRLPEWANKVSGGMASESTNRDTRSSLSRLGDSKDTPMVLDDD

SEQ ID NO: 17216 - protein, 376 aa, Tristachya superba; identical to SEQ ID NO: 10310

SEQ ID NO: 17217 - protein, 544 aa, Porphyromonas gingivalis W83
MKRSSGSGSTLSYILIAAIFSAVGALASHFYFTHKNPSDLNEVLNLIDRNYVDSVDVRKLQHNMIPYLLEQLDPHSVFLSKADNAEEAATLSGGFCGIGVSFNTLLDTIVVTQIVPGGPSDRAGIRAGDRLLQAGSQKLYGKGVDMNTIDDVLRGEKGSVVNILIRRNGKESVHRVVRDDVPLPSLNAFYLIEPSIAYVRIDSWTGTTHAEFIEALGRLRKKGATSLILDLRENRGGLLEPAIAMANEFLGKNLPILQIEGKAYPREEISSDGKGILQQIPLVVLVDEFSASSSEVFTGAMQDHDRAQIIGRRTFGKGLVQLPFDLADGSAIRLTVARYYTPSGRSIQKPYSSGVDENYYQDLRNRFNHGELYSADSIPSLGGKIFKTAGGREVYGGGGIIPDIFIPLDTAGLNSYMMKVEDSDLIPRYAFLYSDANRVSLSRFKTVEELGAYLDRTYLIFDFASFAQRYGIPMRTSLINEARNRIKKYINAYIAMNFFDLQGYYQLLLHDDPFILQAISLIKEGKTFPLIYDQKGTQSTDPAA

SEQ ID NO: 17218 - protein, 376 aa, Urochloa mutica; identical to SEQ ID NO: 10315

SEQ ID NO: 17219 - protein, 216 aa, Arachis hypogaea
MLCSSTRILFGRGIRRVVPPLSSSINYLINPKAKTLSLSRPYQRHHHISFFKSIPTLTPTPTPLRFSLKTDHTMASQSSPPKSVHDFTVKDARGNDVNLGNYKGKVLLIVNVASQCGLTNSNYTELSQLYEKYRAKGLEILAFPCNQFGAQEPGTNEQIVEFACTRFKAEYPIFDKVDVNGNDAAPLYKYLKSSKGGLFGDNIKWNFSKFLVDKEG

SEQ ID NO: 17220 - protein, 545 aa, Xanthomonas axonopodis pv. citri str. 306
MHSIDVVLAMLLAVAASGYLIRILPFSLPLPLVQIALGAVVSGVFDAGHELEPELFFLLFLPPLLFLDGWRIPKQGLFRDKAAILELALGLVIFTVIGAGFFIHWLIPAMPLAVAFALAAIISPTDPVAVSSIASKVPIPKRLMHILEGESLLNDASGLVCFQFAVAAVLTGTFSVAAASLTFLWVALAGLALGVATTFGLSRIQAWIWRHFGEEPGSAILVNLLTPFAAYLLAEAFHASGILAAVAAGVTMSYVEMAGNAPGNMRLQRSAVWDTVQFTFNGIIFVLLGEQLPGILDGAVRSVQEAGHLNPWWLAVYVATISASLMALRFVWVFLSLRWNIFKAQRRGEAHVSPPWRIVVAVSLAGVRGAITLAGVLTLPLMLEDGSPFPARQLAIFLAASVILVSLLVASVALPRLLRGLELPEEEDEQLKEDLAVKAASQAALEAVEKLRQRLVDGSKHAERYNAAANQVSQRYQRKLGAVDMAETDPEEAVAYEKALRQFRHAALVAERNELFKLARRREISDDLSRRLVRNLDLIESRKRA

SEQ ID NO: 17221 - protein, 468 aa, Thiomicrospira crunogena XCL-2
MSQEIFDLIKDNDVKWVDLRFTDTHGKEQHVTIPADSVDEDFFADGETFDGSSIQGWKGIHNSDMLLMPQTDGFYLDPFTNDPTMIIRCMIVEPSTMEAYEKDPRGIAKNAEAYLASTGIADSAFFGPEPEFFIFDDVRWGADMSGCFVKIDGNEAAWNSEKVFEGGNIGHRPKVKGGYFPVPPVDQLHEVRADICAMAEAMGLKLEAHHHEVASGGQCELAVAGNTLTAKADEVQILKYAVHNTCQALGKTATFMPKPIVGDNGSGMHINQSLSKNGKNIFAGDVYAGLSQEALWYIGGLMKHARALNAFTNPGTNSYKRLVPGFEAPILLAYSGSNRSASIRIPYAPSERSRRVELRFPDPTANPYLAFAASLMAGLDGIINKIDPGEPAEKDLYDLPPEEEATYKTVCASLEEALASLDADRDFLKAGGVFTDEAIDSYINLKMEEVTRMRATTHPIEFDMYYSS

SEQ ID NO: 17222 - protein, 174 aa, Glycine max
MSDAPASPSHESGGEQSPRGSLSGAAREQDRYLPIANISRIMKKALPPNGKIAKDAKDTMQECVSEFISFITSEASEKCQKEKRKTINGDDLLWAMATLGFEDYIEPLKVYLARYREAEGDTKGSARSGDGSATPDQVGLAGQNSQLVHQGSLNYIGLQVQPQHLVMPSMQSHE

SEQ ID NO: 17223 - protein, 596 aa, Hyobanche glabrata; identical to SEQ ID NO: 10316

SEQ ID NO: 17224 - protein, 618 aa, Hyobanche rubra; identical to SEQ ID NO: 10317

SEQ ID NO: 17225 - protein, 518 aa, Triticum aestivum
MGSLHVSCSTTQHSKLQRVYQLLFFHVHPFWLHFLYFVTISFLGFVILKALPMKTSMVSRPIDLDLIFTSVSATTVSSMVAVEMESFSNPQLLLLTILMLLGGEVFTSMLGLYFTYIKSKKKEAPHDHGDGGGKVEPAPSSLELPATTFMDDSTAQNQMEQGFNKEQPRYGRAFLTRLLLFIVLGYHVVVHLAGYSLMLLYLSVVSGARAVLAGKGISLHTFSVFTVVSTFANGGFVPNNEGMVVFRSFPGLLLLVMPHVLLGNTLFPVFLRLAIWALRRVTRRPELGQLQSIGYGHLLTSRHTCFLAFTVATFVLAQLSLFCAMEWGSNGLHGLTAAQKLVAALFMSVNSRHTGEMVVDLSTMSSAVVVLYVVMMYLPPYTTFLPVEDDSDQQVGADQHHQKRVTSIWRKLLMSPLSFLAIFIAVVCITERRQISDDPLNFNVLNITVEVISAYGNVGFSTGYSCARQVTADGGCRDTWVGFSGKWSWQGKLVLIAVMFYGRLKKFGMHGGEAWRIV

SEQ ID NO: 17226 - protein, 417 aa, Oryza sativa Indica Group
MEGGGAKDGSAAAAQTRGSGDDGSHKPLPPCCLKAKAAAAESEAKCHATVVSGWFTEPRSHSGKTSKVQYFNNPMWPGEAHSLKVENILYQGKSPYQEILVFESSTYGNVLVLDGIVQLTEKDECAYQEMVTHLPLCSIPSPKSVLVVGGGDGGVLREIARHASVENIDICEIDQLVIDVCKDFFPQLSVGFKDPRVQLHVGDAVDFLRNAPEGKYDAIIVDSSDPIGEILLLLNHHMFQFCAPFVFVPHEDPSHIIGPAQELVEKPFFQTIARALKPGGVLCNQAESMWLHTHLIQDMLSICRETFKGAVHYAWTSVPTYPSGVIGFLLCAKEGPAVNFLSPVNPIEKLEGAMEAGREIRFYNSEVHRAAFVLPTFVRRELESHNTCAEKDKSETKPVAKPKKMKIMPNSAIPTAS

SEQ ID NO: 17227 - protein, 594 aa, Hyobanche sanguinea; identical to SEQ ID NO: 10318

SEQ ID NO: 17228 - protein, 608 aa, Lamium purpureum; identical to SEQ ID NO: 10321

SEQ ID NO: 17229 - protein, 180 aa, Escherichia coli O55:H7
GIQLTFADVNQVVLDALNARHSYQVHVVGETEQVDTVSGVDAVSSIGDDVVDLIAQVDLVTTAVGPVVLERIAPAIAKGLVKRKEQGNESPLNIIACENMVRGTTQLKGHVMNALPEDAKAWVEEHVGFVDSAVDRIVPPSASATNDPLEVTVETFSEWIVDKTQFKGALPNIPGMELTD

SEQ ID NO: 17230 - protein, 626 aa, Chlamydia trachomatis
MSEKRKSNKIIGIDLGTTNSCVSVMEGGQPKVIASSEGTRTTPSIVAFKGGETLVGIPAKRQAVTNPEKTLASTKRFIGRKFSEVESEIKTVPYKVAPNSKGDAVFDVEQKLYTPEEIGAQILMKMKETAEAYLGETVTEAVITVPAYFNDSQRASTKDAGRIAGLDVKRIIPEPTAAALAYGIDKEGDKKIAVFDLGGGTFDISILEIGDGVFEVLSTNGDTHLGGDDFDGVIINWMLDEFKKQEGIDLSKDNMALQRLKDAAEKAKIELSGVSSTEINQPFITIDANGPKHLALTLTRAQFEHLASSLIERTKQPCAQALKDAKLSASDIDDVLLVGGMSRMPAVQAVVKEIFGKEPNKGVNPDEVVAIGAAIQGGVLGGEVKDVLLLDVIPLSLGIETLGGVMTPLVERNTTIPTQKKQIFSTAADNQPAVTIVVLQGERPMAKDNKEIGRFDLTDIPPAPRGHPQIEVTFDIDANGILHVSAKDAASGREQKIRIEASSGLKEDEIQQMIRDAELHKEEDKQRKEASDVKNEADGMIFRAEKAVKDYHDKIPAELVKEIEEHIEKVRQAIKEDASTTAIKAASDELSTRMQKIGEAMQAQSASAAASSAANAQGGPNINSED

SEQ ID NO: 17231 - protein, 223 aa, Gibberella zeae PH-1
MASDTVFVLPGDSIDPSLIPSHPKKPLRLGPGLRHVPPNDIIPTLAGQLVTDRQKNAIRVENARGRYTPRVGELVIGTIQRSAADFFFVTLSDYTAPAQLPQLSFEGATKKTRPQLAAGALVYARKSEGLGPLAGGMLYNVSLGMARRLMMPKSVQEGRVVVLEELGNAGLQFETATGRNGKFWVDSENVKTVIAVGRAVQETDEKNLDVEDQKKLIPENEHV

SEQ ID NO: 17232 - protein, 1507 aa, Arabidopsis thaliana; identical to SEQ ID NO: 12998

SEQ ID NO: 17233 - protein, 183 aa, Salmonella enterica subsp. enterica serovar Typhi str. CT18
MQNSLLNTHVTTIDGEVTTLEKYAGKVLLIVNVASRCGLTPQYEQLENIQKAWADQGFVVLGFPCNQFMGQEPGSEEEIKTYCASTWGVTFPMFSKIDVNGDARHPLYQKLIAAAPTAVAPEKSGFYERMVSKGRTPLYPDDILWNFEKFLVGRDGQVVQRFSPDMTPEDPIVMESIKIALAK

SEQ ID NO: 17234 - protein, 682 aa, Listeria innocua Clip11262
MEIFLYVLALLVAIFISNLLNRFVPFVSVPLIQIGLGVIIAIMPITFDLQLNPELFLVMFIAPLLFNDGRQTDKAALWGMRMPILVLALGLVFATVVVIGYFVHWMIPTVPLAAAFALAAALAPTDAVAVSSLSGRINLPKRIMNLLEGEALINDASGLVAFQFAIAAMVTGVFSLMDASISFFIIAIGGILVGLVLSWLKFRLLKWVRGLGMEDVTFHMLIQILTPFIIYLAAEELHVSGILAVVAAGIMHSMEQKKMDPQLVKLNVVSQSTWSVIIFVLNGLVFLLLGTQLPAITEVVWNDSGSSNLQVIAYILSITAALILLRFLWVYISWSIGAKQRQKQNKKTQLPKFRPVVLTSLSGVRGAVTLASALAIPFFLDDGSLFPQRSLIIFIASGVILCTLVIATFILPLLAKSEEVTTEDERAEIATRIRILRNVIRELKEQTLPETKAATDEVIEDYRRRIYDLQQNNISNRGMDERERAKRLEIIQWERENTQKMTDEGRIVATDSYRYQHYLNMMEQAIKQRFRTKIKTAWMFLYRLIMLIIHPKKWRRITHKVKKGISKDSERFQAIRQLREENEILIISKLKEQLTKENADIIGPLITEHTIFLERVRKEHSPRGKRAKFEQKKREVQVVAFQLERDIIQNMFEKGGISRELARDLRQNLNMIETYLYDDFLE

SEQ ID NO: 17235 - protein, 458 aa, Rhodopseudomonas palustris CGA009
MMRKTSVILLSAVTGAALTLFVTQPRTMLMGATARAATSDTYRQLNLFGDVFERVRSDYVEKPDDSKLVESAISGMLAGLDPHSSYMDAKSFRDMQVQTRGEFGGLGIEVTMEDGLIKVVSPIDDTPASKAGILANDIITNLDDEAVQGLTLNQAVEKMRGPVNTKIRLKIVRKGQDNPIEVTLVRDNIRVRSVRARVEDSDIGYIRITTFNEQTTEGLKKEIANLTNQIGADKLKGFILDLRNNPGGLLEEAVTVSDAFLDRGEIVSTRGRNAEETQRRSAHAGDLTKGKPVIVLINGGSASASEIVAGALQDHKRATVVGTRSFGKGSVQTIIPLGSGNGALRLTTARYYTPSGKSIQAKGITPDIEVMQDVPADLKARTDTKGEASLRGHLKGADGDEKTGSQSYVPPEAKDDKALKAAADLLHGIKVNASAPADKQTTGDKAAIDKPAGNKAAN

SEQ ID NO: 17236 - protein, 270 aa, Candida albicans SC5314
MSDTIILPGDKLPIDEDIFTVKTTIGPGIYKKPKTQELIPSAAGILHYERAKSSSQQLIYIESNSKRYIPHTNDYVIGIITGAIGESYKVSLQSNSTPVLLSFWAFPNASKKNRPNLKNGQAVYARVSQDIPEIETELECIDPTSGKEGGFGVLDESGYIFDVHLNFARELLFNPKTIFLETLATRCQFEIAIGINGKIWIKCGNGVKKEANDGSNNNQDQGEDQEMIDVSEENLKDLKSTLAAATFLTLCQFVTQDKLKQELNNAFQGI

SEQ ID NO: 17237 - protein, 304 aa, Antirrhinum majus
MQSKSKSVSQGESNLYNVANSTVCSEPWWSNTGYNSFSPAMMRGNASDSSSLEHSVDGQSQSEGTRNEEADDTAKHSPSTIHLQPGSDRNYRQEGSSLQQVPPTLHPINDGSLTQPPQLELTGHSIACASNPYDTYYGGMMAAYGQPLVPSHLYEMHQTRMPLPLEMAQEPVYVNAKQYHGILRRRQSRAKAELEKKLIKVRKPYLHESRHQHALRRERGSGGRFAKKTDAETPKGSSGSEPVQSESNGSNMREAQDLYNNDAGNFRKQSNLQEIQPRPSKKGDRPNSSQQWTNVPSNHALAMQ

SEQ ID NO: 17238 - protein, 183 aa, Pseudomonas putida GB-1
MRAHWLTVPVLALLASTSSWAADCPALLQGSLPELRGKGQVELCERFAGKPLVVVNTASYCGFAPQFEGLEATYKEYHGQGLEMLGVPSNDFKQEDADSEKTAKVCYANYGVTFTMTKTQAVRGKDAIPLFAELASQSSAPKWNFYKYVVDRKGKVIGNFSSLTKPDDPAFRAAIEKAIASQP

SEQ ID NO: 17239 - protein, 622 aa, Streptomyces avermitilis MA-4680
MARAVGIDLGTTNSVVSVLEGGEPTVITNAEGARTTPSVVAFAKNGEVLVGEVAKRQAVTNVDRTVRSVKRHMGTDWKINLDGKDFNPQQMSAFILQKLKRDAEAYLGEKVTDAVITVPAYFNDSERQATKEAGEIAGLNVLRIVNEPTAAALAYGLDKDDQTILVFDLGGGTFDVSLLEIGDGVVEVKATNGDNHLGGDDWDQRVVDYLVQQFKAGHGVDLAKDKMALQRLREAAEKAKIELSSSTETSINLPYITASAEGPLHLDEKLTRAQFQQLTADLLERCKTPFHNVIKDAGINLSEIDHVVLVGGSTRMPAVAELVKELTGGQDANKGVNPDEVVAIGAALQAGVLKGEVKDVLLLDVTPLSLGIETKGGIMTKLIERNTTIPTKRSEIFTTAEDNQPSVQIQVYQGEREIAAYNKKLGMFELTGLPPAPRGVPQIEVAFDIDANGIMHVTAKDLGTGKEQKMTVTGGSSLPKDEVDRMRQEAEQYADEDHRRREAAETRNQGEQLVYQTEKFLKDNEDKVPGEVKTEVEASIEELKAALKGESAEGDNTAEIRTATEKVAAVSQKLGQAMYADAQAAQAAGGAEGAAGGEHAKAADDDVVDAEIVDEDRKDGAA

SEQ ID NO: 17240 - protein, 518 aa, Triticum turgidum subsp. durum; identical to SEQ ID NO: 17225

SEQ ID NO: 17241 - protein, 228 aa, uncultured cyanobacterium
HEVAGAGQHELGMKFAQLIEAADNVMIYKYVVRNVAKKYGKRPPFMPKPVFNDNGTGMHVHQSLWKGGEPLFFGEGTYANLSQTARWYIGGILKHAPAFLAFTNPTTNSYKRLVPGFEAPVNLVYSEGNRSAAVRIPLTGPSPKAKRLEFRSGDALANPYLAFSAMMMAGLDGIKNQIDPGDGEDRDLFELSAEELQKIATVPPSLNGALEALSADRAFLTEGGVFTD

SEQ ID NO: 17242 - protein, 482 aa, Thermus thermophilus HB8
MPTLKELFALFGKEAPEVPVRGLTLDSRRVEPGFVFVAVPGVPLPHRKPLDGHDFVPEALARGAVAVVGERPLALPVPYLQVADGRQALALLARRFHGEPDRKLLLVGVTGSKGKSTTASLLHHLLKRAQGGSALLSTVGLRLGEEARPPVGHFTTPEAPEVYAFLREAADRGLKSAVLEVSSHALALKRVEGLTFRVGVFVNFYPDDHLDFHGTAEAYFRAKALLVERSDLAVLARSLPHFPRLAQRPHLSFGEGGEVYAEGLRETPEGLAFRLHTPWGSGEAFLPLLGAYNLENALAASAAALALGVGLEAVLEGLATFPGVPGRMEVVLKAPFRVVIDFAHTGKSLEAALKTLRPTTPGRLLLVVGAAGERDPQRRVDIGRVAARLADKTFFTEEDHRGEDLFAILEAMAQAARAEGGVYELVPDREEAILKAILEARPGDTVLLAGKGHEATLERGQVALPWNEREAALKALRARGLP

SEQ ID NO: 17243 - protein, 508 aa, Neisseria meningitidis FAM18
MNPMYITFAIYLVAVLLIGLAAYFSTRNFDDYILGGRSLGPFVTAMSAGASDMSGWLLMGLPGAIYLSGLNEAWIAIGLLVGAYFNWLLVAGRLRVHTEYANNALTLPDYFFHRFGAGGHLMKVVSALIILFFFTIYCASGIVAGATLFQSLFEGMTYNQAMWLGAGATIAYTFLGGFLAVSWTDTLQASLMIFALILTPVMVYLGLGGAEQMSAAIQSVAAGTGKEYGSLFAGTTVIGIISTAAWGLGYFGQPHILARFMAAESAKSLVSARRIGMTWMALCLAGAVAVGYFGIAYFGANPDKVSSMSGNHERIFIALSTLLFNPWIAGIILSAILAAVMSTLSCQLLVCSSAITEDFYKGFLRKNAQQSELVWVGRLMVLAIAVISILIASDPNSKVLGLVSYAWAGFGAAFGPIVILSVLWKRITAYGALSGMVAGALTVVVWAEWVKKPAQAAGESGLLTMYEIVPGFIVCLIVAVLVSLFNKEPSRETQERFEKADADYRAAR

SEQ ID NO: 17244 - protein, 514 aa, Triticum turgidum subsp. durum; identical to SEQ ID NO: 11998

SEQ ID NO: 17245 - protein, 1151 aa, Arabidopsis thaliana
MSLFHVLGFGVKIGHLFWMLCCWFVSWFVDNGIEDKSGLLVGSVGDLEKTKMTTLKKKNKMWFWNKISSSGLKIPSFSYQFLGSVKFNKAWWRKLVVVWVVFWVLVSIWTFWYFSSQAMEKRKETLASMCDERARMLQDQFNVSMNHVQAMSILISTFHHGKIPSAIDQRTFSEYTDRTSFERPLTSGVAYAMRVLHSEREEFERQQGWTIRKMYSLEQNPVHKDDYDLEALEPSPVQEEYAPVIFAQDTVSHVVSLDMLSGKEDRENVLRARSSGKGVLTAPFPLIKTNRLGVILTFAVYKRDLPSNATPKERIEATNGYLGGVFDIESLVENLLQQLASKQTILVNVYDITNHSQPISMYGTNVSADGLERVSPLIFGDPLRKHEMRCRFKQKPPWPVLSMVTSFGILVIALLVAHIIHATVSRIHKVEEDCDKMKQLKKKAEAADVAKSQFLATVSHEIRTPMNGVLGMLHMLMDTELDVTQQDYVRTAQASGKALVSLINEVLDQAKIESGKLELEEVRFDLRGILDDVLSLFSSKSQQKGVELAVYISDRVPDMLIGDPGRFRQILTNLMGNSIKFTEKGHIFVTVHLVDELFESIDGETASSPESTLSGLPVADRQRSWENFKAFSSNGHRSFEPSPPDINLIVSVEDTGVGIPVEAQSRIFTPFMQVGPSISRTHGGTGIGLSISKCLVGLMKGEIGFSSTPKVGSTFTFTAVFSNGMQPAERKNDNNQPIFSEFRGMKAVVVDHRPARAKVSWYHFQRLGIRVEVVPRVEQALHYLKIGTTTVNMILIEQEIWNREADDFIKKLQKDPLFLSPKLILLANSVESSISEALCTGIDPPIVIVKPLRASMLAATLQRGLGIGIREPPQHKGPPALILRNLLLGRKILIVDDNNVNLRVAAGALKKYGADVVCAESGIKAISLLKPPHEFDACFMDIQMPEMDGFEATRRIRDMEEEMNKRIKNGEALIVENGNKTSWHLPVLAMTADVIQATHEECLNRAAVQGSFSLFQFAFRYRIIRGDGAGRRTAKETQKLVSPMHLEVVEKQIDDCKKSVYRKADESSSWNIFRVALDREESIITTSKRLADRKIEKFDKNILKRGFVPETTTKKGKDYPVGPILLGFFVFVVIGSSLFQIIRTATSGGMA

SEQ ID NO: 17246 - protein, 177 aa, Triticum aestivum
  misc_feature (21)..(21): Xaa can be any naturally occurring amino acid
NSPEGTYDAIIVDSSDPIGPXAQELVEKPFFETIARALRPGGVLCNQAESMWLHTHLIQDMLSICCETFKGSVHYAWASVPTYPSGAIGFLLCAKEGRPVNFLAPINPIEKIEGAMTAGRDIRFYNTEMHRAAFVLPTFAKRELEAYSCSTIGAQQEEKSAEPAKVAVAPHSEILTA

SEQ ID NO: 17247 - protein, 539 aa, Kineococcus radiotolerans SRS30216
MSTHVLLVVTTVVVALAPALARRAHLPAPSVLFLLGCALAVLPSGGQVHLEPEFVLLVLLPVILYWEGYTTSVQHAWRYRRAILLTAVPLVIATAAVVAVTAHALGLSWTAAWILGAVVAPTDASAVAAYSRALPLRLTTILRGESLINDGTALVLLGIAVSAAGGADVSLASASGELAWSYAGGTAVGALVAAAGLLAVRRVRDPLVLAAVSVAEPFAASVLAETVHASGVVAVVVCALGISRAARRAVPAAGRLQVHAFWETTSWLVNGALFVLVGLEARAVFDSPGVDGGRALQLVGQGLLLAAVIVAVRVAWLFLTAWLVRLLDRRPAQRELRVPWRLRVVAAWSGMRGGVSLAAALSVPVSVGETPFPGREAVLVLTFVVVGATLLVQGATLPAVIRWAHAHDSRDEETAALTAAVSTLGRAAEEHLRLHAEHHPGDRAVVEHLRRHLHPSRTGAGEQIHPERLRQLRRSTLARQREVLAAMVRGGGLEDTQLWRLQERLDLDEALLLAEDDLPSPAAGPPAQRTTLGASGVPR

SEQ ID NO: 17248 - protein, 293 aa, Triticum turgidum subsp. durum
MGSLLHVSSSATQHSKLHRAYQLLFFHVHPFWLQLLYFVSISSFGFVILKALPMKTGMPMDLDLIFTSVSATTVSSMVAVEMESFSNPQLLLLTLLMLLGGEVFTSMLGLHFTYLKSKKKEAQAPHEHDDADKGKPAPSSSLQLTATTCMDDVDRVEQGFKDQPRYDRAFLTRLLMFIVLGYHVVVHLAGYSLMLVYLSVVSGARAVLAGKGISLHTFSAFTVVSTFANGGFAPNNEGMVAFRSFPGLLLLVMPHVLLGNTLFPVFLSSAVAPYVRGPHPGDVCCLFRHATTP

SEQ ID NO: 17249 - protein, 634 aa, Gluconobacter oxydans 621H
MSKVIGIDLGTTNSCVAVREGDETKVIENSEGARTTPSMVAFTDNGERLVGQAAKRQAVTNPANTLYAVKRLIGRRYDDPTVQKDKEMVPYAIVRGDNGDAWVEARGEKYAPSQIAAYVLGKMKETAESYLGETVSQAVITVPAYFNDAQRQATRDAGKIAGLEVLRIINEPTAAALAYGLGKRDSGTVAVYDLGGGTFDVSILEISDGVIEVKSTNGDTFLGGEDFDNRIIGFLADEFKKDQGIDLRGDKLALQRLKEAAEKAKIELSSSKETEINLPFITADASGPKHLVVKLSRAKLESLVDDLIQRTLGPCRAAIKDASVSANEIDEVILVGGMTRMPKVIETVKEFFGKDPARNVNPDEVVAIGAAVQGAVLKGDVKDVLLLDVTPLSLGIETLGGVFTRLIDRNTTIPTKKSQTFSTAEDNQNAVTIKVYQGEREMAADNKLLGNFDLQGIAPAPRGVPQIEVTFDIDANGIVNVSAKDKATNKEQQIKIQASGGLSDADIDRMVKDAEANASADKAKRELVELRNSTESLIHQTEKSITEGGDKVPAADKSEAEAAIAEAREALGGENLDTLKAASEKLTQAAMKVGQGVYQAGQGAEGGAAPEGEKKDENVVDADFEDLEDDSKKH

SEQ ID NO: 17250 - protein, 635 aa, Vibrio cholerae
MGKIIGIDLGTTNSCVAVLDGDKPRVIENAEGERTTPSVIAYTDGVSLVGQPAKRQAVTNPQNTLFAIKRLIGRRFEDEEVQRDIKIMPYKIVKADNGDAWVEAKGQKMAAPQVSAEVLKKMKKTAEDFLGEPVTAAVITVPAYFNDAQRPATKDACRIAGLEVKRIINEPTAAALAYGLDKPGGDRTIAVYDLGGGTFDISIIEIDEVEGEKTFEVLSTNGDTHLGGEDFDNRMINHLVDEFKKDQGIDLRNDPLAMQRLKEAAEKAKIELSSAQQTDVNLPYITADATGPKHMNIKVTRAKLEALVEDLVQRSLEPLKVALADADLSVNDITDVILVGGQTRMPMVQKKVAEFFGKEPRKDVNPEEAVAVGAAVQGGVLAGEVKDVLLQDVTLLFLGIETMGGVMTKFIEKNTTIPTKANQVFSTAEDNQSAVTIHVLQGERKQAMYNKSLGQFNLEGINPAPRGMPQIEVIFDLDADGILHVSAKDKQTGKEQKITIQASGGLSDAEIEKMVQEAEANKEADKKFEELATARNQADQMIHATRKQITEAGERLPADEKAKIETAINELETAKKGEDKAEIDAKVQALMAAAQKLMEIAQQQAQAQGANAGQSSAKEDDVVDAEFEEVNDDKK

SEQ ID NO: 17251 - protein, 280 aa, Aquifex aeolicus VF5
MRDIVFIERDPYAPIRHCYTVSKILYQGKSPYQEIQVIESPEFGRMLILDGVVQLDEKYEFLYHEYLAHVPLHAHPNPRNVLIIGGGDGGTLREVLKHDIVERAVLVDIDKEVIEVSKKYLPTLSVGFQDPRAIVVNEDGYKYVQDYENEFDVIIVDSTDPVGFAHVLTTEDFFRHVYKALKEDGIFVAQTESIHYHLEMVSNIQQRLKKVFPIVDLYTSVIPIYAGYWWTFSIASKKYPVRTPAREVKVQTKIYDADMHEYAFLPESFYNKIVNGEYKY

SEQ ID NO: 17252 - protein, 469 aa, Xanthomonas axonopodis pv. citri str. 306
MSVENVEKLIKDNKVEFVDLRFVDMRGVQQHITFPVNIIEPALFEEGKMFDGSSIAGWKGINESDMVLLPDAGTAYLDPFFADPTIVLTCDILDPATMQSYERDPRGIAKRAEAYLKSSGTADQAFFGPEPEFFIFDSVRFANDMGHTFFQVGSEEAAWNTGEKYDGGNSGYRPGVKGGYFPVPPTDSLHDLRAEMIKTLEQVGIETEVHHHEVATAGQCEIGTKFSSLVQKADELLTMKYIIKNVAYRNGKTATFMPKPIVGDNGSGMHVHQSLAKGGVNLFTGDGYGGLSQLALWYIGGIFKHARAINAFANSGTNSYKRLVPGFEAPVMLAYSARNRSASCRIPWVTNPKARRIEMRFPDPLQSGYLTFTALMMAGLDGIKNQIDPGAPSDKDLYDLPPEEEKLIPQVCSSLDQALEALDKDREFLKAGGVMSDDFIDGYIALKMQEVTKFRAATHPLEYQLYYGN

SEQ ID NO: 17253 - protein, 172 aa, Magnaporthe grisea 70-15
MASATTIYDFKPLNKKGEETPLADYKGKVVLVVNTASKCGFTPQYAGLEALYKKITEKHPEDFTILGFPCNQFGGQEPGTDDDIQNFCQVNYGVTFPIMKKVDVNGDNADPLFKWLKEEMPGIMGLKRVKWNFEKFLIGRDGKVKGRWASTTKPESLEKDILKEIEAPKPSI

SEQ ID NO: 17254 - protein, 252 aa, Oryza sativa Indica Group
MEPAFPNGGAAAPPPPIAAEQLPPAAAVVREQDRLMPIANVIRIMRRVLPPHAKISDDAKEVIQECVSEFISFVTGEANDRCHREHRKTVTAEDLVWAMDRLGFDDYVPPLTAYLRRMREYEGGGSGGGGGGGRGAAAAPAVVPPPPPPPPPPEDAFRYVQVHHPVYAAPGEPVQGYGYPVAMSSALPAPHVHVGVRGGGQHEVFGGGPAPLAVYYGGAPYGEASSRGGCSAADEGSSSSSASPAPVGPNYE

SEQ ID NO: 17255 - protein, 388 aa, Lathraea clandestina; identical to SEQ ID NO: 10346

SEQ ID NO: 17256 - protein, 1164 aa, Arabidopsis thaliana; identical to SEQ ID NO: 10345

SEQ ID NO: 17257 - protein, 469 aa, Azoarcus sp. EbN1
MNAQEVMKMIQENEVRFVDLRFTDTRGKEHHVGLPVSAFEEDHFEHGHPFDGSSLAGWKGIQASDMILLPEAGSAYIDPFFDETTVVLTCDVIEPSDGKGYDRDPRSIAKRAEAYLKSTGVGDTAFFGPEPEFFIFDSVEWSVDMSGVYSKIISEEAAWSTADKFEGGNTGHRPRIKGGYFPVPPVDSLNDIRAAMVLALEACGVPVEVHHHEVANAGQCEIGTKFSTLTKRADWTQVLKYIVHNVAHQYGKTATFMPKPIVGDNGSGMHVHQSIWKDGQNLFAGNGYAGLSEMALYYIGGIIKHARALNAITNPGTNSYKRLVPHYEAPTKLAYSARNRSASIRIPYVANPKGRRIEARFPDPLANPYLAFSALMMAGLDGIQNKIHPGDPADKNLYDLPPEEDAKIPTVCTSLDQALEYLDNDREFLTRGGVFSNDFIDAYLALKGEEVDRMRITTHPVEFDMYYSL

SEQ ID NO: 17258 - protein, 612 aa, Lathraea clandestina; identical to SEQ ID NO: 10347

SEQ ID NO: 17259 - protein, 382 aa, Lathraea clandestina; identical to SEQ ID NO: 10349

SEQ ID NO: 17260 - protein, 444 aa, Pseudomonas syringae pv. phaseolicola 1448A
MLPPETQRLIEQHGIKYVLAQFVDIHGSAKTKSVPVTGLEMVAEDGAGFAGFAICGMGMEPHGPDFMARGDLSSLTPVPWQPGYGRVVCIGHVDGKPWPYDSRYVLQQQVERLSQRGWTLNTGLEPEFSLFKRDAAGSLQMVDASDNLDKPCYDYKGLSRSREFLERLTEALQPVGFDIYQIDHEDANGQFEINYTYSEAMESADRFTFFRMAAGEIANDMGMICSFMPKPDPKRAGNGMHFHLSIASASSKNLFHDASDPSGMGLSKMAYHFAAGLLAHGPALCAFAAPTVNSYKRLVVGNSLSGATWAPAFIAFGANNRSAMVRVPYGRLEFRLPDAGCNPYLVSAAIIAAGLDGIDRQLEIDHVCNENLYTLSLEEIAARGIKTLPQSLKEACDALEADPLFAEVLGNEIVGEFLRLKRMEWVEYSRHVSDWEVKRYIEFF

SEQ ID NO: 17261 - protein, 180 aa, Escherichia coli O55:H7
GIQLTFADVNQVVLDALNARHSYQVHVVGETEQVDTVSGVNAVSSIGDDVVDLIAQVDLVTTAVGPVVLERIAPAIAKGLVKRKEQGNESPLNIIACENMVRGTTQLKGHVMNALPEDAKAWVEEHVGFVDSAVDRIVPPSASATNDPLEVTVETFSEWIVDKTQFKGALPNIPGMELTD

SEQ ID NO: 17262 - protein, 1098 aa, Gemmata obscuriglobus UQM 2246
MRAGHLRYNFRMSLLTTLASQVPQTIRDRGREYYRNGAVTLDRTTHNAVAATVEGADDYEVDLLLEGQTVFAACSCPYTAEHGAICKHIWATVIAADAGPFARSAAAKGTLHLVLDEEAFYEDDYADPYPLRLPAPAAPKKKKENWADLLAAVSREIQPATGTRPTVRTTEQQLVFIIDVPASEAARKLVLEVGTQERKRNGEWGKPKFQYLTNAQIEALTDPTDRQLLALLGGAERGDSYGYYGSPYGTSYGSSSGRYRVAGPLLEAVLPLLAQTGRVKLRRDPAPPVVLEDLTADPGPPWELAAGVTRDGDKEWVLGGSLRRGAEVMGLTEPALLVPGVVVWNGRFGRFSDAGAFPWVPTLRRAGAITVPVAKSDDLVAQLFQMPTLPRLDLPEELRVTEEAVAPRPRLVVKPAKQHYGAPVLNAELSFDYDGVIVPVRPPTRGAFKPGSRRFLLRDAAVERAAEQELTRLGVRQGTYGWGGGEPPLELKPTLLPKLTRELVTAGWAVEAEGKLYRKADDFRMEVRTENDWFDLRGAANFDGRSVPFPRLLEALTKGQTSVLLDDGSFGMVPEEWLKKYGLLAQMGAVEGDAVRFSRAQVGVLDALLAARPEVTFDKQFARARDELRRFQGIEPAAPPKVFKGELREYQREGLGWLRFLRKFGFGGCLADDMGLGKTVQVLALLAGKRSGPALVVVPRSLVFNWKREAARFAPKLKVLDHTGTARDRTCANFKDFDLVLTTYGTLRNDAAAFAEVRFDTCVLDESQAAKNAATETAKAVRVIQADHRLALSGTPVENHLGELWTLFDFLNPGMLGRAALAGAGSIRNPDAETREFLARALRPYILRRTKAQVAKDLPQKTEQTVYCDLEPSQRQVYDELRDHYRASLLAHVDSVGLKRSQIQVLAALMRLRQAACHPGLIDKKRTGDASAKLDYLLPQLQELAESGQKALVFSQFTSLLDIVRKRLTAEGIQFEYLDGRTRDRDKRVERFQTDPACKLFLVSLKAGGVGLNLTAAEYVFLLDPWWNPAAEAQAIDRSYRIGQTKPVFAYRLIARGTVEEKVLELQQSKRELADAILGGDGKGVTDLKREDLELLLS

SEQ ID NO: 17263 - protein, 395 aa, Pseudoalteromonas tunicata D2
MKYLSQFIVCFYLTFTLPSSAQANEPAAELQDILEHIQAFYVDEIDPKKLNHTAIDSLIKQLDPHSDYLDPEELEDLFNIANGQYTGLGIEVEQRDEHIIIVSALPNSPASHAGIKKGDILLKVNNETVINEPIKKVAALISKSKTPQIKLAIARSGYSDALQFTLEREKIAIESVSGQLNEHGYASIRISNFNNHTLHDLARLLAQLANENGQNLKGLLIDLRDNPGGVLGSAVDISDLFLQHGTIVTTKGRFYDANHKYLAKTGDVLNGAPIVVLINKGSASAAEILAGALKDNQRAIVVGTRSYGKGSVQSLIPLGDGHTALKLTTAKYYTPSGQSIDGIGIVPDIAIEQSKLPSEDGQTLLKMSSGNNNQPLLTAFRDVQLEEAQKILKKY

SEQ ID NO: 17264 - protein, 209 aa, Pharus virescens
MGRGKIEIKRIENSTNRQVTFSKRRNGILKKAREISVLCDAEVGVVIFSSAGKLYDYCSPKTSLSKILEKYQTNSGKILWDEKHKSLSAEIDRIKKENDNMQIELRHLKGEDLNSLQPKDLLMIEEALDNGLTNLRDKQMDHWEMLARNSQMLEEENKLLAFKLHQHDVELSGSMRDLELGYHPDRDFAAQMPITFRVQPSHPNLQENN

SEQ ID NO: 17265 - protein, 1128 aa, Oryza sativa
MAASVEAAAAAVVAPPASVGGDEVVVGGGGGGASEQARTLIGALNLLSRNLPLPPAVLHAVSSIYHGGDAWEGEGEEGGEEEVAAAAAAVGDGCGESGEGEEDRADASPGADEGVTLIQELEDAVLKNQGPYMSYSELTALKEDRFNTSIQHRLTELEGLPSTRGEDLQMKCLLELYGLKLLDLQKKVRTDISAEYWLHKKCAHPDRQLFDWGMMRIRYPFTMYGIGDSFSMDADDINRKKRFSERISRLEEEEKNQAEIRKRKFFSEILNAAREYQLQVPASYKRKKQRNDGVLAWHVRARQRINRMEKSRLQVLKAGDQEAYLRMVEESKNERLKLLLGKTNELLEGIGKAVQRQKDAEHVSRPDGSELPKGSESDDCSQISGLKVESPDEESPSDVDADHHSSADHSKFNAGHRLDSTVHSIEEKVTEQPSALEGGELRPYQLEGLQWMLSLFNNNLNGILADEMGLGKTIQTIALIAYLLEKKEVTGPHLIIAPKAVLPNWSNEFKTWAPSIGTILYDGRPDDRKALREKNFGQRQFNVLLTHYDLILKDLKFLKKVHWHYLIVDEGHRLKNHECALARTLVSRYQIRRRLLLTGTPIQNSLQELWSLLNFILPNIFNSSQNFEEWFNAPFACEVSLNDEEQLLIIHRLHQVLRPFLLRRKKDEVEKYLPVKTQVILKCDMSAWQKAHYEQVTSNGRVSLGSGLKSKALQNLSMQLRKCCNHPYLFVEHYNMYQRQEIVRSSGKFELLDRLLPKLQRAGHRVLLFSQMTKLLDILEVYLQMYQFKYMRLDGSTKTEERGRLLADFNKKDSEYFLFLLSTRAGGLGLNLQTADTVIIFDSDWNPQMDQQAEDRAHRIGQKNEVRVFVLVSVGSIEEEILDRAKQKMGIDAKVIQAGLFNTTSTAQDRRALLQEILRRGTSSLGTDIPSEREINRLAARNDEEFWLFEKMDEERRQRENYKPRLMEGIEVPDWVFANDTLTEKIPADEPQNVLLTTKRRRKEVVYSDSFGDQWMKADDVVEETPRMAPRAKRSAYSSDVQEVDFSERRKRHKSLVNIADDASIPMWTPEKVRAGVSSYSKDENEDDAEDESTTSVLQGGSFTWKTLRRKRSSHFSNSSDSKGRSAF

SEQ ID NO: 17266 - protein, 1171 aa, Oryza sativa Indica Group; identical to SEQ ID NO: 6991

SEQ ID NO: 17267 - protein, 418 aa, Debaryomyces hansenii
MAKRRQKTRTHKKVSEEELAKIPRSMVIRLGSSLRNHSLSQLVKDFRNIMQPHTAINLRERKSNKLKDFIVMAGPLGVSDLFIFNQSEETGSISLRIGKMPRGPTLQFRVNNYSLIKDVSRILKHPKSVGKDSPEFLNPPLLVLNGFSNKLNEVENHEKLLITVFQNMFPPIQPQSTKVSSIKRVLMVNKNAETGEIDLRHYAIDTKLVDGSRNVKKLLNSHHNLKKSLPNLSANSDVSDLLLDPYSVGGITSDSEVEDDAIVEIKNSEDANVLKKKTASEEKETANPQTRKRAIKLTELGPRINMTLMKIEENLTGSSKTLYHANINKSEAEQNELNRKHELRQKQKAERRAKQQANVDAKEETKKAKKERRKARQNGEEPEQGEDEPMTESDSDSDAPEIKAEDYENDSDLYSDVE

SEQ ID NO: 17268 - protein, 1061 aa, Chlamydomonas reinhardtii
MSLLDDPNFVGQDEDDDVANQLAEEDTQDQAEDDDDDESVKTEDVDYEPELGDDAVVSPAKLAVAKAETERLKHQAKQKKEMLERMREQQNQLATMGDAERARHRINFLLKQAEIFQHFASDSAVKEAKKAKTKGRGQRKEEDEDAELLQDEDDGGTHAGHRLQVQPSIITGGTLREYQMQGLNWMIHLYDNGINGILADEMGLGKTLQTISLVAYLYEYRGITGPHIVITPKSTLGNWVNEFKRFAPIIRVTKFHGNADERMIQKETTCAPGRFDVVVTSYEMVIKEKNHFKRFHWRYIIIDEAHRIKNENSRLSLVVRQLKTNYRLLITGTPLQNNLHELWALLNFLLPEIFSSAEKFEEWFSLGDGSKEKEAEVVQQLHKVLRPFLLRRVKSDVERGLPPKKETILKIGMSEMQKKWYAALLQKDVDALNGGADRAKLLNVVMQLRKCCNHPYLFQGAEPGPPFITGEHLVENSGKLVLLDKLLPRLKERESRVLIFSQMTRMIDILEDYCLYRGYGYCRIDGNTDGEARDNMIDEFNRPNSSKFIFLLSTRAGGLGINLATADIVVLYDSDWNPQMDLQAMDRAHRIGQKKEVQVFRFCIENSIEEKVIEKAYKKLRLDALVIQQGRLTENSATKVNKDDLINMVRYGAELVFSSDSSNITDADIDAIIKKGERDTADLNQKMQQFTDNAMKFTMDGGMVYDFKDADDERADIGDLKAIMGSNWIDPPKRERKRHQLNYNDADYYKNALKTGAKDPRAQRLPKMPQLQDFQFFNVPRIQELYEKEHNHEEHKRALTNREAALRNQGASDEAVAEALADKEDDPQPLTEEELEEREKLLEEGFKEWTKRDFNAFVRACEKYGRENIPQIAAEVDGKTEDEVREYAKVFWQRYRELADYEKVIKNIERGEQKIQRQQDIMNAIAAKLERYKNPWQELKIQYGANKGKAYTEEEDRFILCMVHKLGYGNWDDLKAEIRKSWRFRFDWFFKSRTPQELGRRCETLIRLIEKENEDNADAPPRTGGGRGGGRGGRGGGRGGGDGPGRKRKGQVATPAAGTPA

SEQ ID NO: 17269 - protein, 536 aa, Zea mays
MALELSLASASPPAGGGLAQPPPLAPPGKEQQVAGVGILLQISMLVLSFVLGHVLRRHRFYYLPEASASLLIGLVVGGLANISNTETNTRTWFNFHEEFFFLFLLPPIIFQSGFSLSPKPFFANFGAIVTFAILGTFIASVVTGVLVYLGGLTFLMYKLPLVECLMFGALISATDPVTVLSIFQELGSDVNLYALVFGESVLNDAMTISLYRTMSSVRSHAAGGENFFMMILQFLETFVGSMSSGVGVGFISALLFKYAGLDVDNLQNLECCLFVLFPYFSYMLAEGLGLSGIVSILFTGMVMKHYTYSNLSDNSQRFVSAFFHLLSSLAETFVFIYMGFDIAMEEHSWSHVGFIFFSIIFIVVARAANVFSCAYLVNMSRPEHRRIPVKHQKALWFSGLRGAMAFALALQSVHELPEGHGKTIFTTTTAIVVLTVLLIGGSTGTMLESLDVVGDENTSRENYEDNNGYMPPSYEEGTSSGGGLRMKLKQFHKSTTSFTALDKNYLTPFFTSQTDDDNDDDFSQQPQNRRLAFYDQ

SEQ ID NO: 17270 - protein, 536 aa, Mycobacterium avium 104
MFGLVLIVALVSTVIVGTVIGRRYRVGPPVLLIVLGVLLGLVPQFGHVRIDGEIVLLLFLPAILYWEGLNISFREIRANARIIVFLSVALVIATAVAVSWTARALGMDPHAAGVLGAVLSPTDAAAVAGLAKKLPRRSLTVLKAESLINDGTALVLFAVSVHVAIGAPAISPPEVTLRFIGSYLGGIAAGLLVGGAVTLVRKRIDAPQEEGALSLVTPFAAFLLAQSVECSGVVAVVVSALVLAYSGPVVIRARSRLQSYAFWDIATFLLNGSLWVFVGVQIPGALRGIAGVDGGVRHALFVALVITGVVIVSRIFWGEFTTMLIRLIDRRAVQRERRVGWRQRFVTAWAGFRGAVSLAAAVAVPMTTLSGAPFPDRSLLIFIVTVVILVTVLVQGSTLPAVVRWARLPADVAHAEELQLARTRAARAALDALPAVADEVGVSDELRRRLHKEYEEKAALVLATENGSPDNRILKTREKVRQVRLGVLEHKRREVTALRNQNRIDDTVLRELQNEMDLEEVQLLAAAADEDDGDTE

SEQ ID NO: 17271 - protein, 796 aa, Candida albicans SC5314
MFTLFFFTTDQMNVRPNAPFRPPRPIKGGVAVVQKVVKRKLPTTTNPKPAKILTTDPGSTKYVIQWRKKTSKKNKTWDGDGYAVIKQLENGACEISIKNSDGKPMGKRVFTATPNLDDVISVGPYELELDEKVGSNSTSQTVTRVTHQFKKVAPPTASSRKPLYDDCADAIALPPPPKAKDYVKVNIDPHLAKVLRPHQVEGVKFMYECLMGYRGFGGHGCLLADEMGLGKTLMTITTIWTLLKQNPFMEKGAVVNKVLVVCPVTLISNWRQEFRKWLGANKLNVLTLNNPMSNEKQDILNFGKLNVYQVLVVNYEKLVAHFDELSAVKFDLLVCDEGHRLKNSANKVLNNLIKLNIPKKIVLTGTPIQNELVEFHTLISFLNPGVLPELKLFQRNFITPISRARDINCFDPEVKKRGEEISQQLIELTQSFILRRTQAILANYLTQKTDILLFVPPTSLQLKLFDYITNLKKFNQFEAFTMINLFKKICNSPSLLADDELFKKIVEEKFNLGMASGKINILVPLLLEIASLGEKIVLISNYTKTLDLLEQVLRKVSLTFSRLDGSTPNNVRSKLVNQFNTNPDINVFLLSSKSGGMGINLVGASRLILFDNDWNPATDLQSMSRIHRDGQLKPCFIYRLFTTGCIDEKIFQRQLVKNKLSSKFLDNDATSKSDVFDNDDLKNIFEIDTSTISNTHDLLECVCEGDGSMLSQPTIEESEPPPKQAWVTALELKKKIDDGEALKRTAVKFALNDYRHYNPEVNRNLDFDSALHRIANNSSYENKQLPITFIMSRVTN

SEQ ID NO: 17272 - protein, 1132 aa, Physcomitrella patens; identical to SEQ ID NO: 10357

SEQ ID NO: 17273 - protein, 127 aa, Brassica napus
MTTSKRLADRKIEKFDKNITKRGFVPETTTKKGKDYPVGPILLGFFVFVVIGSSLFQIIRTATSGGMAINETTSSFLSHFSLNLIVECFSFLCTLLHVVKNFESFLYKIIKPFNVVLKLVAVVVMLL

SEQ ID NO: 17274 - protein, 444 aa, Prochlorococcus marinus str. MIT 9301
MKIRKLLKKKFIFLFATSFSGLFLNSFAEATVLNNSYKEVIDHVWQIVYRDFLDSSGKFQKSNWINLRKEVLSKTYSDSNEAYDAIRDMLSNLDDSYTRFLEPKEFNQMRIDTSGELTGVGIQIVKDKESDDLIIISPIEGTPAFDAGIKARDKILSIDDISTEGMNIEEAVKLIRGQRGTKVKLEILRGSQSFFKTLSREKIEIKSVSSKVNQTKNGLLIGYVRIKQFNANASKETRDAIKDLETKKVAGYVLDLRSNPGGLLESSIDISRHFINKGVIVSTVSKDGLKETKKGNGQALTKKPLVVLVNEGSASASEIVSGAIKDNKRGKLVGKKTFGKGLVQSMRTLVDGSGLTVTVAKYLTPNGTDINKSGIIPDIDVKMNINPILQREIGTRKDKQYRAGEKELINIINRKNQISEFKPDTANLNAFLKINKENKIFLLN

SEQ ID NO: 17275 - protein, 135 aa, Petunia x hybrida; identical to SEQ ID NO: 1099

SEQ ID NO: 17276 - protein, 516 aa, Triticum aestivum; identical to SEQ ID NO: 12225

SEQ ID NO: 17277 - protein, 228 aa, uncultured cyanobacterium
HEVAGAGQHELGMKFAQLIEAADNVMTYKYVVRNVAKKYGKTATFMPKPVFNDNGTGMHVHQSLWKGGEPLFFGEGTYANLSQTARWYIGGILKHAPAFLAFTNPTTNSYKRLVPGFEAPVNLVYSEGNRSAAVRIPLTGPSPKAKRLEFRSGDALANPYLAFSAMMMAGLDGIKNQIDPGDGEDRDLFELSAEELQKIATVPPSLNGALEALNADRAFLTEGGVFTD

SEQ ID NO: 17278 - protein, 286 aa, Clostridium acetobutylicum ATCC 824
MLDLWYSESHADDTKFSIRVKEHLYSEKTPFQQIDFFKSETFGTFFTLDGYIMMTEKDEFIYHEMITHVPMAVNPKIKKVLIVGGGDGGTSREILRYNTIEKVDMVEIDERVVRLCQKYLTQTSCKLDNDSRLTMHFEDGKEFVKRAETGFYDLILVDSTDPIGPGEGLFTNEFYRDCERILSDDGILINQHESPYYKDYCHEMKRAHSKIKDKFPISMVYQFHMPTYASGHWLFGFASKKYHPLNNLNADSWNSLGLKTKYYNTNLHKGAFALPNYVIDELEKTE

SEQ ID NO: 17279 - protein, 319 aa, Microcoleus chthonoplastes PCC 7420
MAGSQVDADLWISEYITPWDIYVHGITKVLAYKKTAYQEMYIVETGAYGKALVLDGKWQSCTGDEFIYHESLVHPAMISHPNPRRVLVLGGGEGATVREILRWKTVEQVMMVDIDGEVVDACRQHLPEMHQNAFDDPRTQLVIGDALEILDKMEQQWDIVISDLSDPIEEGPSYKLFTQEFFEKVQRVLQPDGFLVLQAGPVGTFAVKTHARLVNTLSTVFPHIHSYCCFTPTYGEPWGFAIASAQAIDTQPNPATVDQHLQDKTTGGLRLIDGVALLGLLQTPAYIRRAIASETQVYTLNEPPKFFGKGALSQSSSQS

SEQ ID NO: 17280 - protein, 1445 aa, Oryza sativa
MDRAARLARRGGGVTVAEYRMVRGRRRGGDAGPVVVIDVEDDGEDAADDSAGGGGGAAAAVKRRVVVPGAVATRTRSRRMAMAQQAPVTPPAAAEEAPSRRRKRKGAASAEAGGGGPSKRRVRSSGSAGGRGARKRKEAEADEEEAEAEAEEEAEAEAGTPARGESMEVSQVDGGGSSGRADDASHNGNGESRVCNADGIDQASEERPSVAGGDLIEEEHYGNGEASVAGGDRIEEHCGNVEASVANSNRDGGEIIAGEGTEDRGNTELSVVDPVNEELASDEDDYDDEMLEEKLVGDVIRAYSNGADLDTNGVDWEAEDEMEFADLDTNVVDWEAEDEMEFDDDNDNDADDDGDNFGGDADEGDKSVQMHDFSKVETQDLVSHNVNVSEVRPHEDEEAIKDEMESKGKGSLSFNEGSSYIEILDSDEEVKVVNDTGNALRRKPLVPAKLPIVPSCVAWRTRSSWGMKEERISYNTYFEVLSDEPKEDDDDTEVELDDEEDDENDDDCNSASCDEEDEEEEEEREEEEEEAQRRKQKKGIDSSDDEMIDDAVDCGIDWEEDYPEVDFTRPLTFQKDGSEAPVGSEAFTEQQKRSRFTWELERRKKLKLGMMTNHRLYERDLESDSNSSDSSQNRKNGCQGSGDHRTGRKRKNPLSKSGKKSSRMLKRQSLMKLLMDKMCSNDDGKSTPFDQKPQIEYSFKDLHPLVFSFGDDDPSPTDRSEQDAALDMLWADLDFTLESENIGTYYDDEGQEDSLLDHALAPITPCSRGKHEFIIDEQIGIRCKYCSLVNLEIRFILPLLASNFAEKPAWRNSSCLKTALMCPDLYEQTGTGDGQSQDFHINGTVWDLIPGVITDMYQHQREAFEFMWTNLVGDIRLNEIKHGAKPDVVGGCVICHAPGTGKTRLAIVFIQTYMKVFPDCRPVIIAPRGMLFAWEQEFKKWNVNVPFHIMNTTDYSGKEDRDICRLIKKEHRTEKLTRLVKLFSWNRGHGVLGISYGLYMKLTSEKVGCTGENKVRTILLENPGLLVLDEGHTPRNERSVIWKTLGKVKTEKRIILSGTPFQNNFLELYNILCLVRPRFGEMFLTKTRVGRRHCVSKKQRDKFSDKYEKGVWASLTSNVTDDNAEKVRSILKPFVHIHNGTILRTLPGLRECVIVLKPLPLQKSIIRKVENVGSGNNFEHEYVISLASTHPSLVNAINMTEEEASLIDKPMLERLRSNPYEGVKTRFVMEVVRLCEALKEKVLIFSQFIQPLELIKEHLRKIFKWREGKEILQMDGKILPRYRQNSIEVFNNPDSDARVLLASTRACCEGISLTGASRVVLLDVVWNPAVGRQAISRAFRIGQKKFVYTYNLITYGTGEGDKYDRQAEKDHLSKLVFSTEDEFSNVRNMLSKAEMEHCSKLISEDKVLEEMTSHDQLKGMFLKIHYPPTESNIVFTYNQIAPELS

SEQ ID NO: 17281 - protein, 228 aa, uncultured cyanobacterium
HEVAGAGQHELGMKFAQLIEAADNVMTYKYVVRNVAKKYGKTATFMPKPVFNDNGTGMHVHQSLWKGGEPLFFGEGTYANLSQTARWYIGGILKHAPAFLAFTNPTTNSYKRLVPGFEAPVNLVYSEGNRSAAVRIPLTGPSPKAKRLEFRSGDALANPYLAFSAMMMAGLDGIKNQIDPGDGEDRDLFELSAGELQKIATVPPSLNGALEALNADRAFLTEGGVFTD

SEQ ID NO: 17282 - protein, 710 aa, Ostreococcus tauri
MTTCAQYETLTSGTCVRDTSFFGGKAVLPEGAGYGIVIGFGLFFSLATAIVMGLDKRYGGTNISSEYFNTAGRNVKTGLTASVIVSQWTWAATLLQSSNVAYQYGVSGPFWYASGATIQVLLFGMLAIQVKRYAPNAHTICEIIDARWGSDVQKVFIFFCFLTNVIVSSMLVLGGAATVNALTGMNTTAAGFLIPIGVIAYTMAGGLKATFLASYIHTAIIFAILITFIYIVYAADTKHGLGSPSKVYDLLQSVAARNVTSADCVARLAAGQNCGAVAKNQKGSYLTMLSEGGVIFGIINIVGNFGTVFVDQSYWQSAIAAKPSSSTKGYLLGGLVWFTIPFALATAMGLATVALDLPVTGDEAGKGLVPPAIATHLMGKGGAAAITIMLFMAIVSTGSAEQIAVSSLFAYDVYRKYIKPNATGEDILRVSRYGVVAFGLFMGILSLILDELGLSLGFVYLMMGIFIGSAVMPISFVLTWDKANAKGAVVGAISGQILGLITWIVTAQGLYKSVTIKTLGENYPMLAGNIVAICSSGIIHAFMSFQDPQNFDFSTLNDRIQLIDDKLPEFEQDEDSNPKQLEAALAWIQKWGLSFTFVMIILWPVLSLPAGCGTSAGCGVFNKGYFNLWVGIALAWGTVATAVIIFLPVYESWDSISVVLKGMFTNDDVHMRMDVLEKKIDALLAPGSEKSAENLSQQPGYRARLIAGHL

SEQ ID NO: 17283 - protein, 1319 aa, Oryza sativa
MDENRKLSDDMSKKMEPIHSNGEAGEDKTIIIEPESDANKLEVETDARHGICEAHKAHEYGTMENDLHEEASTTDDDSENDSYEYLLRESDNEQTSESDAGEGDNEAPLTDEEVETLITEFLDAESKAAQAQESLEKESLEKIESEVRLELSESLQGNELESAVSTEMKQYKKEWESELDDLETHIAVLLEQLDAAGVELPSLYKSIESQVPNVCETEAWKNRAHWAGYQVPEEANKSIRKADEYLQSCRPVRRKHGRLLEEGASGFLAGKIPVGDDGSAQCHEKSWNAFDELTKSKEYAESSFGSSNWASVYLASTPQEAAALGLQFPGVDEVEEIAEVEGAVSDIKGVDEIELSEVQRRKYRKVPEEDDAKMTKRLQRHLKERRTRHLHKENIGLASSSNGCCELPPKKLKTYENGVSVELAKRTREDDVEFDNKRSKTVIIESDDDMQTDSKPDSAPSENADEIIDLDIFPSQSPKLGDKVRPKPFKCTICTEMLNVPEVHRHPVLDVIICGSCRFLVIEKNRLEDPVSGGYCTWCVKSEQLQSCSSCKLLFCRNCLSKNFGEEGLSEARVAGWQCCCCLPSQLEHLISDCDKALGGVESSDPENDFAELSVLESNGPFSKHKMKKRIRRIMDDEELGEETKLKIAMEKARQEHLKSMQEQSASKLKSNNIGISLEAPSEVSEYVGDGHIVNLAREEDEAPVRIPSSLSAKLKPHQVSGIRFMWENVIQSVKKVKSGDKGFGCILAHNMGLGKTFQVITFLYTVMRCIQLGLRTALIVTPVNVLHNWKKEFIKWCPAELKPLRVYMLEDVPRANIQYLLKKWRIKGGVLLIGYSSFRNLSLGRSARDKTVANEITNALQCGPDILVCDEAHIIKNRRADTTQALKQVRTQRRIALTGSPLQNNLMEYYCMVDFVREGYLGSSHEFRNRFQNPIENGQHTNSTSDDVKIMNQRSHILYEQLKGFVQRMDMNVVKNDLPEKKVFVVTVKLSQLQRKLYRRFLDVNGFSSSAASEKSFQRSGFFAKYQTLALIWNHPGLLQMAKQKGNLRQEDVESFLMDESSSDDNIENYLPNGGKLRSRNDQLSKKSSDVVNEESNWWENLLDENAYKEADYSGKMVLLLDILSSCSELGDKALVFSQSLSTLDLVEFYLSKLQVNGKEGKYWKQGKDWYRIDGSTPSSERQNLVERFNDPENIRVKCTLISTRAGSLGINLHSANRVILLDGSWNPTHDLQAIYRVWRYGQTKPVYAYRLMAHATMEEKIYKRQVTKEGLAARVVDRQQVSRTISKEEMLHLFEFGDEELLEQSGSTMNGHSKVGT

SEQ ID NO: 17284 - protein, 194 aa, Yarrowia lipolytica CLIB122; identical to SEQ ID NO: 1104

SEQ ID NO: 17285 - protein, 918 aa, Pseudomonas syringae pv. tomato str. DC3000
MSSILEKVLASAWTDLFNDRTLERGRDYARQKRIVLEDSSPQIIRTACRGSGLEIYTQTLLFKDPDRYKNYLTCKCTCPVRNDCKHCVAALLFLKDPQNRPLLQAALGSHQRETEQHVEQQIAQKPRLPERLIDDLQPRPRLILASIEFSAYEPRNGRMQRHIQHRAALAFAYGKHYAVGTTNVSILVSSLGSDLVNQKSDIIEHTETETLRIRRQGEKERQLRQELADLGFKVATRQSKALPDSAGDMYELPNDKAWLHFVLDDLPRLREQGWEIEIQEEFGFDVTPVDDWYAVIDEETERDWFDLELGIIVNGERLSLLPILINLIRSHPELMSPSAVAKRGDEEQLLVQLNHFTQSGGSPVQIALPYGRLKPVLATLGDFYWRQDGNNALRMSKADAARLTQLEDLPLTWQGGDRLRHFAERLINIKDAPVNLPDGLNATLRPYQLEGLSWMQSLRELEVGGVLADDMGLGKTLQTLAHLLMEKQAGRLDRPALAVMPTSLIPNWLDEAEHFTPDLKVLALYGANRHQDAGNLQDYDLILTTYALLPRDMEMLEKQPLHVLILDEAQYIKNPNSKAAQAARNLTARQRLCLSGTPLENHLGELWSLFHFLMPGWLGNSKEFNSNYRTAIEKHGNQDRLHHLNARIKPFLLRRTKEQVATELPPKTEIIHWVDLNDAQRDVYETVRLAMDKKVRDEITRKGVARSQIIILEALLKLRQVCCDLRLVNHDMPVNSKQGTSGKLNSLMEMFEELLAEGRKILLFSQFTSMLSLIEEELKQRGIAYALLTGSTRDRRTPIHDFQSGKLPIFLISLKAGGTGLNLTAADTVIHYDPWWNPAAENQATDRAYRIGQDKPVFVYKMIARGTVEEKIQRLQREKSALAAGVLDGRTTGDWKLRDEDLQALFAPLPAAPKKTRK

SEQ ID NO: 17286 - protein, 250 aa, Arabidopsis lyrata subsp. petraea
HEGTLRSNIFLEDQETVSWIQYPPDEDPFETDDFSSHFFSTVDPLQRPTSETIKPKSGPDPPHVMVKPKACPDPPQVMPPPKFRLTNSSSGMRETEMEQYSVTTIGPSHCGSNPSQNDFDASMSQDRSKNIEEKLNPNASSSSGGSSGCSFGKDIKEMACGRSITTDRKRKHIMDTDESVSLSDAIGGNKSNQRSGSNRRSRAAEVHNLSERRRDRINERMKALQELIPHCSKTDKASILDGAIDYMKSL

SEQ ID NO: 17287 - protein, 374 aa, Tripterygium regelii; identical to SEQ ID NO: 10371

SEQ ID NO: 17288 - protein, 303 aa, Brassica napus; identical to SEQ ID NO: 13105

SEQ ID NO: 17289 - protein, 633 aa, Colwellia psychrerythraea 34H
MTKIIGIDLGTTNSCVAVMEGGIAKIIENAEGSRTTPSIVAYANNETLAGQPAKRQSVTNSTNTLFAIKRLIGRKFDDKEVQKDIKLAPYKIVKADNGDAWVEVDGKALSPQEVSAQILRKLKKDAEAYLGETVTDAVITVPAYFNDSQRQATKDAGKIAGLNVKRIINEPTAAALAYGVDKNSNADQKVVVYDLGGGTFDLSIIEISNVDGEKQFEVLATNGDTFLGGEDFDLRLINYLADEFKKESGIDIHQDTLALQRIKEAAEKAKIELSSALQTEVNLPYVTADASGPKHLNVKVTRAKLESLVDDLVKSTIAPCEQALKDAGLSKADVSEVILVGGQTRMPKVQEAVKTFFSKEPRKDVNPDEAVAMGAAIQAGVMSGAVDDVLLLDVAPLSLGIETLGGVMTKLIEKNTTIPTRASETFSTAEDNQAAVTVHVLQGQREMATDNKSLGQFNLTDINPGPRGSVQVEVTFDIDVNGILNVSAKDKATGKEQSIKITASSGLTEDEINRMVKEAELHASEDKQKRELVDQRNQADQLIHTVQTSMTSLAQDQQTELKTLIEQLKMAVNGSDKAAIEMRQSALQEAYSKTMQTEQAQSQQAAQHQGNAANDGAKDEDIIDADFEDVSNG

SEQ ID NO: 17290 - protein, 371 aa, Tripterygium regelii; identical to SEQ ID NO: 10375

SEQ ID NO: 17291 - protein, 374 aa, Tripterygium regelii; identical to SEQ ID NO: 10378

SEQ ID NO: 17292 - protein, 283 aa, Vitis vinifera
MMLMAYLSYILAELFYLSGILTVFFCGIVMSHYTWHNVTESSRVTTKHAFATLSFVAEIFIFLYVGMDALDIEKWRFVSKTPGTSVAVSSILIGLVLVGRAAFVFPLSFLSNLAKKNPTEKITFRQQVIIWWAGLMRGAVSVALAYNQFARSGHTQLRSNAIMITSTITVVLFSTVVFGLMTQPLIRFLLPHSKNTTSMVYSDSSTPKSFAVPLLESAQNSDADMGGHGFPRPSSLRMLLTTPSRSVHHYWRKFDDAIMRPMFGGRGFVPFVPGSPTERSAPQ

SEQ ID NO: 17293 - protein, 207 aa, Pharus virescens
MGRGKIEIKRIENTTNRQVTFSKRRNGILKKAREISVLCDAEVSVVIFSSAGKLYDFYSPRTTLPKILEKYQTNSGKILWDDKHKSLSAEIDRIKKENDNMQIELRHLKGEDLNSLPPKELIAIEEALTNGQTNLRDKQMEHWRMLRRNAKIIEDVNKLLAFRLHQPDVALNGRMRDLELGYHPEDFVPHMLNFIVQPSHPNLQEEK

SEQ ID NO: 17294 - protein, 410 aa, Listeria monocytogenes str. 1/2a F6854
MKLNELMQAIPVFTGEVSETIEISHIAQDSRKVKPGTLFICIDGEVVDGHQFASRAVELGAVAIIAEKQVDVSIPVIYVRDSKRAMAMLADYFYGSPTQALKLVGITGTNGKTTVSHLVEQIVRENGEQTGLIGTMYRKIGDQILETKNTTPDSLTLQETFRDMLLSGVSTAVMEVSSHALVQGRVYGSDYDVAVFMNLSQDHLDYHHTMEEYANAKSLLFAQLGNSYHTSNPKIAVLNADDAESVRMQKATAAHIITFGIKQEADFQASNIKITSHGSTFDLGTPVGNFTLKIKMIGNFSVYNVLAAIATSFALHIPMEKAIKTVESIPGVKGRFELVHAGQEFPVIVDYAHTPDGLLNVLETIDEFAEKRVFVVVGCGGDRDKGKRPQMAKIAVDYATNPIFTSNNPR

SEQ ID NO: 17295 - protein, 551 aa, Chenopodium glaucum
MWSQLSSLLSGKMDALATSDHASVVSMNMFVALLCGCIVIGHLLEENRWMNESITALLIGLATGVVILLISGGKSSHLLVFSEDLFFIYLLPPIIFNAGFQVKKKQFFRNFITIILFGAVGTLVSFTIISFGALSIFKKLDIGSLDLADYLAIGAIFAATDSVCTLQVLNQDETPLLYSLVFGEGVVNDATSVVLFNAIQSFDLTTIDHRIALQFMGNFLYLFIASTILGAFTGLLSAYIIKKLYFGRHSTDREVALMMLMAYLSYMLAELFYLSGILTVLFCGIVMSHYTWHNVTESSRVTTKHAFATLSFVAEVFLFLYVGMDALDIEKWRFVSDSPGTSVAVSSILLGLIMVGRAAFVFPLSWLMNFAKKSHSEKVSLNQQVVIWWAGLMRGAVSMALAYNQFTRSGHTQLRGNAIMITSTTTVVLFSTMVFGLLAKPLIMFLLPQPKHFTSCSTVSDLGSPKAYLPLLEGHQDYEVDVGNHDDGTEPTIARPSSLRMLLNAPTHTVHHYWRKFDDSFMRPVFGGRGFVPFVPGSPTEQSTHNLADRT

SEQ ID NO: 17296 - protein, 542 aa, Citrus x paradisi
MDQAISSVVRKLQMVNTSDHNSVVSINIFVALPCASIVIGHLLEESRWMNESITALLIGVCAGVIILLTTGGKSSHLFVFSEDLFFIYVLPPIIFNAGFQVKKKQFFRNFITIMLFGAIGTLVSCTIISLGVIQFFKKLDIGTLDIGDYLAIGAIFAATDSVCTLQVLNQDDTPLLYSLVFGEGVVNDATSVVLFNAIQSFDLTHINTRSAFQFIGNFLYLFFTSTLLGVIGGLLSAYVIKKLYFGRHSTDREVAIMVLMAYLSYMLAELFYLSGILTVFFCGIVMSHYTWHNVTESSRVTTKHTFATLSFVAEIFTFLYVGMDALDIEKWRFVKGSPGTSVAASAMLMGLIMAGRAAFVFPLSFLTNLAKKSPTEKISIKQQVIIWWAGLMRGAVSMALAYNQFTRSGHTQLRENAIMITSTITVVLFSTVVFGLMTEPLIRLLLPHPKHTTNHILSDPSTPKSLSQPLLEEGQQDSYADLVGPTVPRPGSLRALLTTPTHTVHYYWRKFDDAFMRPVFGGRGFAPFVPGSPTERSVRGGQ

SEQ ID NO: 17297 - protein, 609 aa, Lindenbergia philippensis; identical to SEQ ID NO: 10384

SEQ ID NO: 17298 - protein, 396 aa, Bacillus sp. SG-1
MGYTHVFILLLIGYVVFTIDKKQKNFPVPMVLLLIGIGLSFTPFFADIEITKDMIFDVFLPALLFVSAYQFKINGLKKNMGVISVLSTLGLILTVFILGASVYFVGIVSLSFMGALLIAAILTPTDPVSVVSILKKSSNSPKIAEVVEGESMVNDGTSVVLFTVISHLYLSNEELKLVSALWSFVSVSFGGLLIGIVFGWLVSRIYHFTHHRQYQVMLSIVLAYGSFYLAEHLGVSGVLASVSSGIMLSWKLQTTDNEKDYRSYLDAFWEVIEPSILSILFLLIGIEFMKHIDFQNIGFTFIIFGLSLIVRFVVLAGILKLFKKWRKEFLWDDISLITWSGIKGTMSVALLLGLASESTGQADAILSLTYGAIVLSLIIQSPLVYPLSRMFSKHSR

SEQ ID NO: 17299 - protein, 444 aa, Bacillus licheniformis ATCC 14580
MAKYTRDDIVKLVNEENVKYIRLQFTDILGTIKNVEIPVSQLEKALDNKVMFDGSSIEGFVRIEESDMYLYPDLDTFVIFPWTAEKGKVARFICDIYNPDGTPFEGDPRNNLKRILKEMEDMGFSDFNLGPEPEFFLFKLDEKGEPTLELNDKGGYFDLAPTDLGENCRRDIVLELEEMGFEIEASHHEVAPGQHEIDFKYAGAIRACDDIQTFKLVVKTIARKHGLHATFMPKPLFGVNGSGMHCNLSLFRNGANAFFDKDADLQLSETAKQFIAGIVKHATSFTAVTNPTVNSYKRLVPGYEAPCYVAWSAQNRSPLIRIPASRGISTRVEVRSVDPSANPYLALSVLLAAGLDGIKNKLEAPAPIDRNIYVMTKEERLENGIVDLPATLADALEEFKSNEVMVKALGDHLFEHFVEAKEIEWDMFRTQVHPWEREQYMSQY

SEQ ID NO: 17300 - protein, 614 aa, Kluyveromyces lactis NRRL Y-1140
MKGTLVSIVLLAIKAQLARAGEDGGPLDEGEPGDETPIPDDPEDVNPITEEMFSSWALFILLFLLIAALWSSYMLTRKRVRAVHETVLSIFYGMLVGLIIRLTPGHYIQDTVTFNSSYFFNVLLPPIILNSGYELNQVNFFNNIVSILTFAIPGTLISAVVLGTILFIWTSLGLEGINISFVDALSVGATLSATDPVTILSIFNAYKVDPKLYTIIFGESLLNDAISIVMFETCQKFHGKKLQFSSFFEGIGMFMMTFTVSLLIGCMIGMLVALFLKHTYIRRYPQIESCIILLVAYQSYFFSNGCHMSGIVSLLFCGITLKHYAYYNMSRRTQVTLKYIFQLLARLSENFIFIYLGLALFTEVELVYKPMLIIITAISICVARWSAVLPLSNFVNWFYRMKTLRSMGLNANSESEYSIPDEIPYQYQMMVFWAGLRGAVGVALAMGIQGEFKFTLLATVLVVVVLTVIIFGGTTASMLEILNIKTGCVDENDISDDEFDIEAPRPISLANSSLNLSTDFRSDFPPLATSVNAAAGIISPEDTPSQQLNGPRFSFDGAQIRSSVDKIFQQDQWFANFDEQVLKPVFLDNNSAIPSQTNTKSSNSPNDMSVRRTL

SEQ ID NO: 17301 - protein, 429 aa, Clostridium thermocellum ATCC 27405
MNKNIFSSKILPLILVALLSSTVTAYGFLQWYERNPKYVVLSEEEAKVFEKKSNNKFDADYAITFDKNSVDIENIKKYNKVKKLLTSHYYQEVDQNQMLEGAIAGMVSALKDPYTVYFTKDQMQVFTESTSGSYVGIGVSLNMDSDGLMTVVEAFNGSPAKEAGIMPGDKIVKVDDQDVTTISDQDYIVSIIKGEENTKVKITVFRPSEGTYVDFDIIRKKIKIENITSELIDKDIGYIKINMFDSEIAKYFGDHLNGLLAKNIKGLIIDLRDNPGGDYKQVCAIADRLLPEGLIVYTEDRLGNRIEEKSDSTELGMPLAILVNGNSASASEILAGAVKDHDKGTLIGTRTFGKGLVQAVEPLEDGSGLKFTIARYFTPSGVCIHQDGIEPDIEVKLDEKYSNLPVSQVPREDDTQLQKAVEVIHGQID

SEQ ID NO: 17302 - protein, 298 aa, Schizosaccharomyces pombe
MSVQELSHPLIKDGWFREINNMWPGQAMTLKVKKVLYAGKSKYQDVLVFESETYGHVLVLDGAIQATERDEFSYQEMIAHLALNSHPNPKKVLVIGGGDGGVLREVVKHECVEEAILCDIDEDVIKVSKQYLPEMSAGFNHPKVKVHIGDGFKFLQDYQNTFDVIITDSSDPDGPAEALFQKPYFQLLSDALRGGGVITTQAECMWIHLGVISNVLTAVKTVFPNVRYAYTTIPTYPSGSIGFVVASKDASIDLSKPLRKWSPEEENKLCKYYNSEIHAASFVLPTFARDVVDKATSS

SEQ ID NO: 17303 - protein, 95 aa, Glycine max
  misc_feature (29)..(29): Xaa can be any naturally occurring amino acid
ILWLQTPLANCKKIFKGSVKYAWATVSTXANGGVGFMLCFTEGPPVNFQHPINKLNPKKNGGAKGPFKFFNPKNHGGAFCLPFFVGKVVLSHTHL

SEQ ID NO: 17304 - protein, 448 aa, Streptococcus pyogenes MGAS10394
MAITVADIRREVKEKNVTFLRLMFTDIMGVMKNVEIPATKEQLDKVLSNKVMFDGSSIEGFVRINESDMYLYPDLDTWIIFPWGDENGAVAGLICDIYTAEGKPFAGDPRGNLKRALKHMNEIGYKSFNLGPEPEFFLFKMDDKGNPTLEVNDNGGYFDLAPIDLADNTRREIVNILTKMGFEVEASHHEVAVGQHEIDFKYADVLKACDNIQIFKLVVKTIAREHGLYATFMAKPKFGIAGSGMHCNMSLFDNQGNNAFYDETDKRGMQLSEDAYYFLGGLMKHAYNYTAITNPTVNSYKRLVPGYEAPVYVAWAGSNRSPLIRVPASRGMGTRLELRSVDPTANPYLALAVLLEAGLDGIINKIEAPEPVEANIYTMTMEERNEAGIIDLPSTLHNALKALQKDDVVQKALGYHIYTNFLEAKRIEWSSYATFVSQWEIDHYIHNY

SEQ ID NO: 17305 - protein, 643 aa, Candidatus Blochmannia floridanus
MGKIIGVDLGTTNSCVAIIESNKPRVLENSEGDRTTPSVVAYTQDGEILVGQPAKRQSVTNPKNTLFAIKRLIGRRFQDQEVQRDVKIMPYKIISSNNGDAWLDIKGQKIAPPQISAEILKKMKKTAEDYLGENVTEAVITVPAYFNDAQRQATKDAGRIAGLEVKRIINEPTAAALAYGLDKEAHGNRIIAVYDLGGGTFDISIIEIDNVDGEKTFEVLATNGDTHLGGEDFDSLLINYLVEEFKKDQGIDLYNDPLAMQRLKESAEKSKIELSTSQQTDVNLPYITADSTGPKHMNLRVTRAKLESLVEDLVNRTLDPLKTALKDANLSVSSVNDVILVGGQTRMPLVQKKVSEFFNKEPRKDVNPDEAVAIGAAVQGGVLSGDVKDVLLLDVTPLSLGIETMGGVMTSLIAKNTTIPTKHSQVFSTAEDNQSAVTIHVLQGERKRASDNKSLGQFNLDGIAPAMRGIPQIEVTFDIDADGILHVSAKDKNSGREQKITIKASSGLNEEEIKKMVQEAEANAESDRKFEELVQIRNQADHLLHSTRKQLKEVGDRISLDDKNSIEQSLKELELVMKNENKGDIESKVQELIKVSGKLLEASSQKYKEKVNDSKSDLNKDKSETDASGDVVDAEFEEIKNKK

SEQ ID NO: 17306 - protein, 1134 aa, Ostreococcus tauri
AMERVSARGVDASVVARAVVADAIARERPESAREEDEDVAAASTPSEQLLERLTRTSRETSAELDAVREALETIDGSVDALRVAIGRKRAEGLEKKLREQAKAIRAAERAAREERDAVERRKRSNEETNGTTKRGVIDLTSTSAVSRGMEVKNAPTKKTTVKKAAPKADDDFFDDLFDASKGAATETERERLIRIGVLTPFDRLEGFERAVKERESSSKAAAATAAWRESRNKTKTLTAEEMPRLEANARPFASRATRNATSESTKKQMAERRAEWKAKMLENDGAVAGKRTRQSGRTMHDSDEEYANYEETAEEDRNVSEEVEFAGGLSIPGDTYERLLPHQKTCLKWLWELHCQRAGGIIGDEMGLGKTVQVSSFLCALHHSGMYSPSIIVCPATMLRQWRRELRIWAPKLKATILHDSAMSSSSGKTKARERERVFDMCVRDGDGILVTTYEQMRLFRDKICSVRWGYAVLDEGHKIRNPDADITIVSKQLQTVHRIVMSGAPIQNRLSELWSLFDFVFPGKLGTLPVFQAQFAVPIQIGGYTNASNQQVTTAYRCAVTLKDLIAPYLLRRMKCDVDVKLPEKTEQVLFCPMTQEQREAYRAYLASREVEEILDGSREALGGIDVLRKIVNHPDLLERRTQAASEEYGDASRSGKLQVTLKVLSLWREQGHRCLVFSQTQQMLDILEAAVARAGYSYRRMDGNTSIGMRMSLIDEFNDNDKGIFVFLLTTKVGGLGVNLTGANRVMLFDPDWNPSTDAQARERAWRIGQQKEVTVYRLITAGTIEEKVYHRQIYKEFLTSKVLKDPKQRRFFKARDMADLFTFDEVACGGGGDESKGTIETVELFSEVEGQILRGDVEESVISEEGAEDGEVEHGEWDPNDNHAPPKRTAKKIDGHRVRVETARDPDAHVNGDSGAGDAQILRGLFDSGNIQVAMNHDKIMGAAGVDRMAHNAEAERVARRAAEALRLSAQSARAGLAVHVPTWTGNRGAVHSTAPSASVVRPLGRFGRTSIQSRSNDSSTAALGSRALLERIAARREDNARAVEADLESSELDETQANDMMRDIILLLKSRGGRASTSFVIDAFQDRVQSHQHALFRKLLKLAADLERSPTSSREGSTSSWVLKQEFADL

SEQ ID NO: 17307 - protein, 228 aa, uncultured cyanobacterium
HEVAGAGQHELGMKFAQLIEAADNVMTYKYVVRNVAKKYGKTATFMPKPVFNDNGTGMHVHHSLWKGGEPLFFGEGTYANLSQTARWYIGGILKHAPAFLAFTNPTTNSYKRLVPGFEAPVNLVYSEGNRSAAVRIPLTGPSPKAKRLEFRSGDALANPYLAFSAMMMAGLDGIKNQIDPGDGEDRDLFELSAEELQKISTVPPSLNGALEALSADRAFLTEGGVFTD

SEQ ID NO: 17308 - protein, 145 aa, Zea mays
MASSMLSSAAVVTSPAQATMVAPFTGLKSSAAFPVTRRADNDITSIASNAGRVSCLKVWPPVGRKKLETLSYLPDLTEAELGEEGDYLLRHTWIPCVEFEPHHAFGAPRTTARTPWMLPRTGAWTSVDTSPPLLRMRLDVVLEGG

SEQ ID NO: 17309 - protein, 608 aa, Streptococcus pyogenes M1 GAS
MSKIIGIDLGTTNSAVAVLEGTESKIIANPEGNRTTPSVVSFKNGEIIVGDAAKRQAVTNPETVISIKSKMGTSEKVSANGKEYTPQEISAMILQYLKGYAEDYLGEKVEKAVITVPAYFNDAQRQATKDAGKIAGLEVERIVNEPTAAALAYGMDKTDKDEKILVFDLGGGTFDVSILELGDGVFDVLATAGDNKLGGDDFDQKIIDFLVAEFKKENGIDLSQDKMALQRLKDAAEKAKKDLSGVTQTQISLPFITAGSAGPLHLEMSLSRAKFDDLTRDLVERTKTPVRQALSDAGLSLSEIDEVILVGGSTRIPAVVEAVKAETGKEPNKSVNPDEVVAMGAAIQGGVITGDVKDVVLLDVTPLSLGIETMGGVFTKLIDRNTTIPTSKSQVFSTAADNQPAVDIHVLQGERPMAADNKTLGRFQLTDIPAAPRGIPQIEVTFDIDKNGIVSVKAKDLGTQKEQHIVIKSNDGLSEEEIDRMMKDAEANAEADAKRKEEVDLKNEVDQAIFATEKTIKETEGKGFDTERDAAQSALDELKAAQESGNLDDMKAKLEALNEKAQALAVKMYEQAAAAQQAAQGAEGAQANDSANNDDVVDGEFTEK

SEQ ID NO: 17310 - protein, 145 aa, Petunia x hybrida; identical to SEQ ID NO: 1122

SEQ ID NO: 17311 - protein, 228 aa, uncultured cyanobacterium
HEVAGAGQHELGMKFAQLIEAADNGMTYKYVVRNVAKKYGKTATFMPKPVFKDNGTGMHVHQSLWKGGEPLFFGEGTYANLSQTARWYIGGILKHAPSFLAFTNPTTNSYKRLVPGFEAPVNLVYSEGNRSAAVRIPLTGPSPKAKRLEFRSGDALANPYLAFSAMMMAGLDGIKNQIDPGDGVDVDLFELPADQLAQIATVPASLNGALEALNADKHYLMEGGVFSE

SEQ ID NO: 17312 - protein, 238 aa, Arabidopsis thaliana; identical to SEQ ID NO: 12890

SEQ ID NO: 17313 - protein, 1031 aa, Mycoplasma genitalium G37
MTVAEIKKLALNNQVFNEAKALLEKGNVIFPKKFLKRKKIIIEVLDGKVFKVQINLKTAAAHLDCSCSNDKQNCVHIIAALLKYNDLKNQDNKEFDLNKADKLECKEVEILIENVSLAIVNGSWKLKIGFVINIDKVQTNTTALRFYCCDNKDVYFLHTEDEQLFRIALDKFNSVERQTLLIFDQLNKTKQMQYENNSLLFNLDQFLSLVKEVKKPSLFLLNEDKTDNILFLRSQHKINGLSHVCGFLNNKVFDFVSYNEKTKQIVLRLAYLNKFTDFKFPYNINIYKLAFGETLFFHFLIHLKMNGFKNIFFQSDVVIVKESEYLPKMFLTIEFNTQKNKFITDAFFKYKNKNSNTLTTVYPHRYYLAQKTNTSNFNRLLFYEQALQRFYEELFQIDYLRRFENIPIKDKNQIALFKTVFDDYKTIDLAELKLTSNLLNYKQLHFSISDIKALKIEDRQLKIEFKAGGIDLKLIKSVLSNYYKGNAICIGEDGWYDLNDENAKALISFWSQIDLRNATCDANNNLLLAKYHLFEVVDTISKYTDVTNLLDEKTALQLKIASENQFHLSLDNNQINNLRKYQKEGVKWIRALEDNQFGGILADEMGLGKTAQVIFAMLDSYQSTKSLLPSLIIVPASLLLNWKSEFQKFAPHVKIVTANGNFKERSQVYESLKNQILLMSFNVLRSDIKWISQKKFHYVVIDEAQGIKNENSTVTKAAKKIKGNFCLALTGTPIENRLLDLWSCFDFVLPNFLGNKKQFSDQFEKEKNDESFQKLMKKTSPFILRRTKNKVLKELPKKIITDIYVELSEEHQKLYDKQKTDGLKEIKESDAKNALNILSLILKLRHICSLVKDNDVNDFEDNSKANAALNIIYEALENKRKVILFTQFLDVIDCFKQTLKNQKIDHLVFDGRKTVKNRNTIIQKFNSAKEPCVMLASLKAGGVGINLTAAEVVIHFDVWWNSAVENQATDRAHRIGQSKTVQVYRIIAKNTIEERVCQVQNQKQELVKKTLVEDVNFFKSLSHEELLKLFE

SEQ ID NO: 17314 - protein, 228 aa, uncultured cyanobacterium
HEVAGAGQHELGMKFAKLIQAADNVMTYKYVVRNVAKKYGKTATFMPKPVFNDNGTGMHVHQSFWKGGQPFFFSEGTYANLSQTARWYIGGILKHAPSFLAFTNPTTNSYKRLVPGFEAPVNLVYSEGNRSAAVRIPLTGPSPKAKRLEFRSGDALANPYLAFSAMMMAGLDGIKNQIDPGDGVDVDLFELPADELAQIATVPASLNGALEALNADKHYLMEGGVFSE

SEQ ID NO: 17315 - protein, 418 aa, Dictyoglomus thermophilum H-6-12
MKVRKRFWLLLFVVIIGIGFFFLPKLTNAKDSLEDIISSIRVYIEALYYVRNAYIEKNLDNKKLEYESIKGMVKALDDPYTEFFDPKSFKTFTEDMQGAFGGIGIRIESRDGKILVVSPIENTPAYKAGIKAGDEIVEVDGQSVVGKPLDVVVSLIRGEVGKEVKIKIYRDSDKKYYEYTLKREIIEVPVVDYKTLKNNIGYIKFYEFTQNSPQKMIDALKKLEKTSGLILDLRNNPGGDLRSAVMIASIFISDSDQVKTVIKNGETKTFTTKGVVVYRIDRDKNLYGEKVVKGIYRWNKPLVVLVNRYSASASEILSGALKDYGKGILVGEKTFGKGVVQTIFTLSDGSALKITTEKYLLPSGRDINKEGVQPDVVVEMAPENVGKDNDIQLNKAIEVLLKQISKLGKTEKLVLNKN

SEQ ID NO: 17316 - protein, 219 aa, Triticum aestivum
MAGDRCKGAIAGCELCGGVAAVHCAADSAFLCVPCDAKVHGANFLASRHLRRRLVHAAADEDAGSAGSGSGSESSSSSSCVSTADSCAAASAATRAAGRRRAGCKHRRARAEVVLEGWAKRMGLAAGTARRRAARAAGALRALGRGVSASRVPLRVAMAAALWSEVAGSGCAEAALLRRLEASSHVPARLVVTVASWMARTAVRAPAPAPAEEGWAECS

SEQ ID NO: 17317 - protein, 228 aa, uncultured cyanobacterium
HEVAGAGQHELGMKFAELIQAADNVMTYKYVVRNVAKKYGKTATFMPKPVFNDNGTGMHVHQSFWKGGQPLFFGEGTYANLSQTARWYIGGILKHAPSFLAFTNPTTNSYKRLVPGFEAPVNLVYSEGNRSAAVRIPLTGPSPKAKRLEFRSGDALANPYLAFSAMMMAGLDGIKNQIDPGDGVDVDLFELPADELAQIATVPASLNGALEALNADKHYLMEGGVFSE

SEQ ID NO: 17318 - protein, 273 aa, Carboxydothermus hydrogenoformans Z-2901
MWYIEKHNENYQVGWRVSDILYQKKTPYQNLAIVEFAEFGRSLILDDAVQTTEKDEYVYHEMLVHPAAFTHKSPRRALIIGGGDGGTLREVLKHKTIEKVDLVEIDEEVIKASKQFLPSLSESFNDPRVEVIIDDGIRYVKKVKNYYDLIFVDASDPVGPAVVLYSEEFYRSLFDALTADGIAAVQSESPNFYPDIFVKIVTTLRDIFPKVNVALAPVPSYISGFFAFTVASKVYNPKETTPNITFPTKYYNEEIHNACFALPNFILDMLKIR

SEQ ID NO: 17319 - protein, 196 aa, Neisseria gonorrhoeae
DPLAGIPAELKTIPMAVLVNSGSASASEIVAGALQDHKRAVIVGTQSFGKGSVQTLIPLSNGSAVKLTTALYYTPNDRSIQAQGIVPDVEVKDKERTFESREADLVGHIGNPLGGEDVNSETLAVPLEKDADKPAAKEKGKKKKDEDLSSRRIPNPAKDDQLRKALDLVKSPEQWQKSLGLAAKKPVSNKDKKDKK

SEQ ID NO: 17320 - protein, 371 aa, Tripterygium regelii; identical to SEQ ID NO: 10406

SEQ ID NO: 17321 - protein, 228 aa, uncultured cyanobacterium
HEVAGAGQHELGMKFAKLIQAADNVMTYKYVVRNVAKKYGKTATFMPKPVFNDNGTGMHVHQSLWKGGQPLFFGEGTYANLSQTARWYIGGILKHAPSFLAFTNPTTNSYKRLVPGFEAPVNLVYSEGNCSAAVRIPLTGPSPKAKRLEFRSGDALANPYLAFSAMMMAGLDGIKNQIDPGDGVDVDLFELPADELAQIATVPASLNGALEALNADKHYLMEGGVFSE

SEQ ID NO: 17322 - protein, 141 aa, Vitis vinifera
MASQFGSMLTRLGNLSTSDHASVVSINLFVALLCGCIVIGHLLEENRWVNESITALVIGVCTGVVILLTSGGRSSHLLVFSEDLFFIYLLPPIIFNAGFQVKKKQFFRNFITIMLFGAVGTLISCGIITSGMSNHLILLLL

SEQ ID NO: 17323 - protein, 161 aa, Pseudomonas fluorescens PfO-1
MSDNLLNIPCTTIKGEQKTLADFAGKAVLVVNTASKCGFTPQYKGLEELWQTYKDQGLVVLGFPCNQFGKQEPGNEGAISEFCELNYGVSFPLFKKIEVNGTGAHPLFVQLKKRAPGVLGSQGIKWNFTKFLIGKDGQLVKRFAPATKPQDLSREIEALLK

SEQ ID NO: 17324 - protein, 360 aa, Wimmeria acuminata; identical to SEQ ID NO: 10409

SEQ ID NO: 17325 - protein, 387 aa, Moorella thermoacetica ATCC 39073
MPRIWRQIGRGLLALCVLVTLAVGVGVATHFREVEQGVKTYALLRFQALQPISTDKLMEGAIRGMVEALDDPYSTYLDAETYRKLQESVTGSYGGVGLLITLDEKDKRVVVVSPFKGTPAQRAGIKSGDYITAIDGRDTTGMDLETASNLMQGEPGTRVELTILSAGDSNPRKVALTREIIKVPTVDGRMLPGHPGVGYISVTMFNEQTGADLGRELNDLRQQGMQKLILDLRNNPGGALPAAVDVASYFVPQGPVVYIADQKTSEPLMARGYAQPLPLVVLVNKGSASAAEIVAGAIKDTKSGTLVGETTFGKGIVQTIFPLPGDAAVKITTQKYLTPGKHDINKKGITPDYVVPMDPQLEQQVLAHAPDLERDVQLQKALEVLGK

SEQ ID NO: 17326 - protein, 374 aa, Wimmeria concolor; identical to SEQ ID NO: 10413

SEQ ID NO: 17327 - protein, 687 aa, Magnaporthe grisea 70-15
MSTHVPAALDQGTGYGIVLGLGALFAFGMIFVTFVLKRYNAERQTSEMFNTAGRTVKSGLVGSAVVSSWTWAATLLQSTGVCYRYGVSGPFWYASGATVQIILFATLAIELKRRAPNAHTFLEVIKARFGTAAHITFMVFGLVTNILVSLMLIVGGSATVNALTGMHTIAAIYLLPVGVVAYTMVGGLKATILTDWVHTFILLVIIIIFALTTYATSEDLGSPSAVYDLLVEAASRHPVEGNKDGSYLTMQSKEGAIFFVINIVGNFGTVFLDNGYYNKAIAASPVHALPGYILGGLSWFAIPWLTATTMGLAAIALESNPRFPTFPNRMSDDEVSEGLVLPYAAVALMGKGGAVATLLITFMAVTSATSSELIAVSSIFTYDFYRTYFNPSASGKRLIWMSHCIVVGYAAFIATFSVGLWYAGISMGYLYVMMGVIISAAVLPAALTLTWSGLNKWAATLSPICGLVAALAAWLATAKRECGVLDVKCTGSNNPMLAGNVVALLSPVVLIPIFTVIFGLDKYDWVSMMNIRQADDHDITDAAGVDVEVAPAEEAETQANFEEEQRKLVRAGKISKTMTVLMTVAFLVLWPMPMYGTGYIFSKPFFTGWVTIGIIWIFCSLGAVGLFPIYEGRKTLVNTFKFMISDLGGKPRLKRLDAQQVGSPSGGSTPAEKAQDSKDGAVQVTPA

SEQ ID NO: 17328 - protein, 131 aa, Salmonella enterica
GMHCHMSLAKNGTNLFSGDKYAGLSEQALYYIGGVIKHAKAINALANPTTNSYKRLVPGYEAPVMLAYSARNRSASIRIPVVASPKARRIEVRFPDPAANPYLCFAALLMAGLDGIKNKIHPGEAMDKNLY

SEQ ID NO: 17329 - protein, 629 aa, Streptomyces fradiae
MARAVGIDLGTTNSVVSVLEGGEPAVVTNTEGARTTPSVVGFAKNGDVLVGEVAKRQAVTNVDRTVRSVKRHMGDTGWRFPENGDIDGRRYTAQEISARILQKLKRDAEGYLGEDVRDAVITVPAYFNDAERTATKEAGEIAGLNVLRIVNEPTAAALAYGLDKESDQTILVFDLGGGTFDVSLLEIGDGVVEVKATNGDTHLGGDDWDQRIVEHLAGRFRNAYGIDITKDRMATQRLREAAEKAKIELSAATETSVNLPYLSASAEGPLHLDEKLTRAQFQQMTSDLLERCQVPFRNAVKDAGIEISGIDHVILVGGSTRMPAVADLVKELTGKDPHKGVNPDEVVAIGASLQAGVLKGEVKDVLLLDVTPLSLGIETKGGIMTKLIERNTTIPTKRSEIFTTAEDNQPSVQIQVYQGEREIAAYNKKLGMFELTGLPPAPRGVPQIEVSFDIDANGIMHVTAKDLGTGKEQKMTVTGGSSLPKDDIDRMVREAERHAEEDHRRREAAEARNQGEQLVYQTEKFLADHADGTGKVPGEIRTEVETAVTELKEKLKGDDTAQIRTAAERVAAVSQKLGQAVYADAQAAQAAGGAQAGPEGGEAGGRDEDEVVDAEIVDEDDRARRGGPA

SEQ ID NO: 17330 - protein, 374 aa, Zinowiewia concinna; identical to SEQ ID NO: 10416

SEQ ID NO: 17331 - protein, 469 aa, Streptomyces coelicolor A3(2)
MFQNADDVKKFIADEDVKFVDVRFCDLPGVMQHFTLPATAFDPDAEQAFDGSSIRGFQAIHESDMSLRPDLSTARVDPFRRDKTLNINFFIHDPITGEQYSRDPRNVAKKAEAYLASTGIADTAFFGPEAEFYVFDSVRFATRENESFYHIDSEAGAWNTGALEDNRGYKVRYKGGYFPVPPVDHFADLRAEISLELERSGLQVERQHHEVGTAGQAEINYKFNTLLAAADDLQLFKYIVKNVAWKNGKTATFMPKPIFGDNGSGMHVHQSLWSGGEPLFYDEQGYAGLSDTARYYIGGILKHAPSLLAFTNPTVNSYHRLVPGFEAPVNLVYSQRNRSAAMRIPITGSNPKAKRVEFRAPDASGNPYLAFSALLLAGLDGIKNKIEPAEPIDKDLYELAPEEHANVAQVPTSLGAVLDRLEADHEFLLQGDVFTPDLIETWIDFKRANEIAPLQLRPHPHEFEMYFDV

SEQ ID NO: 17332 - protein, 542 aa, Microcystis aeruginosa PCC 7806
MRGESLVAWAAQQNSLDSSSAVNSQTVGDIPELVLILILLLLIATAVALVTQRLRISYVAGLVLAGLPITDLLSRRIGLDPFLVLNLFLPILIFEAAINTDISRLRSTFKPIALLAGPGSVFSAAIIAVLVKFGLGLDWIPALLVGVILANTDTVSIIAVFKEIRVPSRLSTIVEGETLFNDAAALVTFNLLLVIYATGTISTTQVIKEVLIVALGGGLVGAVLGYLCLPIYVRLRDPLSSLLLTVALALGAFQLGQFLGVSGAVAVVIAGLVFGNLGLPRSASASDRITLISFWEYAGFIVNTFIFLLIGIEINPLTLWQTLPSIVLVILAYQLGRILSVYSLLWVLRWIDRPIPLRWQHILILGNIKGSLSMALAVAIPLTLTGRELIIELVFGAVLFSLVIQGLALPWLIKKLDISQVSAVTREIGQLQLQLIASKAAQDELANLLKSGVLPKAVYEELWASYQAKVAVSERLLRDAYNQSRSGQRSPNNGQLDAIRRRLFLAEKAALSDALRKRIVPEDLVQSYVKGLDEKLLSLDDD

SEQ ID NO: 17333 - protein, 374 aa, Zinowiewia concinna; identical to SEQ ID NO: 10419

SEQ ID NO: 17334 - protein, 204 aa, Zea mays
MASSMLSSAAVATSPAQATMVAPFTGLKSSAAFPVTRKSNTDITSIANNGGRVSCMKVWPPVGKKKFETLSYLPDLTDVELAKEVDYLLRNKWIPCVEFELEHGFVYREHGSTPGYYDGRYWTMWKLPLFGCTDSAQVLKEVQECKTEYPNAFIRIIGFDNNRQVQWISFIAYKPPSFTGGLISFQKQPKKNPNPFPFPMAGFT

SEQ ID NO: 17335 - protein, 605 aa, Melampyrum pratense; identical to SEQ ID NO: 10424

SEQ ID NO: 17336 - protein, 382 aa, Melampyrum sylvaticum; identical to SEQ ID NO: 10427

SEQ ID NO: 17337 - protein, 466 aa, Melasma scabrum; identical to SEQ ID NO: 10430

SEQ ID NO: 17338 - protein, 585 aa, Leuconostoc mesenteroides subsp. dextranicum
TTNSAVAVLEGGEPKIITNPDGGRTTPSVVSFKNGESQVGDVAKRQAITNPDTIISIKSHMGEAGYKVNANGKDYTPQEISAMILQYIKGYAEDYLGEKVEKAVITVPAYFNDAQRQATKDAGKIAGLEVERIINEPTAAALAYGLDKLDKDEKILVYDLGGGTFDVSILELGDGVFEVLSTNGDTHLGGDDFDNKVIDYLAEQFKAENGVDLKDDKLALQRLKDAAESAKKTLSSANEAQIDLPFIASGDNGPLHLQTSLTRAKFNELTADLIKKAEQPVLSALKDAGLSFSDIDEVILNGGSTRIPAVQESVKKMTGKEPNHSINPDEAVALGAAVQGGVITGDVKDVVLLDVTPLSLGIETMGGVFTKLIERNTTIPTSKSQVFSTAADNQPAVDIHVLQGERSMAADNKTLGRFQLADIPAAPRGVPQIEVTFDIDRNGIVNVSAKDLGTQKEQKITIQAAGGLSDEEIEKMMNDAKANEEADAKKKEAVDTRNEADQLIFQTEKTLEEVGDKLGDDEKKPTQDALEALKKAKEDAAADDADLTDLKAKSEELTKVAGELAMKLYQQAAPKDGAEGDAKSA

SEQ ID NO: 17339 - protein, 481 aa, Arabidopsis thaliana; identical to SEQ ID NO: 16651

SEQ ID NO: 17340 - protein, 612 aa, Melasma scabrum; identical to SEQ ID NO: 10433

SEQ ID NO: 17341 - protein, 544 aa, Desulfitobacterium hafniense Y51
MIKANTKAGRILTASALALILTVSAPAAALGSPVDDVRSLLESQYVDPVDPWVLSASSVEEMLKRLDDPHTVFFTQKEYQNFLNSMDLSFSGIGVYIELEPRGLEIVGIIPGSPAEEAKLKTGDIIAQVGGQSLAGLSQDAATTLIKGPEGTTIDIVVLRGEERLSLKVARRAVEVPTVSGEMLNEDIGYVAIESFGETTEELFEQVIKELDKQGADAWVMDLRNNPGGYLDSALSLAGYFIGEQTALQTKDRSQKFEPYQAEKQEFIIAEPVIFLTNENSASASEILTAVVKDYQKAVVVGTNTYGKGSVQSLWQLTDGDVLKITVAKFYSPYGKEINGVGISPDVEILENDPLEMAVLMLAGSIQGNDDGQEVADLVQFTAGGKDWNISLEEARNPEYWSAYRELIQNNSFPGGFSWRHNSDWAAISQSEQDALWPLFYPGYHGMKELKDLAVDKTFTVRFTAPIDFKSVTENSFELIESESGKRMPVTFEQVDERSVKVIPQGLLEPEKTYWLLTHQGIAAKDGSILKEGALTVGTTGAGH

SEQ ID NO: 17342 - protein, 585 aa, Leuconostoc mesenteroides subsp. cremoris
TTNSAVAVLEGGEPKIITNPDGGRTTPSVVSFKNGESQVGDVAKRQAITNPDTIISIKSHMGEAGYKVNANGKDYTPQEISAMILQYIKGYAEDYLGEKVEKAVITVPAYFNDAQRQATKDAGKIAGLEVERIINEPTAAALAYGLDKLDKDEKILVYDLGGGTFDVSILELGDGVFEVLSTNGDTHLGGDDFDNKVIDYLAEQFKSENGVDLKDDKLALQRLKDAAESAKKTLSSANEAQIDLPFIASGDNGPLHLQTSLTRAKFNELTADLIKKAEQPVLSALKDAGLSFSDIDEVILNGGSTRIPAVQESVKKMTGKEPNHSINPDEAVALGAAVQGGVITGDVKDVVLLDVTPLSLGIETMGGVFTKLIERNTTIPTSKSQVFSTAADNQPAVDIHVLQGERSMAADNKTLGRFQLADIPAAPRGVPQIEVTFDIDRNGIVNVSAKDLGTQKEQKITIQAAGGLSDEEIEKMMNDAKANEEADAKKKEAVDTRNEADQLIFQTEKTLEEVGDKLGDDEKKPTQDALEALKKAKEDAAADDADLTDLKAKSEELTKVAGELAMKLYQQAEPKDGAEGDAKSA

SEQ ID NO: 17343 - protein, 71 aa, Zea mays
MGFRGAQEGGGLLSWKGMNSDSEATGLKFFLRIFGIGPGAKQMFSFLGDTCDAPVDKHSKLKGHAVTGFRM

SEQ ID NO: 17344 - protein, 494 aa, Glycine max
MVIESRFPLAHRRKKGLGSRNRDSGKEFSIGVVPRISSICYPQCGYFPSSGGFTAKRRKCNSLLRLKDCSENIRQHASILFVRLVTGVMLVMAVSLASSEPSWALSEENLLFLEAWRTIDRAYIDKSFNGQSWFRYREDALRNEPMNNRDETYTAIRKMLATLDDPFTRFLEPEKFRSLRSGTKGALTGVGLSIGYPTKADMQPGGLVVISASPGGPAYRAGVSSGDVILAIDDTNTENMGLYDAAERLQGPEGSSIALTIRSGSDIKHLDLTREKVSLNPVKSRLCKLPASGNDSPTIGYIKLTSFNQKASSAIKEAINTLRSDNVNAFVLDLRDNSGGLFPEGIEIAKIWLDKGVIVYICDSRGVRDILDTDGSSALATSEPLVVLVNKGTASASEILAGALKDNKRAVLFGEPTFGKGKIQSVFELSDGSGLVVTVARYETPAHTDIDKVGVIPDHPLPISFPKDEDAFCNCLQDPASSCYVNRIQLFSKS

SEQ ID NO: 17345 - protein, 228 aa, uncultured cyanobacterium
HEVVATAQHELGMKFAELIQAADNVMIYKYVVRNVAKKYGKTATFMPKPIFADNGSGMHVHQSLWKAGQPLFFAPGTYANLSDTARWYIGGILKHAPSFLAFTNPTTNSYKRLVPGFEAPVNLVYSEGNRSAAVRIPLTGPSPKAKRLEFRSGDALANPYLAFSAMMMAGIDGIKNQIDPGAGVDVDLFELPADELAKIATVPASLNGALEALRADHHYLLEGGVFTD

SEQ ID NO: 17346 - protein, 293 aa, Nostoc sp. PCC 7120
MVGDIMAASEDKRQLVIIGGAEDKDGDSQILREFVRRSGGTKAYIVIMTAATELPRDVGENYIRVFERLGAENVRIIDTETREDASSSTALEAIAKATGIFFTGGDQARITSIIKDTEIDAAIHKRFSEGIVVGGTSAGAAVMPDKMIVEGDSETNPRLEIVEMGPGLGFLPGVVIDQHFSERGRLGRLITALIREPAVLGFGIDENTAMVVTDSQIEIIGQGSVTIVDESESTYNNMDKILRDEALAICGAKLHILPHGYKFDLKTRQPILTNGAAVDASVPVGSAIISAAV

SEQ ID NO: 17347 - protein, 228 aa, uncultured cyanobacterium
HEVVATAQHELGMKFAELIQAADNVMIYKYVVRNVAKKYGKTATFMPKPIFADNGSGMHVHQSLWKAGQPLFFAPGTYANLSDTARWYIGGILKHAPSFLAFTNPTTNSYKRLVPGFEAPVNLVYSEGNRSAAVRIPLTGPSPKAKRLEFRSGDALANPYLAFSAMMMAGIDGIKNQIDPGAGVDVDLFELPADELAKIATVPASLNGALEALRADHHYLLEGGVFTK

SEQ ID NO: 17348 - protein, 472 aa, Neisseria meningitidis MC58
MSIKNAVKLIEESEARFVDLRFTDTKGKQHHFTVPARIVLEDPEEWFENGQAFDGSSIGGWKGIQASDMQLRPDASTAFVDPFYDDATVVLTCDVIDPADGQGYDRDPRSIARRAEAYLKSSGIGETAYFGPEPEFFVFDGIEFETDMHKTRYEITSESGAWASGLHMDGQNTGHRPTVKGGYAPVAPIDCGQDLRSAMVNILEELGIEVEVHHSEVGTGSQMEIGTRFATLVKRADQTQDMKYVIQNVAHNFGKTATFMPKPIMGDNGSGMHVHQSIWKDGQNLFAGDGYAGLSDTALYYIGGIIKHAKALNAITNPSTNSYKRLVPHFEAPTKLAYSAKNRSASIRIPSVNSSKARRIEARFPDPTANPYLAFAALLMAGLDGIQNKIHPGDPADKNLYDLPPEEDALVPTVCASLEEALAALKADHEFLLRGGVFSKDWIDSYIAFKEEDVRRIRMAPHPLEFEMYYSL

SEQ ID NO: 17349 - protein, 184 aa, Photobacterium profundum SS9
MALKSLAIVEAEWFFYPHIRVRMMMTTFYDISADNIRGESVSMNEFAGKLVLVVNTASECGFTPQYRGLQDLYAKYKDQGLVIIGFPCNQFGGQEPGENTDIAESCLINYGVDFPMFAKVDVNGADSHALFQYLVKALPGTFGSKVKWNFTKFMISRDGKPLKRFAPTKKPESMEADIVRALKA

SEQ ID NO: 17350 - protein, 73 aa, Brassica napus
  misc_feature (59)..(60): Xaa can be any naturally occurring amino acid
MGRVKLEIKRLESTGNRQVTYSKRKCGILKKAKELSILCDIDILLLMFSPTGKPTMLHXXHSCIEEVISKFAQ

SEQ ID NO: 17351 - protein, 636 aa, Nostoc sp. PCC 7120
MVQETSTDLVRINARKTDVFDLFNCLYYVGSNPYLDTGALVFDFAVVEDRKLLPIEDYITRVGDRYPHLREQNYESYAHLFAQTVSEVGKLDMNLHFHRWSVKPYSKYTKIAVQSLHERTIRSVVYLVWDWFEAINQDDDFFWDDQLVTLQNRFRQSVYGGPTVYALLRTAYEKGIPTFYLWDEGLMQYGWGKKHIRGVATTFNCDSHIDSDFTTRKDDCKAFLHTLGFPVPQGEIVYSPKEARQVAKDIGYPVAVKPVVGHKGIGVTADVKDVDELEVAYDRALEAIPENEPARIIVEKSIKGKDFRLLCVNGRFVAATERHPASVVGDGDSTIWELIQKENRKAVRLDTPTSPMSKIIVDDAMEHYLEEQRLSLKTVLDKGETVHLRKVANLSAGGMSINATHAIHDDNIILAQDIAQYFRLTCLGIDVIAEDLSESWKVGNFAIIEINAAPGVMMHLNPAVGESVDVPSHILETFFESGLDARIPIMTFNKISVEELQTTIDHILLQHPEWTIGAVCRDAVFVNRSQKVLRDDYNSNIQSLLRNPKLDLLIAEYPEDTLEEDGMFYQGSNLVVLDNPSETEMMLARDVFDGSTIVIKKEKDVSIRRKGLIEDYTLGEDEPFTRVYLKEIGTIL

SEQ ID NO: 17352 - protein, 471 aa, Burkholderia thailandensis E264
MSKTVADVMQLAKDEDVKFVDFRFTDTRGKEQHVSVPVSAFGEDKFESGHAFDGSSIAGWKGIEASDMLLMPDPNAAFIDPFYEESTLVLTCDVVEPADGKGYERDPRSLAKRAEAYLKSTGIGDTAYFGPEPEFFIFDSVQWNTDMSGCFVKINSEEAPWSSAKEFEGGNTGHRPGVKGGYFPVAPVDQFQDMRSEMCLLLEQIGIPVEVHHHEVAGQGQNEIGTKFSTLLQRADWTQWSKYIIHNVAHSYGKTATFMPKPVVGDNGSGMHVHQSIWKDGQNLFAGNGYAGLSETALFYIGGIIKHARALNAITNPTTNSYKRLVPHFEAPVKLAYSARNRSASIRIPHVSNPKGRRIETRFPDPMANPYLCFSALMMAGLDGIQNKIHPGEAADKNLYDLPPEEDAKIPTVCAGLDQALEALDKDREFLTRGGVFTDAMIDAYLGLKEQELAKFRMTTHPIEFEMYYSL

SEQ ID NO: 17353 - protein, 604 aa, Carboxydothermus hydrogenoformans Z-2901
MGRIVGIDLGTTNSCIAVMEGGEVIVIPNAEGGRTTPSVVAFGKNGERIVGQVAKRQAITNPERTVISIKRHMGTNYRVKIDDKEYTPQEISAMILQKLKQDAEAYLGEKIEKAVITVPAYFTDAQRQATKDAGRIAGLEVLRIINEPTAAALAYGLDKEGEQTILVYDLGGGTFDVSILEIGDGVFEVKATAGNNRLGGDDFDQRIIDWLVENFKKEHGIDLRNDKMAMQRLKEAAEKAKIELSGVLETQINLPFIAANQNGPLHIDVTLTRAKFNELTADLVEATMGPTRQALADAGLKPEDIDKILLVGGSTRIPAVQEAIRKFFNKEPHKGINPDECVAIGAAIQAAVLAGEVKDVVLLDVTPLSLGIETLGGVFTKLIERNTTIPTSKSQIFTTAADNQTSVEIHVLQGERPMAADNVSLGRFTLTGIPPAPRGVPQIEVRFDIDVNGIVHVSAKDLGTGREQSITITNTSNLSEAEIKRMVEEAERYAEEDRKRKEEVETRNQADSLIYQAEKTLKDFKDKANPDLVARVEKAIAELREAMNSKDVQLMRAKMEELTKPLYELTSSIYQQSANQNQTQTGTNTQGNVYDADYKVNDDK

SEQ ID NO: 17354 - protein, 261 aa, Nicotiana tabacum
MEAANHNNDNGCTNESPYISSVLPGWFSEISPLWPGEAHSLKVEKILFQGKSDYQNVMVFQSSTYGKVLVLDGVIQLTERDECAYQEMIAHLPLCSIPNPKKVLVIGGGDGGVLREVSRHSSVEQIDICEIDKMVVEVSKQFFPDVAVGYEDPRVNLHIGDGVAFLKNVAAGTYDAVIVDSSDPIGPAQELFEKPFFDSIARALHPGGVVSTQAESIWLHMHIIEEIVANCRQIFKGSVNYAWTTVPTYPSGMIGFMLCST

SEQ ID NO: 17355 - protein, 252 aa, Cryptococcus neoformans var. neoformans JEC21; identical to SEQ ID NO: 1157

SEQ ID NO: 17356 - protein, 151 aa, Casuarina glauca
ALTEKQEALLKQSWEVLKQNIPAHSLRLFALIIEAAPESKYVFSFLKDSNEIPENNPKLKAHAAVIFKTICESATELRQKGHAVWDNNTLKRLGSIHLKNKITDPHFEVMKGALLGTIKEAIKENWSDEMGQAWTEAYNQLVATIKAEMKE

SEQ ID NO: 17357 - protein, 355 aa, Triticum aestivum
MAASSLWDELVVAASTGGSSGTVVSICVFTAVLCLCLVAGHLLEENKWVNESITALIIGCIVGALIFLLSKGRNSHILRFDEQLFFIYVLPPIIFNAGFQVKKKQFFHNFLTIMSFGVFGVFISVAIVSAGFYWLLPKVGFGKLDAVDYLALGVIFSSTDTVCTLQVISQDETPRLYSLVFGEGVVNDATSVVLFNAIKNMDITKIKSRAVLKVIGDFLYLFATSTILGATIGLFTAYVLKALYFGRHSTDREVALMALMAYLSYMLAELLSLSGILTVFFCGIVMSHYAWHNVTESSRITTRHIFATLSFIAETFIFLYVGMDALDMDKWKTTQASFKTSIGIFGVIISLILLG

SEQ ID NO: 17358 - protein, 251 aa, Arabidopsis thaliana
HEEALRSSTFLEDQETVSWIQYPPDEDPFEPDDFSSHFFSTMDPLQRPTSETVKPKSSPEPPQVMVKPKACPDPPPQVMPPPKFRLTNSSSGIRETEMEQYSVTTVGPSHCGSNPSQNDLDVSMSHDRSKNIEEKLNPNASSSSGGSSGCSFGKDIKEMASGRCITTDRKRKRINHTDESVSLSDAIGNKSNQRSGSNRRSRAAEVHNLSERRRRDRINERMKALQELIPHCSKTDKASILDEAIDYLKSL

SEQ ID NO: 17359 - protein, 251 aa, Arabidopsis thaliana
HEEALRSSTFLEDQETVSWIQYPPDEDPFEPDDFSSHFFSTMDPLQRPTSETVKPKSSPEPPQVMVKPKACPDPPPQVMPPPKFRLTNSSSGIRETEMEQYSVTTVGPSHCGSNPSQNDLDVSMSHDRSKNIEEKLNPNASSSSGGSSGCSFGKDIKEMASGRCITTDRKRKRINDTDESVSLSDAIGNKSNQRSGSNRRSRAAEVHNLSERRRRDRINERMKALQELIPHCSKTDKASILDEAIDYLKSL

SEQ ID NO: 17360 - protein, 468 aa, Oceanicola granulosus HTCC2516
MSNADVLKLIEDEDVQYVDVRFTDPRGKLQHVTIDVSQIDEDFLEEGFMFDGSSIAGWKSIDQSDMKLMPDTDSAYIDPFYAEKTLCLHCTVVEPDTGEPYNRDPRGTALLAEAYLKSSGIGDAAFFGPEAEFFLFDDVRFAVTTNKVSYQVDAIDASWNTDTEYEMGNTGHRPGVKGGYFPVNPIDDAQDIRSEMLSTMKKLGMKVDKHHHEVASCQHELGLVFDSLTKQADEIQKYKYVIHNVAQAYGKTATFMPKPIAGDNGTGMHVNMSIWKDGKPLFAGDKYADLSEEALWFIGGILKHAKALNAFTNPSTNSYKRLIPGFEAPVLRAYSANNRSGCVRIPWAESPKAKRVEARFPDPSANPYLCFAALLMAGLDGIKNKIDPGPASDKDLYDLPPEELAGIPTVCASLREALEELEADHDFLLVGDVFTRDQIEGYMGLKWEEVYAYEHTPHPIEFKLYYSC

SEQ ID NO: 17361 - protein, 527 aa, Erythrobacter sp. NAP1
MTLETIDIIIIAGYALALLGIALYVSREPKGHNKNTEDYFLAGRALPWWAIGASLIASNISAEQIIGQSGEGFAIGIAIAAYEWQAAIVLLIVAKYFLPIFLKRRIYTMPQFLEQRYGAGVKNLMSVFWVALYTAVNLTAVLWLGGLAIDTLTGWGVMPAMMALAGFAALYSLYGGLKAVALTDIIQVVILIIGGFAITWFALDALPADGAVAGFSYLMQEMPGHFEMILDTDDVGYDKLPGIWTLLGGLWVLHFSYWGFNQYIIQRALGAENLGEAQKGLAFAAFLKLLVPFIVVIPGIAAVILAQQGLLNGDALSEASDRTYGELMGFAPAGLRGLVFAALIAAIVSSLASMMNSISTIFTMDLYRSWKPDEAETHYVTVGRIAAFCAMVIALVLARPFLGGFESAFQTVQEYTGYIAPGIVIVFLLGFFDKRANTAGAFTALIGSVALNLVVNAVFPELPFVVRIWIVFMVGIVAAMVVSRVTARPDEERTVNLSDIAFATSTLFNTLAAITVAILVGLYIWLW

SEQ ID NO: 17362 - protein, 208 aa, Litchi chinensis
MGRGKIEIKRIENSSDRQVTYSKRRNGIIKKAKEITVLCDAKVSLIIFASSGKMHEYCSPSTTLVEILDQYHKQSGKKLWDPKHENLSSEIDRIKKENDSMQIKLRHLKGEDLTSLNHRELMAIEEALENGLAGLRDKQSEHVEGMRENLKELEETHKHLNFVMRQREMAMENNVRELESGYHQQPYQRAAVNHNDYNPQMPFAFREL

SEQ ID NO: 17363 - protein, 538 aa, Oryza sativa Indica Group
MLRTKTPRPRGGKSRRATAAAGKEREREREREREGRSPSGELSLQLEHVSLFSFLADAPREGAAAARTPFTPFEELLEGSCDPDPTPPPPLPPLQPQATPMDADEVVEEKDSGILSQDFFCTPDYITPDAPQLGSGFDANKENIPCPNSPEKSVCRSKRYKRDCSPKGLGSNDIFDSQWIAPVQFEGLDDSEEEQLKESSSHKRGSYVSQSAVALRCRVMPPPCIRNPYLNTDHQIDDNVFGGRQCKSSGFSPSVDGDGLSRYRTDFHEIEVIHFHFMLVLLMSTLDFQQIGRGNFSVVFKVLKRIDGCLYAVKRSIRQLHNDRERRQAVKEVQALAALGCHENIVGYFTSWFENKQLFIQMELCDRCLSMDRNQPLKCGEALELLYQICKGLDFIHERGIAHLDVKPDNIYVRNGVYKLGDFGCATLIDRSLAIEDGDSRYMPPEMLNDKYEHLDKVDIFSLGAAIYELIRGTQLPDSGPQFTSLREGKIALLPGCPMQFQSLIKSMMDPDPVRRPSAKEVLRHPIFDKLHKAPAKK

SEQ ID NO: 17364 - protein, 122 aa, Dickeya dadantii
LLDAINQRGSYPVRIVGEQQQVETVSQVSAVHSGSPQAVELIAGVDLVTTAVGPQILAKIAGAIAQGLVKRHANGNTTPLNIIACENMVRGTSQLKQHVLAQLPEDIQAWVAQHVGFVDSAV

SEQ ID NO: 17365 - protein, 122 aa, Pectobacterium carotovorum subsp. carotovorum
LLDALNNRTSYTVRIVGDNTQVDTVSNVSAVHSGSQDAVALIAVADLVTTAVGPQILEKIAGTIAQGLVKRHNDGNTRPLNIIACENMVRGTSQLKQHVLKLLPEGHQEWVVEHVGFVDSAV

SEQ ID NO: 17366 - protein, 157 aa, Glycine max
MEPMDIVGKSKEDASLPKATMTKIIKEMLPPDVRVARDAQDLLIECCVEFINLVSSESNEVCNREDKRTIAPEHVLKALQVLGFGEYVEEVYAAYEQHKLETMQDSLRGGGKWSNGAEMTEEEALAEQQRMFAEARARMNGGAIASKQPDADQSLDS

SEQ ID NO: 17367 - protein, 608 aa, Orobanche californica; identical to SEQ ID NO: 10462
  misc_feature (598)..(598): Xaa can be any naturally occurring amino acid

SEQ ID NO: 17368 - protein, 122 aa, Pectobacterium carotovorum subsp. carotovorum
LLDALNSRKSYAVRIVGDNTQVDTVSNVSAVHSGSQDAVALIAVADLVTTAVGPQILEKIAGTIAQGLVKRHEDGNIRPLNIIACENMVRGTSQLKQHVLKLLPEGHQEWVVEHVGFVDSAV

SEQ ID NO: 17369 - protein, 866 aa, Ustilago maydis 521
MAPSAFVSPAKRRKLTSSSPSKQAGPTGSAQPSLLSFFGNGRPTASSPISSDTLQYTKLELNQQQAHVQSQLKTQRTADCPICSRKVPFNTVEAHVNTCLDAAETVTSEPQILRDQVNVNPISPVDQPSPVRSCSPALPAGTSTPPTVSSAVAPRQTAKLTSISELASTLDATIAPTNAQYPSSSVSTTLVSPTQAGSSLVSSAKRVASSAFTVLMKSHSESKQWATADAVEAANYRGKARSRPEARTAPFYKALEGMPLTVDAFRFGKIEGCRGYFLTHFHSDHYGGMTANWNHGPIYCSVTTANLCRTHLGVDPQWLRPLPMEVAVPVPDSGGVMVTCIEANHCPGSCLFLFEGPQTSQLLSRNHASPYIGTGRIFRYLHCGDFRASPAHTNHPSVAGKKLDIIYLDTTYCNPRYCFPAQDQVIEACAELVRRIVPEAQLRANHAAIEHDKEAGEQEDWTQAQLRKTRSSIDTNSAAANAFKGWFNTKVENSDGTLSALRPSSISRDSSNRDLKIERGVNDVSVKQEEVQEERFDYDEENLFLGEQDEEDPVEEDSTCVSGEIGSEGSTLHRVMPERSENALLDVSYPSEKANGRVKAEETDSYVQGMQVQDDSRAEVKTTTPDDANASNWLTKHTELSREAASSMRRRDGGRLLVVIGTYTIGKERIVKAVARAMNSKIFCMDSRKYRVYAQLEDPELHSMLTRSPLASVHVTNLHAINGEALRDVVAALRTHGHDFTHAVAFRPTGWTYKPPAGMDTVSPSLDRLIQWNQSRSFTFHNLLPTRDSTPDYMIYGVPYSEHSSFFELTAFALSTRYDRIIATVNVGSPASRAKMAKWFEKWMLEKRRREKLGLVQLDARASTYW

SEQ ID NO: 17370 - protein, 671 aa, Debaryomyces hansenii
MSSIVLTAAKVLLKRAAKGNEDLDDDIPDVTQPDDSLEDSNPVTEEIFSSWALFILLFLLCAALWSSYFLQQRRIKAIHETVLSIFYGMIVGLIIRVSPGHYIQDAVKFNSGYFFNILLPPIILNSGYELHQVNFFRNFGSILTFAIPGTFISALVLGTILYVWTALGLDGIHLEFVDALAVGATLSATDPVTILSIFNAYKVDPKLYTIIFGESLLNDAISIVMFETCQKFHGKTLYFSSFFEGIGLFLMSFTISTIIGILVGVFVALILKHSHIRRYPQIETCLVLLFAYESYFFSNGAHMSGIVSLLFCGITLKHYAYFNMSRRTQIATKYIFQLLAQLSENFIFIYLGLSLFTEVELVFKPLLIIISFISICVARWSAVFPLSRLLNFLYKARFKEFTSRSALSGGISSQSLPDEISHSYQMMIFWAGLRGAVGVALAMGIQGEAKWTLMATVLVVVVLTVILFGGTTASMLELFGIRVGCVDEHDDSDDEFDIEAPRLPLTSPSLNSTPSMLGSRRFGNSTTSIDTGSRNMNTPGKNIYKDDVRSRNDSSVSLSSFKPTVGTNTPHPLGISSHNSSSADLVNDEDELNASDVDDLLSNNHMASNSNINTNDPNNSGVLGALLSAEEHVKWFTKFDEQVLKPVLLDTLPHQNRKNHKDDNHPGHGPN

SEQ ID NO: 17371 - protein, 122 aa, Dickeya dadantii
LLDAINQYGSYPVRIVGEQQRVETVSQVSAVHSGGTQAVALIAEVDLVTTAVGPQILAKIAGTIAQGLIKRQENGNTAPLNIIACENMVRGTSQLKQHVLAQLPQETQAWVSQHVGFVDSAV

SEQ ID NO: 17372 - protein, 136 aa, Arabidopsis thaliana
MASSMLSSATMVASPAQATMVAPFNGLKSSAAFPATRKANNDITSITSNGGRVNCMQVWPPIGKKKFETLSYLPDLTDSELAKEVDYLIRNKWIPCVEFDTDLCTVSTVTHPDTMMDGTGQCGSFPCSVAPTPLKC

SEQ ID NO: 17373 - protein, 548 aa, Streptomyces avermitilis MA-4680
MIEPHAPAPPGAAPPWGGQSRPWLPVRPGVGRFFVLAGVFVCAACGLVYELELVALASYLIGDSVTQASVVLSVMVFAMGIGSLAAKRLRPHAAAGFGAIEAALALVGGSSAMALYAVFAWTGDWGGVWAGGPRCLLVAFSLAIGLLIGAEVPLLMELIQRIRRQDAGGAVADLFAADYVGALVGGLAFPFLLLPLLGQLEGVLLTGTVNALAGGALVLGLFRRDLTRRGRWLLIVVNLVVLGLLATAAVLVDDFERAARQAVYGRDVRVALQTGVQEVVLTGGTRGRPLDLFLDGRLRVSGHDERRYHEALVHPAMSDGRHARVLVLGGGDGLAAREVLRYADVARVDVVELDAGVVRLARRDPALSSLNAHAYDDPRVHVVTADAFCRLRHTRSAYDVVISDLPDPGITASTKLYSQEFYGLVSRVLAPGGRLVVHAGPVASRPRAYWTVEATVRAAGLRTVPYRVGGRDTGFAAGPDRSTDASRAPRDWGFVLASRTGPALSLGPGGPRLRTLTRASLAADALDPGRARPPDVAPSTLVHPRYAD

SEQ ID NO: 17374 - protein, 523 aa, Mycobacterium tuberculosis CDC1551
MTSTRQAGEATEASVRWRAVLLAAVAACAACGLVYELALLTLAASLNGGGIVATSLIVAGYIAALGAGALLIKPLLAHAAIAFIAVEAVLGIIGGLSAAALYAAFAFLDELDGSTLVLAVGTALIGGLVGAEVPLLMTLLQRGRVAGAADAGRTLANLNAADYLGALVGGLAWPFLLLPQLGMIRGAAVTGIVNLAAAGVVSIFLLRHVVSGRQLVTALCALAAALGLIATLLVHSHDIETTGRQQLYADPIIAYRHSAYQEIVVTRRGDDLRLYLDGGLQFCTRDEYRYTESLVYPAVSDGARSVLVLGGGDGLAARELLRQPGIEQIVQVELDPAVIELARTTLRDVNAGSLDNPRVHVVIDDAMSWLRGAAVPPAGFDAVIVDLRDPDTPVLGRLYSTEFYALAARALAPGGLMVVQAGSPYSTPTAFWRIISTIRSAGYAVTPYHVHVPTFGDWGFALARLTDIAPTPAVPSTAPALRFLDQQVLEAATVFSGDIRPRTLDPSTLDNPHIVEDMRHGWD

SEQ ID NO: 17375 - protein, 169 aa, Oryza sativa; identical to SEQ ID NO: 13634

SEQ ID NO: 17376 - protein, 918 aa, Bacillus cereus ATCC 10987
MINQTEVTIRLQHVSHGWFLWGEDDSGTPLSVTSWKRNAFTWHSTSFYGTFLKEASFEGRQGVMLTNAQAFEYIANKPMNSFARIQMNGPITALTEDANELWDAFTSGSFVPDMERWPKQPSWKVQNTPIEDETLASLFSAAVNESILQDNRSNDGWEDAKRLYEHYDFTKRQLDAALHEEDWLRKIGYIEDDLPFTIGLRLQEPQEEFEMWKLETIVTPKRGAHRIYVYESIDSLPKRWHDYEERILETQESFSKLVPWLKDGDTFRSELFETEAWNFLTEASNELLAAGITILLPSWWQNLKATKPKLRVQLKQNATQTQSFFGMNTLVNFDWRISTNGIDLSESEFFELVEQNKRLFNINGQWMRLDPAFIEEVRKLMNRADKYGLEMKDVLQQHLSNTAETEIVEEDSPFTDIEIELDGYYEDLFQKLLHIGDIPKVDVPSSLNATLRPYQQHGIEWLLYLRKLGFGALLADDMGLGKSIQTITYLLYIKENNLQTGPALIVAPTSVLGNWQKEFERFAPNLRVQLHYGSNRAKGEPFKDFLQSADVVLTSYALAQLDEEELSTLCWDAVILDEAQNIKNPHTKQSKAVRNLQANHKIALTGTPMENRLAELWSIFDFINHGYLGSLGQFQRRFVSPIEKDRDEGKIQQVQRFISPFLLRRTKKDQTVALNLPDKQEQKAYCPLTGEQASLYEQLVQDTLQNVEGLSGIERRGFILLMLNKLKQICNHPALYLKETEPKDIIERSMKTSTLMELIENIKDQNESCLIFTQYIGMGNMLKDVLEEHFGQRVLFLNGSVPKKERDKMIEQFQNGTYDIFILSLKAGGTGLNLTAANHVIHYDRWWNPAVENQATDRAYRIGQKRFVHVHKLITTGTLEEKIDEMLERKQSLNNAVITSDSWMTELSTDELKELLGV

SEQ ID NO: 17377 - DNA, 11722 bp, Artificial sequence
  Synthetic construct
cgcgcctgcctgcaggtactcgaggtcattcatatgcttgagaagagagtcgggatagtccaaaataaaacaaaggtaagattacctggtcaaaagtgaaaacatcagttaaaaggtggtataaagtaaaatatcggtaataaaaggtggcccaaagtgaaatttactcttttctactattataaaaattgaggatgtttttgtcggtactttgatacgtcatttttgtatgaattggtttttaagtttattcgcttttggaaatgcatatctgtatttgagtcgggttttaagttcgtttgcttttgtaaatacagagggatttgtataagaaatatctttagaaaaacccatatgctaatttgacataatttttgagaaaaatatatattcaggcgaattctcacaatgaacaataataagattaaaatagctttcccccgttgcagcgcatgggtattttttctagtaaaaataaaagataaacttagactcaaaacatttacaaaaacaacccctaaagttcctaaagcccaaagtgctatccacgatccatagcaagcccagcccaacccaacccaacccaacccaccccagtccagccaactggacaatagtctccacacccccccactatcaccgtgagttgtccgcacgcaccgcacgtctcgcagccaaaaaaaaaaagaaagaaaaaaaagaaaaagaaaaaacagcaggtgggtccgggtcgtgggggccggaaacgcgaggaggatcgcgagccagcgacgaggagcttaggcctcatcgttgaagatgcctctgccgacagtggtcccaaagatggacccccacccacgaggagcatcgtggaaaaagaagacgttccaaccacgtcttcaaagcaagtggattgatgtgatatctccactgacgtaagggatgacgcacaatcccactatccttcgaggcctcatcgttgaagatgcctctgccgacagtggtcccaaagatggacccccacccacgaggagcatcgtggaaaaagaagacgttccaaccacgtcttcaaagcaagtggattgatgtgatatctccactgacgtaagggatgacgcacaatcccactatccttcgaagctccctccctccgcttccaaagaaacgccccccatcgccactatatacatacccccccctctcctcccatccccccaacccttctagaaccatcttccacacactcaagccacactattggagaacacacagggacaacacaccataagatccaagggaggcctccgccgccgccggtaaccaccccgcccctctcctctttctttctccgtttttttttccgtctcggtctcgatctttggccttggtagtttgggtgggcgagaggcggcttcgtgcgcgcccagatcggtgcgcgggaggggcgggatctcgcggctggggctctcgccggcgtggatccggcccggatctcgcggggaatggggctctcggatgtagatctgcgatccgccgttgttgggggagatgatggggggtttaaaatttccgccgtgctaaacaagatcaggaagaggggaaaagggcactatggtttatatttttatatatttctgctgcttcgtcaggcttagatgtgctagatctttctttcttctttttgtgggtagaatttgaatccctcagcattgttcatcggtagtttttcttttcatgatttgtgacaaatgcagcctcgtgcggagcttttttgtaggtagaagcggaccggtcgcgcctcagcagtcgctgtcgttaacccagcggtactcgctgaggcgatcgcgggcccggtaccctgcaatgtgaccctagacttgtccatcttctggattggccaacttaattaatgtatgaaataaaaggatgcacacatagtgacatgctaatcactataatgtgggcatcaaagttgtgtgttatgtgtaattactaattatctgaataagagaaagagatcatccatatttcttatcctaaatgaatgtcacgtgtctttataattctttgatgaaccagatgcattttattaaccaattccatatacatataaatattaatcatatataattaatatcaattgggttagcaaaacaaatctagtctaggtgtgttttgctaattattgggggatagtgcaaaaagaaatctacgttctcaataattcagatagaaaacttaataaagtgagataatttacatagattgcttttatcctttgatatatgtgaaaccatgcatgatataaggaaaatagatagagaaataattttttacatcgttgaatatgtaaacaatttaattcaagaagctaggaatataaatattgaggagtttatgattattattattattttgatgttcaatgaagttttttttaatttcatatgaagtatacaaaaattcttcatagatttttgtttctatgccgtagttatctttaatatatttgtggttgaagaaatttattgctagaaacgaatggattgtcaatttttttttaaagcaaatatatatgaaattatactgtatattattttagtcatgattaaaatgtggccttaattgaatcatctttctcattcattttttcaaaagcatatcaggatgattgatatttatctattttaaaaattaatttaagggttcaaattaaatttaacttaaaagtgtcctaaccgtagttaaaggtttactttaaaaaaatactatgaaaaatctaatcttctatgaatcgacctgcaggatttaaatccatcgttctggggcctaacgggccaagcttactcgaggtcattcatatgcttgagaagagagtcgggatagtccaaaataaaacaaaggtaagattacctggtcaaaagtgaaaacatcagttaaaaggtggtataaagtaaaatatcggtaataaaaggtggcccaaagtgaaatttactcttttctactattataaaaattgaggatgtttttgtcggtactttgatacgtcatttttgtatgaattggtttttaagtttattcgcttttggaaatgcatatctgtatttgagtcgggttttaagttcgtttgcttttgtaaatacagagggatttgtataagaaatatctttagaaaaacccatatgctaatttgacataatttttgagaaaaatatatattcaggcgaattctcacaatgaacaataataagattaaaatagctttcccccgttgcagcgcatgggtattttttctagtaaaaataaaagataaacttagactcaaaacatttacaaaaacaacccctaaagttcctaaagcccaaagtgctatccacgatccatagcaagcccagcccaacccaacccaacccaacccaccccagtccagccaactggacaatagtctccacacccccccactatcaccgtgagttgtccgcacgcaccgcacgtctcgcagccaaaaaaaaaaagaaagaaaaaaaagaaaaagaaaaaacagcaggtgggtccgggtcgtgggggccggaaacgcgaggaggatcgcgagccagcgacgaggccggccctccctccgcttccaaagaaacgccccccatcgccactatatacatacccccccctctcctcccatccccccaaccctaccaccaccaccaccaccacctccacctcctcccccctcgctgccggacgacgagctcctcccccctccccctccgccgccgccgcgccggtaaccaccccgcccctctcctctttctttctccgtttttttttccgtctcggtctcgatctttggccttggtagtttgggtgggcgagaggcggcttcgtgcgcgcccagatcggtgcgcgggaggggcgggatctcgcggctggggctctcgccggcgtggatccggcccggatctcgcggggaatggggctctcggatgtagatctgcgatccgccgttgttgggggagatgatggggggtttaaaatttccgccgtgctaaacaagatcaggaagaggggaaaagggcactatggtttatatttttatatatttctgctgcttcgtcaggcttagatgtgctagatctttctttcttctttttgtgggtagaatttgaatccctcagcattgttcatcggtagtttttcttttcatgatttgtgacaaatgcagcctcgtgcggagcttttttgtaggtagaagtgatcaaccatggcgcaagttagcagaatctgcaatggtgtgcagaacccatctcttatctccaatctctcgaaatccagtcaacgcaaatctcccttatcggtttctctgaagacgcagcagcatccacgagcttatccgatttcgtcgtcgtggggattgaagaagagtgggatgacgttaattggctctgagcttcgtcctcttaaggtcatgtcttctgtttccacggcgtgcatgcttcacggtgcaagcagccggcccgcaaccgcccgcaaatcctctggcctttccggaaccgtccgcattcccggcgacaagtcgatctcccaccggtccttcatgttcggcggtctcgcgagcggtgaaacgcgcatcaccggccttctggaaggcgaggacgtcatcaatacgggcaaggccatgcaggcgatgggcgcccgcatccgtaaggaaggcgacacctggatcatcgatggcgtcggcaatggcggcctcctggcgcctgaggcgccgctcgatttcggcaatgccgccacgggctgccgcctgacgatgggcctcgtcggggtctacgatttcgacagcaccttcatcggcgacgcctcgctcacaaagcgcccgatgggccgcgtgttgaacccgctgcgcgaaatgggcgtgcaggtgaaatcggaagacggtgaccgtcttcccgttaccttgcgcgggccgaagacgccgacgccgatcacctaccgcgtgccgatggcctccgcacaggtgaagtccgccgtgctgctcgccggcctcaacacgcccggcatcacgacggtcatcgagccgatcatgacgcgcgatcatacggaaaagatgctgcagggctttggcgccaaccttaccgtcgagacggatgcggacggcgtgcgcaccatccgcctggaaggccgcggcaagctcaccggccaagtcatcgacgtgccgggcgacccgtcctcgacggccttcccgctggttgcggccctgcttgttccgggctccgacgtcaccatcctcaacgtgctgatgaaccccacccgcaccggcctcatcctgacgctgcaggaaatgggcgccgacatcgaagtcatcaacccgcgccttgccggcggcgaagacgtggcggacctgcgcgttcgctcctccacgctgaagggcgtcacggtgccggaagaccgcgcgccttcgatgatcgacgaatatccgattctcgctgtcgccgccgccttcgcggaaggggcgaccgtgatgaacggtctggaagaactccgcgtcaaggaaagcgaccgcctctcggccgtcgccaatggcctcaagctcaatggcgtggattgcgatgagggcgagacgtcgctcgtcgtgcgtggccgccctgacggcaaggggctcggcaacgcctcgggcgccgccgtcgccacccatctcgatcaccgcatcgccatgagcttcctcgtcatgggcctcgtgtcggaaaaccctgtcacggtggacgatgccacgatgatcgccacgagcttcccggagttcatggacctgatggccgggctgggcgcgaagatcgaactctccgatacgaaggctgcctgatgagctcgaattcccgatcgttcaaacatttggcaataaagtttcttaagattgaatcctgttgccggtcttgcgatgattatcatataatttctgttgaattacgttaagcatgtaataattaacatgtaatgcatgacgttatttatgagatgggtttttatgattagagtcccgcaattatacatttaatacgcgatagaaaacaaaatatagcgcgcaaactaggataaattatcgcgcgcggtgtcatctatgttactagatcggggatgggggatccactagtgatatccgtcgactggtacctacgcgtagctagcccgtgaagtttctcatctaagcccccatttggacgtgaatgtagacacgtcgaaataaagatttccgaattagaataatttgtttattgctttcgcctataaatacgacggatcgtaatttgtcgttttatcaaaatgtactttcattttataataacgctgcggacatctacatttttgaattgaaaaaaaattggtaattactctttctttttctccatattgaccatcatactcattgctgatccatgtagatttcccggacatgaagccatttacaattgaatatatcctgccgccgctgccgctttgcacccggtggagcttgcatgttggtttctacgcagaactgagccggttaggcagataatttccattgagaactgagccatgtgcaccttccccccaacacggtgagcgacggggcaacggagtgatccacatgggacttttcctagcttggctgccatttttggggtgaggccgttcgcggccgaggggcgcagcccctggggggatgggaggcccgcgttagcgggccgggagggttcgagaagggggggcaccccccttcggcgtgcgcggtcacgcgcacagggcgcagccctggttaaaaacaaggtttataaatattggtttaaaagcaggttaaaagacaggttagcggtggccgaaaaacgggcggaaacccttgcaaatgctggattttctgcctgtggacagcccctcaaatgtcaataggtgcgcccctcatctgtcagcactctgcccctcaagtgtcaaggatcgcgcccctcatctgtcagtagtcgcgcccctcaagtgtcaataccgcagggcacttatccccaggcttgtccacatcatctgtgggaaactcgcgtaaaatcaggcgttttcgccgatttgcgaggctggccagctccacgtcgccggccgaaatcgagcctgcccctcatctgtcaacgccgcgccgggtgagtcggcccctcaagtgtcaacgtccgcccctcatctgtcagtgagggccaagttttccgcgaggtatccacaacgccggcggccggccgcggtgtctcgcacacggcttcgacggcgtttctggcgcgtttgcagggccatagacggccgccagcccagcggcgagggcaaccagcccggtgagcgtcggaaagggtcgatcgaccgatgcccttgagagccttcaacccagtcagctccttccggtgggcgcggggcatgactatcgtcgccgcacttatgactgtcttctttatcatgcaactcgtaggacaggtgccggcagcgctctgggtcattttcggcgaggaccgctttcgctggagcgcgacgatgatcggcctgtcgcttgcggtattcggaatcttgcacgccctcgctcaagccttcgtcactggtcccgccaccaaacgtttcggcgagaagcaggccattatcgccggcatggcggccgacgcgctgggctacgtcttgctggcgttcgcgacgcgaggctggatggccttccccattatgattcttctcgcttccggcggcatcgggatgcccgcgttgcaggccatgctgtccaggcaggtagatgacgaccatcagggacagcttcaaggatcgctcgcggctcttaccagcctaacttcgatcattggaccgctgatcgtcacggcgatttatgccgcctcggcgagcacatggaacgggttggcatggattgtaggcgccgccctataccttgtctgcctccccgcgttgcgtcgcggtgcatggagccgggccacctcgacctgaatggaagccggcggcacctcgctaacggattcaccactccaagaattggagccaatcaattcttgcggagaactgtgaatgcgcaaaccaacccttggcagaacatatccatcgcgtccgccatctccagcagccgcacgcggcgcatctcgggcagcgttgggtcctggccacgggtgcgcatgatcgtgctcctgtcgttgaggacccggctaggctggcggggttgccttactggttagcagaatgaatcaccgatacgcgagcgaacgtgaagcgactgctgctgcaaaacgtctgcgacctgagcaacaacatgaatggtcttcggtttccgtgtttcgtaaagtctggaaacgcggaagtcagcgccctgcaccattatgttccggatctgcatcgcaggatgctgctggctaccctgtggaacacctacatctgtattaacgaagcgctggcattgaccctgagtgatttttctctggtcccgccgcatccataccgccagttgtttaccctcacaacgttccagtaaccgggcatgttcatcatcagtaacccgtatcgtgagcatcctctctcgtttcatcggtatcattacccccatgaacagaaatcccccttacacggaggcatcagtgaccaaacaggaaaaaaccgcccttaacatggcccgctttatcagaagccagacattaacgcttctggagaaactcaacgagctggacgcggatgaacaggcagacatctgtgaatcgcttcacgaccacgctgatgagctttaccgcagctgcctcgcgcgtttcggtgatgacggtgaaaacctctgacacatgcagctcccggagacggtcacagcttgtctgtaagcggatgccgggagcagacaagcccgtcagggcgcgtcagcgggtgttggcgggtgtcggggcgcagccatgacccagtcacgtagcgatagcggagtgtatactggcttaactatgcggcatcagagcagattgtactgagagtgcaccatatgcggtgtgaaataccgcacagatgcgtaaggagaaaataccgcatcaggcgctcttccgcttcctcgctcactgactcgctgcgctcggtcgttcggctgcggcgagcggtatcagctcactcaaaggcggtaatacggttatccacagaatcaggggataacgcaggaaagaacatgtgagcaaaaggccagcaaaaggccaggaaccgtaaaaaggccgcgttgctggcgtttttccataggctccgcccccctgacgagcatcacaaaaatcgacgctcaagtcagaggtggcgaaacccgacaggactataaagataccaggcgtttccccctggaagctccctcgtgcgctctcctgttccgaccctgccgcttaccggatacctgtccgcctttctcccttcgggaagcgtggcgctttctcatagctcacgctgtaggtatctcagttcggtgtaggtcgttcgctccaagctgggctgtgtgcacgaaccccccgttcagcccgaccgctgcgccttatccggtaactatcgtcttgagtccaacccggtaagacacgacttatcgccactggcagcagccactggtaacaggattagcagagcgaggtatgtaggcggtgctacagagttcttgaagtggtggcctaactacggctacactagaaggacagtatttggtatctgcgctctgctgaagccagttaccttcggaaaaagagttggtagctcttgatccggcaaacaaaccaccgctggtagcggtggtttttttgtttgcaagcagcagattacgcgcagaaaaaaaggatctcaagaagatcctttgatcttttctacggggtctgacgctcagtggaacgaaaactcacgttaagggattttggtcatgagattatcaaaaaggatcttcacctagatccttttaaattaaaaatgaagttttaaatcaatctaaagtatatatgagtaaacttggtctgacagttaccaatgcttaatcagtgaggcacctatctcagcgatctgtctatttcgttcatccatagttgcctgactccccgtcgtgtagataactacgatacgggagggcttaccatctggccccagtgctgcaatgataccgcgagacccacgctcaccggctccagatttatcagcaataaaccagccagccggaagggccgagcgcagaagtggtcctgcaactttatccgcctccatccagtctattaattgttgccgggaagctagagtaagtagttcgccagttaatagtttgcgcaacgttgttgccattgctgcaggtcgggagcacaggatgacgcctaacaattcattcaagccgacaccgcttcgcggcgcggcttaattcaggagttaaacatcatgagggaagcggtgatcgccgaagtatcgactcaactatcagaggtagttggcgtcatcgagcgccatctcgaaccgacgttgctggccgtacatttgtacggctccgcagtggatggcggcctgaagccacacagtgatattgatttgctggttacggtgaccgtaaggcttgatgaaacaacgcggcgagctttgatcaacgaccttttggaaacttcggcttcccctggagagagcgagattctccgcgctgtagaagtcaccattgttgtgcacgacgacatcattccgtggcgttatccagctaagcgcgaactgcaatttggagaatggcagcgcaatgacattcttgcaggtatcttcgagccagccacgatcgacattgatctggctatcttgctgacaaaagcaagagaacatagcgttgccttggtaggtccagcggcggaggaactctttgatccggttcctgaacaggatctatttgaggcgctaaatgaaaccttaacgctatggaactcgccgcccgactgggctggcgatgagcgaaatgtagtgcttacgttgtcccgcatttggtacagcgcagtaaccggcaaaatcgcgccgaaggatgtcgctgccgactgggcaatggagcgcctgccggcccagtatcagcccgtcatacttgaagctaggcaggcttatcttggacaagaagatcgcttggcctcgcgcgcagatcagttggaagaatttgttcactacgtgaaaggcgagatcaccaaggtagtcggcaaataatgtctaacaattcgttcaagccgacgccgcttcgcggcgcggcttaactcaagcgttagatgctgcaggcatcgtggtgtcacgctcgtcgtttggtatggcttcattcagctccggttcccaacgatcaaggcgagttacatgatcccccatgttgtgcaaaaaagcggttagctccttcggtcctccgatcgaggatttttcggcgctgcgctacgtccgcgaccgcgttgagggatcaagccacagcagcccactcgaccttctagccgacccagacgagccaagggatctttttggaatgctgctccgtcgtcaggctttccgacgtttgggtggttgaacagaagtcattatcgcacggaatgccaagcactcccgaggggaaccctgtggttggcatgcacatacaaatggacgaacggataaaccttttcacgcccttttaaatatccgattattctaataaacgctcttttctcttaggtttacccgccaatatatcctgtcaaacactgatagtttaaactgaaggcgggaaacgacaatctgg

SEQ ID NO: 17378 - DNA, 9769 bp, Artificial sequence
  Synthetic construct
ggtccgatgtgagacttttcaacaaagggtaatatccggaaacctcctcggattccattgcccagctatctgtcactttattgtgaagatagtggaaaaggaaggtggctcctacaaatgccatcattgcgataaaggaaaggccatcgttgaagatgcctctgccgacagtggtcccaaagatggacccccacccacgaggagcatcgtggaaaaagaagacgttccaaccacgtcttcaaagcaagtggattgatgtgatggtccgattgagacttttcaacaaagggtaatatccggaaacctcctcggattccattgcccagctatctgtcactttattgtgaagatagtggaaaaggaaggtggctcctacaaatgccatcattgcgataaaggaaaggccatcgttgaagatgcctctgccgacagtggtcccaaagatggacccccacccacgaggagcatcgtggaaaaagaagacgttccaaccacgtcttcaaagcaagtggattgatgtgatatctccactgacgtaagggatgacgcacaatcccactatccttcgcaagacccttcctctatataaggaagttcatttcatttggagaggaccaggtggtaccggcgcgcctcagcagtcgctgtcgttaacccagcggtactcgctgaggcgatcgcgggccctgatcacctgtcgtacagtatttctacatttgatgtgtgatttgtgaagaacatcaaacaaaacaagcactggctttaatatgatgataagtattatggtaattaattaattggcaaaaacaacaatgaagctaaaattttatttattgagccttgcggttaatttcttgtgatgatctttttttttattttctaattatatatagtttcctttgctttgaaatgctaaaggtttgagagagttatgctctttttttcttcctctttcttttttaactttatcatacaaattttgaataaaaatgtgagtacattgagctcatttaaataagcttgatggggatcagattgtcgtttcccgccttcagtttaaactatcagtgtttgacaggatatattggcgggtaaacctaagagaaaagagcgtttattagaataatcggatatttaaaagggcgtgaaaaggtttatccgttcgtccatttgtatgtgcatgccaaccacagggttcccctcgggagtgcttggcattccgtgcgataatgacttctgttcaaccacccaaacgtcggaaagcctgacgacggagcagcattccaaaaagatcccttggctcgtctgggtcggctagaaggtcgagtgggctgctgtggcttgatccctcaacgcggtcgcggacgtagcgcagcgccgaaaaatcctcgatcggaggaccgaaggagctaaccgcttttttgcacaacatgggggatcatgtaactcgccttgatcgttgggaaccggagctgaatgaagccataccaaacgacgagcgtgacaccacgatgcctgcagcatctaacgcttgagttaagccgcgccgcgaagcggcgtcggcttgaacgaattgttagacattatttgccgactaccttggtgatctcgcctttcacgtagtgaacaaattcttccaactgatctgcgcgcgaggccaagcgatcttcttgtccaagataagcctgcctagcttcaagtatgacgggctgatactgggccggcaggcgctccattgcccagtcggcagcgacatccttcggcgcgattttgccggttactgcgctgtaccaaatgcgggacaacgtaagcactacatttcgctcatcgccagcccagtcgggcggcgagttccatagcgttaaggtttcatttagcgcctcaaatagatcctgttcaggaaccggatcaaagagttcctccgccgctggacctaccaaggcaacgctatgttctcttgcttttgtcagcaagatagccagatcaatgtcgatcgtggctggctcgaagatacctgcaagaatgtcattgcgctgccattctccaaattgcagttcgcgcttagctggataacgccacggaatgatgtcgtcgtgcacaacaatggtgacttctacagcgcggagaatctcgctctctccaggggaagccgaagtttccaaaaggtcgttgatcaaagctcgccgcgttgtttcatcaagccttacggtcaccgtaaccagcaaatcaatatcactgtgtggcttcaggccgccatccactgcggagccgtacaaatgtacggccagcaacgtcggttcgagatggcgctcgatgacgccaactacctctgatagttgagtcgatacttcggcgatcaccgcttccctcatgatgtttaactcctgaattaagccgcgccgcgaagcggtgtcggcttgaatgaattgttaggcgtcatcctgtgctcccgacctgcagcaatggcaacaacgttgcgcaaactattaactggcgaactacttactctagcttcccggcaacaattaatagactggatggaggcggataaagttgcaggaccacttctgcgctcggcccttccggctggctggtttattgctgataaatctggagccggtgagcgtgggtctcgcggtatcattgcagcactggggccagatggtaagccctcccgtatcgtagttatctacacgacggggagtcaggcaactatggatgaacgaaatagacagatcgctgagataggtgcctcactgattaagcattggtaactgtcagaccaagtttactcatatatactttagattgatttaaaacttcatttttaatttaaaaggatctaggtgaagatcctttttgataatctcatgaccaaaatcccttaacgtgagttttcgttccactgagcgtcagaccccgtagaaaagatcaaaggatcttcttgagatcctttttttctgcgcgtaatctgctgcttgcaaacaaaaaaaccaccgctaccagcggtggtttgtttgccggatcaagagctaccaactctttttccgaaggtaactggcttcagcagagcgcagataccaaatactgtccttctagtgtagccgtagttaggccaccacttcaagaactctgtagcaccgcctacatacctcgctctgctaatcctgttaccagtggctgctgccagtggcgataagtcgtgtcttaccgggttggactcaagacgatagttaccggataaggcgcagcggtcgggctgaacggggggttcgtgcacacagcccagcttggagcgaacgacctacaccgaactgagatacctacagcgtgagctatgagaaagcgccacgcttcccgaagggagaaaggcggacaggtatccggtaagcggcagggtcggaacaggagagcgcacgagggagcttccagggggaaacgcctggtatctttatagtcctgtcgggtttcgccacctctgacttgagcgtcgatttttgtgatgctcgtcaggggggcggagcctatggaaaaacgccagcaacgcggcctttttacggttcctggccttttgctggccttttgctcacatgttctttcctgcgttatcccctgattctgtggataaccgtattaccgcctttgagtgagctgataccgctcgccgcagccgaacgaccgagcgcagcgagtcagtgagcgaggaagcggaagagcgcctgatgcggtattttctccttacgcatctgtgcggtatttcacaccgcatatggtgcactctcagtacaatctgctctgatgccgcatagttaagccagtatacactccgctatcgctacgtgactgggtcatggctgcgccccgacacccgccaacacccgctgacgcgccctgacgggcttgtctgctcccggcatccgcttacagacaagctgtgaccgtctccgggagctgcatgtgtcagaggttttcaccgtcatcaccgaaacgcgcgaggcagctgcggtaaagctcatcagcgtggtcgtgaagcgattcacagatgtctgcctgttcatccgcgtccagctcgttgagtttctccagaagcgttaatgtctggcttctgataaagcgggccatgttaagggcggttttttcctgtttggtcactgatgcctccgtgtaagggggatttctgttcatgggggtaatgataccgatgaaacgagagaggatgctcacgatacgggttactgatgatgaacatgcccggttactggaacgttgtgagggtaaacaactggcggtatggatgcggcgggaccagagaaaaatcactcagggtcaatgccagcgcttcgttaatacagatgtaggtgttccacagggtagccagcagcatcctgcgatgcagatccggaacataatggtgcagggcgctgacttccgcgtttccagactttacgaaacacggaaaccgaagaccattcatgttgttgctcaggtcgcagacgttttgcagcagcagtcgcttcacgttcgctcgcgtatcggtgattcattctgctaaccagtaaggcaaccccgccagcctagccgggtcctcaacgacaggagcacgatcatgcgcacccgtggccaggacccaacgctgcccgagatgcgccgcgtgcggctgctggagatggcggacgcgatggatatgttctgccaagggttggtttgcgcattcacagttctccgcaagaattgattggctccaattcttggagtggtgaatccgttagcgaggtgccgccggcttccattcaggtcgaggtggcccggctccatgcaccgcgacgcaacgcggggaggcagacaaggtatagggcggcgcctacaatccatgccaacccgttccatgtgctcgccgaggcggcataaatcgccgtgacgatcagcggtccaatgatcgaagttaggctggtaagagccgcgagcgatccttgaagctgtccctgatggtcgtcatctacctgcctggacagcatggcctgcaacgcgggcatcccgatgccgccggaagcgagaagaatcataatggggaaggccatccagcctcgcgtcgcgaacgccagcaagacgtagcccagcgcgtcggccgccatgccggcgataatggcctgcttctcgccgaaacgtttggtggcgggaccagtgacgaaggcttgagcgagggcgtgcaagattccgaataccgcaagcgacaggccgatcatcgtcgcgctccagcgaaagcggtcctcgccgaaaatgacccagagcgctgccggcacctgtcctacgagttgcatgataaagaagacagtcataagtgcggcgacgatagtcatgccccgcgcccaccggaaggagctgactgggttgaaggctctcaagggcatcggtcgatcgaccctttccgacgctcaccgggctggttgccctcgccgctgggctggcggccgtctatggccctgcaaacgcgccagaaacgccgtcgaagccgtgtgcgagacaccgcggccggccgccggcgttgtggatacctcgcggaaaacttggccctcactgacagatgaggggcggacgttgacacttgaggggccgactcacccggcgcggcgttgacagatgaggggcaggctcgatttcggccggcgacgtggagctggccagcctcgcaaatcggcgaaaacgcctgattttacgcgagtttcccacagatgatgtggacaagcctggggataagtgccctgcggtattgacacttgaggggcgcgactactgacagatgaggggcgcgatccttgacacttgaggggcagagtgctgacagatgaggggcgcacctattgacatttgaggggctgtccacaggcagaaaatccagcatttgcaagggtttccgcccgtttttcggccaccgctaacctgtcttttaacctgcttttaaaccaatatttataaaccttgtttttaaccagggctgcgccctgtgcgcgtgaccgcgcacgccgaaggggggtgcccccccttctcgaaccctcccggcccgctaacgcgggcctcccatccccccaggggctgcgcccctcggccgcgaacggcctcaccccaaaaatggcagccaagctaggaaaagtcccatgtggatcactccgttgccccgtcgctcaccgtgttggggggaaggtgcacatggctcagttctcaatggaaattatctgcctaaccggctcagttctgcgtagaaaccaacatgcaagctccaccgggtgcaaagcggcagcggcggcaggatatattcaattgtaaatggcttcatgtccgggaaatctacatggatcagcaatgagtatgatggtcaatatggagaaaaagaaagagtaattaccaattttttttcaattcaaaaatgtagatgtccgcagcgttattataaaatgaaagtacattttgataaaacgacaaattacgatccgtcgtatttataggcgaaagcaataaacaaattattctaattcggaaatctttatttcgacgtgtctacattcacgtccaaatgggggcttagatgagaaacttcacgatcgatgcggccaccactcgagaagcttactagtcaacaattggccaatctttgttctaaattgctaataaacgaccatttccgtcaattctccttggttgcaacagtctacccgtcaaatgtttactaatttataagtgtgaagtttgaattatgaaagacgaaatcgtattaaaaattcacaagaataaacaactccatagattttcaaaaaaacagtcacgagaaaaaaaccacagtccgtttgtctgctcttctagtttttattatttttctattaatagttttttgttatttcgagaataaaatttgaacgatgtccgaaccacaaaagccgagccgataaatcctaagccgagcctaactttagccgtaaccatcagtcacggctcccgggctaattcatttgaaccgaatcataatcaacggtttagatcaaactcaaaacaatctaacggcaacatagacgcgtcggtgagctaaaaagagtgtgaaagccaggtcaccatagcattgtctctcccagattttttatttgggaaataatagaagaaatagaaaaaaataaaagagtgagaaaaatcgtagagctatatattcgcacatgtactcgtttcgctttccttagtgttagctgctgccgctgttgtttctcctccatttctctatctttctctctcgctgcttctcgaatcttctgtatcatcttcttcttcttcaaggtgagtctctagatccgttcgcttgattttgctgctcgttagtcgttattgttgattctctatgccgatttcgctagatctgtttagcatgcgttgtggttttatgagaaaatctttgttttgggggttgcttgttatgtgattcgatccgtgcttgttggatcgatctgagttaattcttaaggtttatgtgttagatctatggagtttgaggattcttctcgcttctgtcgatctctcgctgttatttttgtttttttcagtgaagtgaagttgtttagttcgaaatgacttcgtgtatgctcgattgatctggttttaatcttcgatctgttaggtgttgatgtttacaagtgaattctagtgttttctcgttgagatctgtgaagtttgaacctagttttctcaataatcaacatatgaagcgatgtttgagtttcaataaacgctgctaatcttcgaaactaagttgtgatctgattcgtgtttacttcatgagcttatccaattcatttcggtttcattttactttttttttagtgaaccatggcgcaagttagcagaatctgcaatggtgtgcagaacccatctcttatctccaatctctcgaaatccagtcaacgcaaatctcccttatcggtttctctgaagacgcagcagcatccacgagcttatccgatttcgtcgtcgtggggattgaagaagagtgggatgacgttaattggctctgagcttcgtcctcttaaggtcatgtcttctgtttccacggcgtgcatgcttcatggagcttcatctaggccagctactgccaggaagtctagcgggctcagtggcaccgtgcgcatccctggcgataaaagtatttcacacaggagcttcatgttcggaggacttgctagtggagagacgagaatcactggtttgcttgagggcgaagatgttatcaacaccggtaaggcgatgcaagcaatgggtgccagaatccgaaaagagggcgatacgtggatcatcgacggtgttggtaacggaggattgctcgctcccgaagcgccacttgactttgggaacgcagctacggggtgccgtcttactatgggactggtaggcgtgtatgactttgactctaccttcatcggtgacgcgagcctcactaagagaccaatgggacgagtgctgaatcccctgagggagatgggtgtccaggtgaaatctgaggatggtgatcgtcttccggttactctgcgaggccccaagacccccacgccaatcacgtacagggttccgatggcgtcagcacaggtcaagtcagcggtactcctggcgggcctcaacacacctggaatcacaaccgtgattgaacccatcatgactagagaccacacggagaagatgttgcagggtttcggcgctaatctaacggtcgaaaccgacgccgacggcgtgaggacaatccgcttggagggcagaggtaaactgactggccaagtcatcgatgtgcctggagatccctcgtccacagcgtttcccctcgtagctgcgttgctcgtccctggatctgatgtgacgatcctgaatgtcctcatgaatccaactagaaccggcctcatcctcacattgcaggagatgggtgctgacatcgaggttatcaatcctaggttggcaggtggagaggatgtggccgatctgcgcgtgcgttctagtacactcaaaggcgtgaccgtccctgaggatcgcgctccatccatgatcgacgagtaccccattctcgccgttgctgctgcgtttgccgagggcgcaactgtaatgaacggccttgaggagttgagggttaaggagagtgacaggctgtccgcggtggcgaatggcctgaagctaaacggcgtggactgcgacgaaggtgaaacgtcccttgtagtccgtggtcgcccagacgggaaggggttggggaatgcttcgggagctgctgtggcgacgcaccttgatcatagaatcgccatgtcatttctggtgatgggacttgtctccgagaatccggtgaccgttgacgatgctaccatgatcgccacctcctttcctgagttcatggacctcatggcaggcttgggggccaagatcgagctgtctgatactaaggccgcttgaattcccgatcgttcaaacatttggcaataaagtttcttaagattgaatcctgttgccggtcttgcgatgattatcatataatttctgttgaattacgttaagcatgtaataattaacatgtaatgcatgacgttatttatgagatgggtttttatgattagagtcccgcaattatacatttaatacgcgatagaaaacaaaatatagcgcgcaaactaggataaattatcgcgcgcggtgtcatctatgttactagatcggggatcccacgtgcggaccgcctgcaggccgcgttatcaagctaactgca

SEQ ID NO: 17379 - DNA, 8504 bp, Artificial sequence
  Synthetic construct
aggatttttcggcgctgcgctacgtccgcgaccgcgttgagggatcaagccacagcagcccactcgaccttctagccgacccagacgagccaagggatctttttggaatgctgctccgtcgtcaggctttccgacgtttgggtggttgaacagaagtcattatcgcacggaatgccaagcactcccgaggggaaccctgtggttggcatgcacatacaaatggacgaacggataaaccttttcacgcccttttaaatatccgattattctaataaacgctcttttctcttaggtttacccgccaatatatcctgtcaaacactgatagtttaaactgaaggcgggaaacgacaatctgatccccatcaagcttggccagcttctgcaggtccgattgagacttttcaacaaagggtaatatccggaaacctcctcggattccattgcccagctatctgtcactttattgtgaagatagtggaaaaggaaggtggctcctacaaatgccatcattgcgataaaggaaaggccatcgttgaagatgcctctgccgacagtggtcccaaagatggacccccacccacgaggagcatcgtggaaaaagaagacgttccaaccacgtcttcaaagcaagtggattgatgtgatggtccgattgagacttttcaacaaagggtaatatccggaaacctcctcggattccattgcccagctatctgtcactttattgtgaagatagtggaaaaggaaggtggctcctacaaatgccatcattgcgataaaggaaaggccatcgttgaagatgcctctgccgacagtggtcccaaagatggacccccacccacgaggagcatcgtggaaaaagaagacgttccaaccacgtcttcaaagcaagtggattgatgtgatatctccactgacgtaagggatgacgcacaatcccactatccttcgcaagacccttcctctatataaggaagttcatttcatttggagaggacacagaaaaatttgctacattgtttcacaaacttcaaatattattcatttatttgtcagctttcaaactctttgtttcttgtttgttgattagatctggtaccctcagcagtcgctgtgcgatcgccagcggtactcgctgaggtcgacgtagttagttaattcagctttcgttcgtatcatcggtttcgacaacgttcgtcaagttcaatgcatcagtttcattgcgcacacaccagaatcctactgagtttgagtattatggcattgggaaaactgtttttcttgtaccatttgttgtgcttgtaatttactgtgttttttattcggttttcgctatcgaactgtgaaatggaaatggatggagaagagttaatgaatgatatggtccttttgttcattctcaaattaatattatttgttttttctcttatttgttgtgtgttgaatttgaaattataagagatatgcaaacattttgttttgagtaaaaatgtgtcaaatcgtggcctctaatgaccgaagttaatatgaggagtaaaacacttgtagttgtaccattatgcttattcactaggcaacaaatatattttcagacctagaaaagctgcaaatgttactgaatacaagtatgtcctcttgtgttttagacatttatgaactttcctttatgtaattttccagaatccttgtcagattctaatcattgctttataattatagttatactcatggatttgtagttgagtatgaaaatattttttaatgcattttatgacttgccaattgattgacaacgcggccgccactcgagtggaagctagctttccgatcctacctgtcacttcatcaaaaggacagtagaaaaggaaggtggcacctacaaatgccatcattgcgataaaggaaaggctatcattcaagatgcctctgccgacagtggtcccaaagatggacccccacccacgaggagcatcgtggaaaaagaagacgttccaaccacgtcttcaaagcaagtggattgatgtgatacttccactgacgtaagggatgacgcacaatcccactatccttcgcaagacccttcctctatataaggaagttcatttcatttggagaggacacgctgaaatcaccagtctctctctacaagatcggggatctctagctagacgatcgtttcgcatgattgaacaagatggattgcacgcaggttctccggccgcttgggtggagaggctattcggctatgactgggcacaacagacaatcggctgctctgatgccgccgtgttccggctgtcagcgcaggggcgcccggttctttttgtcaagaccgacctgtccggtgccctgaatgaactgcaggacgaggcagcgcggctatcgtggctggccacgacgggcgttccttgcgcagctgtgctcgacgttgtcactgaagcgggaagggactggctgctattgggcgaagtgccggggcaggatctcctgtcatctcaccttgctcctgccgagaaagtatccatcatggctgatgcaatgcggcggctgcatacgcttgatccggctacctgcccattcgaccaccaagcgaaacatcgcatcgagcgagcacgtactcggatggaagccggtcttgtcgatcaggatgatctggacgaagagcatcaggggctcgcgccagccgaactgttcgccaggctcaaggcgcgcatgcccgacggcgaggatctcgtcgtgacccatggcgatgcctgcttgccgaatatcatggtggaaaatggccgcttttctggattcatcgactgtggccggctgggtgtggcggaccgctatcaggacatagcgttggctacccgtgatattgctgaagagcttggcggcgaatgggctgaccgcttcctcgtgctttacggtatcgccgctcccgattcgcagcgcatcgccttctatcgccttcttgacgagttcttctgagcgggactctggggttcgatccccaattcccgatcgttcaaacatttggcaataaagtttcttaagattgaatcctgttgccggtcttgcgatgattatcatataatttctgttgaattacgttaagcatgtaataattaacatgtaatgcatgacgttatttatgagatgggtttttatgattagagtcccgcaattatacatttaatacgcgatagaaaacaaaatatagcgcgcaaactaggataaattatcgcgcgcggtgtcatctatgttactagatcggggatcgggccactcgagtggtggccgcatcgatcgtgaagtttctcatctaagcccccatttggacgtgaatgtagacacgtcgaaataaagatttccgaattagaataatttgtttattgctttcgcctataaatacgacggatcgtaatttgtcgttttatcaaaatgtactttcattttataataacgctgcggacatctacatttttgaattgaaaaaaaattggtaattactctttctttttctccatattgaccatcatactcattgctgatccatgtagatttcccggacatgaagccatttacaattgaatatatcctgccgccgctgccgctttgcacccggtggagcttgcatgttggtttctacgcagaactgagccggttaggcagataatttccattgagaactgagccatgtgcaccttccccccaacacggtgagcgacggggcaacggagtgatccacatgggacttttcctagcttggctgccatttttggggtgaggccgttcgcggccgaggggcgcagcccctggggggatgggaggcccgcgttagcgggccgggagggttcgagaagggggggcaccccccttcggcgtgcgcggtcacgcgcacagggcgcagccctggttaaaaacaaggtttataaatattggtttaaaagcaggttaaaagacaggttagcggtggccgaaaaacgggcggaaacccttgcaaatgctggattttctgcctgtggacagcccctcaaatgtcaataggtgcgcccctcatctgtcagcactctgcccctcaagtgtcaaggatcgcgcccctcatctgtcagtagtcgcgcccctcaagtgtcaataccgcagggcacttatccccaggcttgtccacatcatctgtgggaaactcgcgtaaaatcaggcgttttcgccgatttgcgaggctggccagctccacgtcgccggccgaaatcgagcctgcccctcatctgtcaacgccgcgccgggtgagtcggcccctcaagtgtcaacgtccgcccctcatctgtcagtgagggccaagttttccgcgaggtatccacaacgccggcggccggccgcggtgtctcgcacacggcttcgacggcgtttctggcgcgtttgcagggccatagacggccgccagcccagcggcgagggcaaccagcccggtgagcgtcggaaagggtcgatcgaccgatgcccttgagagccttcaacccagtcagctccttccggtgggcgcggggcatgactatcgtcgccgcacttatgactgtcttctttatcatgcaactcgtaggacaggtgccggcagcgctctgggtcattttcggcgaggaccgctttcgctggagcgcgacgatgatcggcctgtcgcttgcggtattcggaatcttgcacgccctcgctcaagccttcgtcactggtcccgccaccaaacgtttcggcgagaagcaggccattatcgccggcatggcggccgacgcgctgggctacgtcttgctggcgttcgcgacgcgaggctggatggccttccccattatgattcttctcgcttccggcggcatcgggatgcccgcgttgcaggccatgctgtccaggcaggtagatgacgaccatcagggacagcttcaaggatcgctcgcggctcttaccagcctaacttcgatcattggaccgctgatcgtcacggcgatttatgccgcctcggcgagcacatggaacgggttggcatggattgtaggcgccgccctataccttgtctgcctccccgcgttgcgtcgcggtgcatggagccgggccacctcgacctgaatggaagccggcggcacctcgctaacggattcaccactccaagaattggagccaatcaattcttgcggagaactgtgaatgcgcaaaccaacccttggcagaacatatccatcgcgtccgccatctccagcagccgcacgcggcgcatctcgggcagcgttgggtcctggccacgggtgcgcatgatcgtgctcctgtcgttgaggacccggctaggctggcggggttgccttactggttagcagaatgaatcaccgatacgcgagcgaacgtgaagcgactgctgctgcaaaacgtctgcgacctgagcaacaacatgaatggtcttcggtttccgtgtttcgtaaagtctggaaacgcggaagtcagcgccctgcaccattatgttccggatctgcatcgcaggatgctgctggctaccctgtggaacacctacatctgtattaacgaagcgctggcattgaccctgagtgatttttctctggtcccgccgcatccataccgccagttgtttaccctcacaacgttccagtaaccgggcatgttcatcatcagtaacccgtatcgtgagcatcctctctcgtttcatcggtatcattacccccatgaacagaaatcccccttacacggaggcatcagtgaccaaacaggaaaaaaccgcccttaacatggcccgctttatcagaagccagacattaacgcttctggagaaactcaacgagctggacgcggatgaacaggcagacatctgtgaatcgcttcacgaccacgctgatgagctttaccgcagctgcctcgcgcgtttcggtgatgacggtgaaaacctctgacacatgcagctcccggagacggtcacagcttgtctgtaagcggatgccgggagcagacaagcccgtcagggcgcgtcagcgggtgttggcgggtgtcggggcgcagccatgacccagtcacgtagcgatagcggagtgtatactggcttaactatgcggcatcagagcagattgtactgagagtgcaccatatgcggtgtgaaataccgcacagatgcgtaaggagaaaataccgcatcaggcgctcttccgcttcctcgctcactgactcgctgcgctcggtcgttcggctgcggcgagcggtatcagctcactcaaaggcggtaatacggttatccacagaatcaggggataacgcaggaaagaacatgtgagcaaaaggccagcaaaaggccaggaaccgtaaaaaggccgcgttgctggcgtttttccataggctccgcccccctgacgagcatcacaaaaatcgacgctcaagtcagaggtggcgaaacccgacaggactataaagataccaggcgtttccccctggaagctccctcgtgcgctctcctgttccgaccctgccgcttaccggatacctgtccgcctttctcccttcgggaagcgtggcgctttctcatagctcacgctgtaggtatctcagttcggtgtaggtcgttcgctccaagctgggctgtgtgcacgaaccccccgttcagcccgaccgctgcgccttatccggtaactatcgtcttgagtccaacccggtaagacacgacttatcgccactggcagcagccactggtaacaggattagcagagcgaggtatgtaggcggtgctacagagttcttgaagtggtggcctaactacggctacactagaaggacagtatttggtatctgcgctctgctgaagccagttaccttcggaaaaagagttggtagctcttgatccggcaaacaaaccaccgctggtagcggtggtttttttgtttgcaagcagcagattacgcgcagaaaaaaaggatctcaagaagatcctttgatcttttctacggggtctgacgctcagtggaacgaaaactcacgttaagggattttggtcatgagattatcaaaaaggatcttcacctagatccttttaaattaaaaatgaagttttaaatcaatctaaagtatatatgagtaaacttggtctgacagttaccaatgcttaatcagtgaggcacctatctcagcgatctgtctatttcgttcatccatagttgcctgactccccgtcgtgtagataactacgatacgggagggcttaccatctggccccagtgctgcaatgataccgcgagacccacgctcaccggctccagatttatcagcaataaaccagccagccggaagggccgagcgcagaagtggtcctgcaactttatccgcctccatccagtctattaattgttgccgggaagctagagtaagtagttcgccagttaatagtttgcgcaacgttgttgccattgctgcaggtcgggagcacaggatgacgcctaacaattcattcaagccgacaccgcttcgcggcgcggcttaattcaggagttaaacatcatgagggaagcggtgatcgccgaagtatcgactcaactatcagaggtagttggcgtcatcgagcgccatctcgaaccgacgttgctggccgtacatttgtacggctccgcagtggatggcggcctgaagccacacagtgatattgatttgctggttacggtgaccgtaaggcttgatgaaacaacgcggcgagctttgatcaacgaccttttggaaacttcggcttcccctggagagagcgagattctccgcgctgtagaagtcaccattgttgtgcacgacgacatcattccgtggcgttatccagctaagcgcgaactgcaatttggagaatggcagcgcaatgacattcttgcaggtatcttcgagccagccacgatcgacattgatctggctatcttgctgacaaaagcaagagaacatagcgttgccttggtaggtccagcggcggaggaactctttgatccggttcctgaacaggatctatttgaggcgctaaatgaaaccttaacgctatggaactcgccgcccgactgggctggcgatgagcgaaatgtagtgcttacgttgtcccgcatttggtacagcgcagtaaccggcaaaatcgcgccgaaggatgtcgctgccgactgggcaatggagcgcctgccggcccagtatcagcccgtcatacttgaagctaggcaggcttatcttggacaagaagatcgcttggcctcgcgcgcagatcagttggaagaatttgttcactacgtgaaaggcgagatcaccaaggtagtcggcaaataatgtctaacaattcgttcaagccgacgccgcttcgcggcgcggcttaactcaagcgttagatgctgcaggcatcgtggtgtcacgctcgtcgtttggtatggcttcattcagctccggttcccaacgatcaaggcgagttacatgatcccccatgttgtgcaaaaaagcggttagctccttcggtcctccgatcg

SEQ ID NO: 17380 - DNA, 14023 bp, Artificial sequence
  Synthetic construct
aggatttttcggcgctgcgctacgtccgcgaccgcgttgagggatcaagccacagcagcccactcgaccttctagccgacccagacgagccaagggatctttttggaatgctgctccgtcgtcaggctttccgacgtttgggtggttgaacagaagtcattatcgcacggaatgccaagcactcccgaggggaaccctgtggttggcatgcacatacaaatggacgaacggataaaccttttcacgcccttttaaatatccgattattctaataaacgctcttttctcttaggtttacccgccaatatatcctgtcaaacactgatagtttaaactgaaggcgggaaacgacaatctgatccccatcaagctagcttctgcaggtcctgctcgagcggccgctcgaggtcattcatatgcttgagaagagagtcgggatagtccaaaataaaacaaaggtaagattacctggtcaaaagtgaaaacatcagttaaaaggtggtataaagtaaaatatcggtaataaaaggtggcccaaagtgaaatttactcttttctactattataaaaattgaggatgtttttgtcggtactttgatacgtcatttttgtatgaattggtttttaagtttattcgcttttggaaatgcatatctgtatttgagtcgggttttaagttcgtttgcttttgtaaatacagagggatttgtataagaaatatctttagaaaaacccatatgctaatttgacataatttttgagaaaaatatatattcaggcgaattctcacaatgaacaataataagattaaaatagctttcccccgttgcagcgcatgggtattttttctagtaaaaataaaagataaacttagactcaaaacatttacaaaaacaacccctaaagttcctaaagcccaaagtgctatccacgatccatagcaagcccagcccaacccaacccaacccaacccaccccagtccagccaactggacaatagtctccacacccccccactatcaccgtgagttgtccgcacgcaccgcacgtctcgcagccaaaaaaaaaaagaaagaaaaaaaagaaaaagaaaaaacagcaggtgggtccgggtcgtgggggccggaaacgcgaggaggatcgcgagccagcgacgaggccggccctccctccgcttccaaagaaacgccccccatcgccactatatacatacccccccctctcctcccatccccccaaccctaccaccaccaccaccaccacctccacctcctcccccctcgctgccggacgacgagctcctcccccctccccctccgccgccgccgcgccggtaaccaccccgcccctctcctctttctttctccgtttttttttccgtctcggtctcgatctttggccttggtagtttgggtgggcgagaggcggcttcgtgcgcgcccagatcggtgcgcgggaggggcgggatctcgcggctggggctctcgccggcgtggatccggcccggatctcgcggggaatggggctctcggatgtagatctgcgatccgccgttgttgggggagatgatggggggtttaaaatttccgccgtgctaaacaagatcaggaagaggggaaaagggcactatggtttatatttttatatatttctgctgcttcgtcaggcttagatgtgctagatctttctttcttctttttgtgggtagaatttgaatccctcagcattgttcatcggtagtttttcttttcatgatttgtgacaaatgcagcctcgtgcggagcttttttgtaggtagaagtgatcaaccgtcgacggtaccgagctcgaattctgcatgcgtttggacgtatgctcattcaggttggagccaatttggttgatgtgtgtgcgagttcttgcgagtctgatgagacatctctgtattgtgtttctttccccagtgttttctgtacttgtgtaatcggctaatcgccaacagattcggcgatgaataaatgagaaataaattgttctgattttgagtgcaaaaaaaaaggaattagatcgcgatcgcaagggcgaattctgcagatatccatcacactggcggccgcgcgatcgcatttaaatggcccgtagggcccctgcaggtactcgaggtcattcatatgcttgagaagagagtcgggatagtccaaaataaaacaaaggtaagattacctggtcaaaagtgaaaacatcagttaaaaggtggtataaagtaaaatatcggtaataaaaggtggcccaaagtgaaatttactcttttctactattataaaaattgaggatgtttttgtcggtactttgatacgtcatttttgtatgaattggtttttaagtttattcgcttttggaaatgcatatctgtatttgagtcgggttttaagttcgtttgcttttgtaaatacagagggatttgtataagaaatatctttagaaaaacccatatgctaatttgacataatttttgagaaaaatatatattcaggcgaattctcacaatgaacaataataagattaaaatagctttcccccgttgcagcgcatgggtattttttctagtaaaaataaaagataaacttagactcaaaacatttacaaaaacaacccctaaagttcctaaagcccaaagtgctatccacgatccatagcaagcccagcccaacccaacccaacccaacccaccccagtccagccaactggacaatagtctccacacccccccactatcaccgtgagttgtccgcacgcaccgcacgtctcgcagccaaaaaaaaaaagaaagaaaaaaaagaaaaagaaaaaacagcaggtgggtccgggtcgtgggggccggaaacgcgaggaggatcgcgagccagcgacgaggagcttaggcctcatcgttgaagatgcctctgccgacagtggtcccaaagatggacccccacccacgaggagcatcgtggaaaaagaagacgttccaaccacgtcttcaaagcaagtggattgatgtgatatctccactgacgtaagggatgacgcacaatcccactatccttcgaggcctcatcgttgaagatgcctctgccgacagtggtcccaaagatggacccccacccacgaggagcatcgtggaaaaagaagacgttccaaccacgtcttcaaagcaagtggattgatgtgatatctccactgacgtaagggatgacgcacaatcccactatccttcgaagctccctccctccgcttccaaagaaacgccccccatcgccactatatacatacccccccctctcctcccatccccccaacccttctagaaccatcttccacacactcaagccacactattggagaacacacagggacaacacaccataagatccaagggaggcctccgccgccgccggtaaccaccccgcccctctcctctttctttctccgtttttttttccgtctcggtctcgatctttggccttggtagtttgggtgggcgagaggcggcttcgtgcgcgcccagatcggtgcgcgggaggggcgggatctcgcggctggggctctcgccggcgtggatccggcccggatctcgcggggaatggggctctcggatgtagatctgcgatccgccgttgttgggggagatgatggggggtttaaaatttccgccgtgctaaacaagatcaggaagaggggaaaagggcactatggtttatatttttatatatttctgctgcttcgtcaggcttagatgtgctagatctttctttcttctttttgtgggtagaatttgaatccctcagcattgttcatcggtagtttttcttttcatgatttgtgacaaatgcagcctcgtgcggagcttttttgtaggtagaagcggaccggtaccgggcccgggggatccactagttctagctatatcatcaatttatgtattacacataatatcgcactcagtctttcatctacggcaatgtaccagctgatataatcagttattgaaatatttctgaatttaaacttgcatcaataaatttatgtttttgcttggactataatacctgacttgttattttatcaataaatatttaaactatatttctttcaagatatcattctttacaagtatacgtgtttaaattgaataccataaatttttatttttcaaatacatgtaaaattatgaaatgggagtggtggcgaccgagctcaagcacacttcaattcctataacggaccaaatcgcaaaaattataataacatattatttcatcctggattaaaagaaagtcaccggggattattttgtgacgccgattacatacggcgacaataaagacattggaaatcgtagtacatattggaatacactgattatattaatgatgaatacatactttaatatccttacgtaggatcgatccgttaattaaagcttgcctcgagacaacaacatgcttctcatcaacatggagggaagagggagggagaaagtgtcgcctggtcacctccattgtcacactagccactggccagctctcccacaccaccaatgccaggggcgagctttagcacagccaccgcttcacctccaccaccgcactaccctagcttcgcccaacagccaccgtcaacgcctcctctccgtcaacataagagagagagagaagaggagagtagccatgtggggaggaggaatagtacatggggcctaccgtttggcaagttattttgggttgccaagttaggccaataaggggagggatttggccatccggttggaaaggttattggggtagtatctttttactagaattgtcaaaaaaaaatagtttgagagccatttggagaggatgttgcctgttagaggtgctcttaggacatcaaattccataaaaacatcagaaaaattctctcgatgaagatttataaccactaaaactgccctcaattcgaagggagttcaaaacaattaaaatcatgttcgaattgagtttcaatttcactttaacccctttgaaatctcaatggtaaaacatcaacccgtcaggtagcatggttctttttattcctttcaaaaagagttaattacaaacagaatcaaaactaacagttaggcccaaggcccatccgagcaaacaatagatcatgggccaggcctgccaccaccctccccctcctggctcccgctcttgaatttcaaaatccaaaaatatcggcacgactggccgccgacggagcgggcggaaaatgacggaacaacccctcgaattctaccccaactacgcccaccaacccacacgccactgacaatccggtcccacccttgtgggcccacctacaagcgagacgtcagtcgctcgcagcaaccagtgggcccacctcccagtgagcggcgggtagatctggactcttacccacccacactaaacaaaacggcatgaatattttgcactaaaaccctcagaaaaattccgatattccaaaccagtacagttcctgaccgttggaggagccaaagtggagcggagtgtaaaattgggaaacttaatcgagggggttaaacgcaaaaacgccgaggcgcctcccgctctatagaaaggggaggagtgggaggtggaaaccctaccacaccgcagagaaaggcgtcttcgtactcgcctctctccgcgccctcctccgccgccgctcgccgccgttcgtctccgccgccaccggctagccatccaggtaaaacaaacaaaaacggatctgatgcttccattcctccgtttctcgtagtagcgcgcttcgatctgtgggtggatctgggtgatcctggggtgtggttcgttctgtttgatagatctgtcggtggatctggccttctgtggttgtcgatgtccggatctgcgttttgatcagtggtagttcgtggatctggcgaaatgttttggatctggcagtgagacgctaagaatcgggaaatgatgcaatattaggggggtttcggatggggatccactgaattagtctgtctccctgctgataatctgttcctttttggtagatctggttagtgtatgtttgtttcggatagatctgatcaatgcttgtttgttttttcaaattttctacctaggttgtataggaatggcatgcggatctggttggattgccatgatccgtgctgaaatgcccctttggttgatggatcttgatattttactgctgttcacctagatttgtactcccgtttatacttaatttgttgcttattatgaatagatctgtaacttaggcacatgtatggacggagtatgtggatctgtagtatgtacattgctgcgagctaagaactatttcagagcaagcacagaaaaaaatatttagacagattgggcaactatttgatggtctttggtatcatgctttgtagtgctcgtttctgcgtagtaatcttttgatctgatctgaagataggtgctattatattcttaaaggtcattagaacgctatctgaaaggctgtattatgtggattggttcacctgtgactccctgttcgtcttgtcttgataaatcctgtgataaaaaaaattcttaaggcgtaatttgttgaaatcttgttttgtcctatgcagcctgatccatggcggcactggtgacctcccagctcgcgacaagcggcaccgtcctgtcggtgacggaccgcttccggcgtcccggcttccagggactgaggccacggaacccagccgatgccgctctcgggatgaggacggtgggcgcgtccgcggctcccaagcagagcaggaagccacaccgtttcgaccgccggtgcttgagcatggtcgtctgcatgctacacggtgcaagcagccggccggcaaccgctcgcaaatcttccggcctttcgggaacggtcaggattccgggcgataagtccatatcccaccggtcgttcatgttcggcggtcttgccagcggtgagacgcgcatcacgggcctgcttgaaggtgaggacgtgatcaataccgggaaggccatgcaggctatgggagcgcgtatccgcaaggaaggtgacacatggatcattgacggcgttgggaatggcggtctgctcgcccctgaggcccctctcgacttcggcaatgcggcgacgggctgcaggctcactatgggactggtcggggtgtacgacttcgatagcacgttcatcggagacgcctcgctcacaaagcgcccaatgggccgcgttctgaacccgttgcgcgagatgggcgtacaggtcaaatccgaggatggtgaccgtttgcccgttacgctgcgcgggccgaagacgcctaccccgattacctaccgcgtgccaatggcatccgcccaggtcaagtcagccgtgctcctcgccggactgaacactccgggcatcaccacggtgatcgagcccatcatgaccagggatcataccgaaaagatgcttcaggggtttggcgccaacctgacggtcgagacggacgctgacggcgtcaggaccatccgccttgagggcaggggtaaactgactggccaagtcatcgatgttccgggagacccgtcgtccacggccttcccgttggttgcggcgctgctcgtgccggggagtgacgtgaccatcctgaacgtcctcatgaacccgaccaggaccggcctgatcctcacgcttcaggagatgggagccgacatcgaggtgatcaacccgcgcctggcaggcggtgaagacgttgcggatctgcgcgtgcgctcctctaccctgaagggcgtgacggtcccggaagatcgcgcgccgtccatgatagacgagtatcctattctggccgtcgccgctgcgttcgccgaaggggccacggtcatgaacggtcttgaggaactccgcgtgaaggaatcggatcgcctgtcggcggtggccaatggcctgaagctcaacggtgttgactgcgacgagggtgagacctcactcgtggtccgtggccggcctgatggcaagggcctcggcaacgccagtggagcggccgtcgccacgcacctcgatcatcgcatcgcgatgtccttcttggtgatgggtctcgtctcagagaacccggtgaccgtcgatgacgccacgatgatagcgacgagcttcccagagttcatggatctgatggcgggcctcggggccaagatcgaactgtctgacacgaaggccgcttgagctccagggttcttgcctggtgccttggcaatgcttgattactgctgctatcctatgatctgtccgtgtgggcttctatctatcagtttgtgtgtctggttttgaaaaacatttgcttttcgattatgtagggtttgcttgtagctttcgctgctgtgacctgtgttgtttatgtgaaccttctttgtggcatctttaatatccaagttcgtggtttgtcgtaaaacgaagcctctacttcgtaaagttgtgtctatagcattgaaatcgtttttttgctcgagaataattgtgacctttagttggcgtgaaactagttttggatatctgattctctggttcgcaatcttgagatcgtcgctgcttaggtgagctaagtgatgttcctaagtaaatgctcctcaccagaatacgtagctgtgtgaaaagagaacgcgtgaatacgtagctgtgtaaagattgtgtcccaagtaaacctcagtgatttttgtttggatttttaatttagaaacattcgactgggagcggctagagccacacccaagttcctaactatgataaagttgctctgtaacagaaaacaccatctagggcgcgccaaatcgtgaagtttctcatctaagcccccatttggacgtgaatgtagacacgtcgaaataaagatttccgaattagaataatttgtttattgctttcgcctataaatacgacggatcgtaatttgtcgttttatcaaaatgtactttcattttataataacgctgcggacatctacatttttgaattgaaaaaaaattggtaattactctttctttttctccatattgaccatcatactcattgctgatccatgtagatttcccggacatgaagccatttacaattgaatatatcctgccgccgctgccgctttgcacccggtggagcttgcatgttggtttctacgcagaactgagccggttaggcagataatttccattgagaactgagccatgtgcaccttccccccaacacggtgagcgacggggcaacggagtgatccacatgggacttttcctagcttggctgccatttttggggtgaggccgttcgcggccgaggggcgcagcccctggggggatgggaggcccgcgttagcgggccgggagggttcgagaagggggggcaccccccttcggcgtgcgcggtcacgcgcacagggcgcagccctggttaaaaacaaggtttataaatattggtttaaaagcaggttaaaagacaggttagcggtggccgaaaaacgggcggaaacccttgcaaatgctggattttctgcctgtggacagcccctcaaatgtcaataggtgcgcccctcatctgtcagcactctgcccctcaagtgtcaaggatcgcgcccctcatctgtcagtagtcgcgcccctcaagtgtcaataccgcagggcacttatccccaggcttgtccacatcatctgtgggaaactcgcgtaaaatcaggcgttttcgccgatttgcgaggctggccagctccacgtcgccggccgaaatcgagcctgcccctcatctgtcaacgccgcgccgggtgagtcggcccctcaagtgtcaacgtccgcccctcatctgtcagtgagggccaagttttccgcgaggtatccacaacgccggcggccggccgcggtgtctcgcacacggcttcgacggcgtttctggcgcgtttgcagggccatagacggccgccagcccagcggcgagggcaaccagcccggtgagcgtcggaaagggtcgatcgaccgatgcccttgagagccttcaacccagtcagctccttccggtgggcgcggggcatgactatcgtcgccgcacttatgactgtcttctttatcatgcaactcgtaggacaggtgccggcagcgctctgggtcattttcggcgaggaccgctttcgctggagcgcgacgatgatcggcctgtcgcttgcggtattcggaatcttgcacgccctcgctcaagccttcgtcactggtcccgccaccaaacgtttcggcgagaagcaggccattatcgccggcatggcggccgacgcgctgggctacgtcttgctggcgttcgcgacgcgaggctggatggccttccccattatgattcttctcgcttccggcggcatcgggatgcccgcgttgcaggccatgctgtccaggcaggtagatgacgaccatcagggacagcttcaaggatcgctcgcggctcttaccagcctaacttcgatcattggaccgctgatcgtcacggcgatttatgccgcctcggcgagcacatggaacgggttggcatggattgtaggcgccgccctataccttgtctgcctccccgcgttgcgtcgcggtgcatggagccgggccacctcgacctgaatggaagccggcggcacctcgctaacggattcaccactccaagaattggagccaatcaattcttgcggagaactgtgaatgcgcaaaccaacccttggcagaacatatccatcgcgtccgccatctccagcagccgcacgcggcgcatctcgggcagcgttgggtcctggccacgggtgcgcatgatcgtgctcctgtcgttgaggacccggctaggctggcggggttgccttactggttagcagaatgaatcaccgatacgcgagcgaacgtgaagcgactgctgctgcaaaacgtctgcgacctgagcaacaacatgaatggtcttcggtttccgtgtttcgtaaagtctggaaacgcggaagtcagcgccctgcaccattatgttccggatctgcatcgcaggatgctgctggctaccctgtggaacacctacatctgtattaacgaagcgctggcattgaccctgagtgatttttctctggtcccgccgcatccataccgccagttgtttaccctcacaacgttccagtaaccgggcatgttcatcatcagtaacccgtatcgtgagcatcctctctcgtttcatcggtatcattacccccatgaacagaaatcccccttacacggaggcatcagtgaccaaacaggaaaaaaccgcccttaacatggcccgctttatcagaagccagacattaacgcttctggagaaactcaacgagctggacgcggatgaacaggcagacatctgtgaatcgcttcacgaccacgctgatgagctttaccgcagctgcctcgcgcgtttcggtgatgacggtgaaaacctctgacacatgcagctcccggagacggtcacagcttgtctgtaagcggatgccgggagcagacaagcccgtcagggcgcgtcagcgggtgttggcgggtgtcggggcgcagccatgacccagtcacgtagcgatagcggagtgtatactggcttaactatgcggcatcagagcagattgtactgagagtgcaccatatgcggtgtgaaataccgcacagatgcgtaaggagaaaataccgcatcaggcgctcttccgcttcctcgctcactgactcgctgcgctcggtcgttcggctgcggcgagcggtatcagctcactcaaaggcggtaatacggttatccacagaatcaggggataacgcaggaaagaacatgtgagcaaaaggccagcaaaaggccaggaaccgtaaaaaggccgcgttgctggcgtttttccataggctccgcccccctgacgagcatcacaaaaatcgacgctcaagtcagaggtggcgaaacccgacaggactataaagataccaggcgtttccccctggaagctccctcgtgcgctctcctgttccgaccctgccgcttaccggatacctgtccgcctttctcccttcgggaagcgtggcgctttctcatagctcacgctgtaggtatctcagttcggtgtaggtcgttcgctccaagctgggctgtgtgcacgaaccccccgttcagcccgaccgctgcgccttatccggtaactatcgtcttgagtccaacccggtaagacacgacttatcgccactggcagcagccactggtaacaggattagcagagcgaggtatgtaggcggtgctacagagttcttgaagtggtggcctaactacggctacactagaaggacagtatttggtatctgcgctctgctgaagccagttaccttcggaaaaagagttggtagctcttgatccggcaaacaaaccaccgctggtagcggtggtttttttgtttgcaagcagcagattacgcgcagaaaaaaaggatctcaagaagatcctttgatcttttctacggggtctgacgctcagtggaacgaaaactcacgttaagggattttggtcatgagattatcaaaaaggatcttcacctagatccttttaaattaaaaatgaagttttaaatcaatctaaagtatatatgagtaaacttggtctgacagttaccaatgcttaatcagtgaggcacctatctcagcgatctgtctatttcgttcatccatagttgcctgactccccgtcgtgtagataactacgatacgggagggcttaccatctggccccagtgctgcaatgataccgcgagacccacgctcaccggctccagatttatcagcaataaaccagccagccggaagggccgagcgcagaagtggtcctgcaactttatccgcctccatccagtctattaattgttgccgggaagctagagtaagtagttcgccagttaatagtttgcgcaacgttgttgccattgctgcaggtcgggagcacaggatgacgcctaacaattcattcaagccgacaccgcttcgcggcgcggcttaattcaggagttaaacatcatgagggaagcggtgatcgccgaagtatcgactcaactatcagaggtagttggcgtcatcgagcgccatctcgaaccgacgttgctggccgtacatttgtacggctccgcagtggatggcggcctgaagccacacagtgatattgatttgctggttacggtgaccgtaaggcttgatgaaacaacgcggcgagctttgatcaacgaccttttggaaacttcggcttcccctggagagagcgagattctccgcgctgtagaagtcaccattgttgtgcacgacgacatcattccgtggcgttatccagctaagcgcgaactgcaatttggagaatggcagcgcaatgacattcttgcaggtatcttcgagccagccacgatcgacattgatctggctatcttgctgacaaaagcaagagaacatagcgttgccttggtaggtccagcggcggaggaactctttgatccggttcctgaacaggatctatttgaggcgctaaatgaaaccttaacgctatggaactcgccgcccgactgggctggcgatgagcgaaatgtagtgcttacgttgtcccgcatttggtacagcgcagtaaccggcaaaatcgcgccgaaggatgtcgctgccgactgggcaatggagcgcctgccggcccagtatcagcccgtcatacttgaagctaggcaggcttatcttggacaagaagatcgcttggcctcgcgcgcagatcagttggaagaatttgttcactacgtgaaaggcgagatcaccaaggtagtcggcaaataatgtctaacaattcgttcaagccgacgccgcttcgcggcgcggcttaactcaagcgttagatgctgcaggcatcgtggtgtcacgctcgtcgtttggtatggcttcattcagctccggttcccaacgatcaaggcgagttacatgatcccccatgttgtgcaaaaaagcggttagctccttcggtcctccgatcg

SEQ ID NO: 17381 - protein, 1013 aa, Artificial
  Consensus Sequence of Seq ID No. 122 and homologs
  MISC_FEATURE (1)..(1): Met or Absent
  MISC_FEATURE (2)..(2): Gly or Absent
  MISC_FEATURE (3)..(3): Asn or Absent
  MISC_FEATURE (4)..(4): Lys or Absent
  MISC_FEATURE (5)..(5): Leu or Absent
  MISC_FEATURE (6)..(6): Gly or Absent
  MISC_FEATURE (7)..(7): Arg or Absent
  MISC_FEATURE (8)..(8): Arg or Absent
  MISC_FEATURE (9)..(9): Arg or Absent
  MISC_FEATURE (10)..(10): Gln or Absent
  MISC_FEATURE (11)..(11): Val or Absent
  MISC_FEATURE (12)..(12): Val or Absent
  MISC_FEATURE (13)..(13): Asp or Absent
  MISC_FEATURE (14)..(14): Glu or Absent
  MISC_FEATURE (15)..(15): Lys or Absent
  MISC_FEATURE (16)..(16): Tyr or Absent
  MISC_FEATURE (17)..(17): Thr or Absent
  MISC_FEATURE (18)..(18): Arg or Absent
  MISC_FEATURE (19)..(19): Pro or Absent
  MISC_FEATURE (20)..(20): Gln or Absent
  MISC_FEATURE (21)..(21): Gly or Absent
  MISC_FEATURE (22)..(22): Leu or Absent
  MISC_FEATURE (23)..(23): Tyr or Absent
  MISC_FEATURE (24)..(24): Asn or Absent
  MISC_FEATURE (25)..(25): His or Absent
  MISC_FEATURE (26)..(26): Lys or Absent
  MISC_FEATURE (27)..(27): Asp or Absent
  MISC_FEATURE (28)..(28): Val or Absent
  MISC_FEATURE (29)..(29): Asp or Absent
  MISC_FEATURE (30)..(30): His or Absent
  MISC_FEATURE (31)..(31): Lys or Absent
  MISC_FEATURE (32)..(32): Lys or Absent
  MISC_FEATURE (33)..(33): Leu or Absent
  MISC_FEATURE (34)..(34): Arg or Absent
  MISC_FEATURE (35)..(35): Lys or Absent
  MISC_FEATURE (36)..(36): Leu or Absent
  MISC_FEATURE (37)..(37): Ile or Absent
  MISC_FEATURE (38)..(38): Leu or Absent
  MISC_FEATURE (39)..(39): Glu or Absent
  MISC_FEATURE (40)..(40): Ser or Absent
  MISC_FEATURE (41)..(41): Lys or Absent
  MISC_FEATURE (42)..(42): Leu or Absent
  MISC_FEATURE (43)..(43): Ala or Absent
  MISC_FEATURE (44)..(44): Pro or Absent
  MISC_FEATURE (45)..(45): Cys or Absent
  MISC_FEATURE (46)..(46): Tyr or Absent
  MISC_FEATURE (47)..(47): Pro or Absent
  MISC_FEATURE (48)..(48): Gly or Absent
  MISC_FEATURE (49)..(49): Asp or Absent
  MISC_FEATURE (50)..(50): Glu or Absent
  MISC_FEATURE (51)..(51): Glu or Absent
  MISC_FEATURE (52)..(52): Thr or Absent
  MISC_FEATURE (53)..(53): Ala or Absent
  MISC_FEATURE (54)..(54): Tyr or Absent
  MISC_FEATURE (55)..(55): Asp or Absent
  MISC_FEATURE (56)..(56): Arg or Absent
  MISC_FEATURE (57)..(57): Glu or Absent
  MISC_FEATURE (58)..(58): Glu or Absent
  MISC_FEATURE (59)..(59): Cys or Absent
  MISC_FEATURE (60)..(60): Pro or Absent
  MISC_FEATURE (61)..(61): Ile or Absent
  MISC_FEATURE (62)..(62): Cys or Absent
  MISC_FEATURE (63)..(63): Phe or Absent
  MISC_FEATURE (64)..(64): Leu or Absent
  MISC_FEATURE (65)..(65): Tyr or Absent
  MISC_FEATURE (66)..(66): Tyr or Absent
  MISC_FEATURE (67)..(67): Pro or Absent
  MISC_FEATURE (68)..(68): Ser or Absent
  MISC_FEATURE (69)..(69): Leu or Absent
  MISC_FEATURE (70)..(70): Asn or Absent
  MISC_FEATURE (71)..(71): Arg or Absent
  MISC_FEATURE (72)..(72): Ser or Absent
  MISC_FEATURE (73)..(73): Arg or Absent
  MISC_FEATURE (74)..(74): Cys or Absent
  MISC_FEATURE (75)..(75): Cys or Absent
  MISC_FEATURE (76)..(76): Thr or Absent
  MISC_FEATURE (77)..(77): Lys or Absent
  MISC_FEATURE (78)..(78): Ser or Absent
  MISC_FEATURE (79)..(79): Ile or Absent
  MISC_FEATURE (80)..(80): Cys or Absent
  MISC_FEATURE (81)..(81): Thr or Absent
  MISC_FEATURE (82)..(82): Glu or Absent
  MISC_FEATURE (83)..(83): Cys or Absent or Met
  MISC_FEATURE (84)..(84): Phe or Absent or Gly
  MISC_FEATURE (85)..(85): Leu or Absent or Asn or Gln
  MISC_FEATURE (86)..(86): Gln or Absent or Thr or Val or Ala or Ser
  MISC_FEATURE (87)..(87): Met or Absent or Ile or Pro or Ala
  MISC_FEATURE (88)..(88): Lys or Absent or Gly or Ala or Thr or Ser
  MISC_FEATURE (89)..(89): Val or Absent or Lys or Ser
  MISC_FEATURE (90)..(90): Pro or Absent or Glu or Leu or Ile or His
  MISC_FEATURE (91)..(91): Asn or Absent or Glu or Asp or Gln or Ser or Ala
  MISC_FEATURE (92)..(92): Ser or Absent or Ala or Gln or Arg
  MISC_FEATURE (93)..(93): Thr or Absent or Glu or Pro or Asp or Val or Ser
  MISC_FEATURE (94)..(94): Arg or Absent or Glu or Gln or Ala or Asp or Ser or Pro
  MISC_FEATURE (95)..(95): Pro or Absent or Tyr or Ser or Asn or Gln
  MISC_FEATURE (96)..(96): Thr or Absent or Gly or Ser or Phe or Glu
  MISC_FEATURE (97)..(97): Gln or Absent or Ala or Tyr or Asn or His or Ser
  MISC_FEATURE (98)..(98): Cys or Absent or Met or Thr or Asp or Ser
  MISC_FEATURE (99)..(99): Pro or Absent or Asn or Gly or Val or Ala or Thr
  MISC_FEATURE (100)..(100): Phe or Absent or Gly or Arg or Asn
  MISC_FEATURE (101)..(101): Cys or Absent or Pro or His or Thr
  MISC_FEATURE (102)..(102): Lys or Absent or Arg or Asp or Ser or Ala
  MISC_FEATURE (103)..(103): Thr or Absent or Arg or Asp or Ser
  MISC_FEATURE (104)..(104): Ala or Absent or Gly or Pro or Thr or Ser
  MISC_FEATURE (105)..(105): Asn or Absent or Gly or Ala or Tyr or Ser
  MISC_FEATURE (106)..(106): Tyr or Absent or Ser or Asn or Thr or Glu
  MISC_FEATURE (107)..(107): Ala or Absent or Gln or Arg or Asp or Thr
  MISC_FEATURE (108)..(108): Val or Absent or Lys or Ser or Thr or Ala or Glu
  MISC_FEATURE (109)..(109): Glu or Absent or Gln or Ser or Arg
  MISC_FEATURE (110)..(110): Tyr or Absent or Phe or Gln or Ser or Thr or Ala
  MISC_FEATURE (111)..(111): Arg or Absent or Ala or Asn or Val or Ser
  MISC_FEATURE (112)..(112): Gly or Absent or Ser or Ala
  MISC_FEATURE (113)..(113): Val or Absent or Leu or Glu or Gly or Tyr or Ser
  MISC_FEATURE (114)..(114): Lys or Absent or Ser or Val or Ile or Asp or Ala
  MISC_FEATURE (115)..(115): Ser or Absent or Gln or Leu or Gly or Lys or Tyr or His
  MISC_FEATURE (116)..(116): Lys or Absent or Ser or Asn or Ala or Gln or His or Tyr or Pro
  MISC_FEATURE (117)..(117): Glu or Absent or Ser or Phe or Tyr or Arg or Ile
  MISC_FEATURE (118)..(118): Glu or Absent or Thr or Gly or Arg or Asp or Pro or Gln or Asn
  MISC_FEATURE (119)..(119): Lys or Absent or Ala or Ser or Gly or Glu or Thr or Pro
  MISC_FEATURE (120)..(120): Gly or Absent or Ser or Gln or Ala or Glu or Asp or Lys
  MISC_FEATURE (121)..(121): Leu or Absent or Ser or Gly or Ala or Glu or Thr
  MISC_FEATURE (122)..(122): Glu or Absent or Gly or Pro or Ser or Ile or Thr or Ala
  MISC_FEATURE (123)..(123): Gln or Absent or Ser or Thr or His or Gly
  MISC_FEATURE (124)..(124): Ile or Absent or Ala or Met
  MISC_FEATURE (125)..(125): Glu or Absent or Ala or Asp or Ser
  MISC_FEATURE (126)..(126): Glu or Absent or Ala or Lys or Ser
  MISC_FEATURE (127)..(127): Gln or Absent or Asp or Asn or Thr or Ser
  MISC_FEATURE (128)..(128): Arg or Absent or Ser or Leu
  MISC_FEATURE (129)..(129): Val or Absent or Gly or Asn or Ala
  MISC_FEATURE (130)..(130): Ile or Absent or Arg or Leu
  MISC_FEATURE (131)..(131): Glu or Absent or Ser or Asn or Gly or Thr or Arg
  MISC_FEATURE (132)..(132): Ala or Absent or Arg or Gly
  MISC_FEATURE (133)..(133): Lys or Absent or Arg or Gly
  MISC_FEATURE (134)..(134): Ile or Absent or Ala or Thr or Arg
  MISC_FEATURE (135)..(135): Arg or Absent or Thr or Ser
  MISC_FEATURE (136)..(136): Met or Absent or Ser or Asp
  MISC_FEATURE (137)..(137): Arg or Absent or Leu or Phe
  MISC_FEATURE (138)..(138): Gln or Absent or Val or Ala
  MISC_FEATURE (139)..(139): Gln or Absent or Gly or Asn or Leu
  MISC_FEATURE (140)..(140): Glu or Absent or Asn or Leu
  MISC_FEATURE (141)..(141): Leu or Absent or Ile or Gly
  MISC_FEATURE (142)..(142): Gln or Absent or Leu
  MISC_FEATURE (143)..(143): Asp or Absent or Ser or Asn or Gly
  MISC_FEATURE (144)..(144): Glu or Absent or Ser or Ala or Gly
  MISC_FEATURE (145)..(145): Glu or Absent or Gly or Ser or Pro
  MISC_FEATURE (146)..(146): Glu or Absent or Gly or Thr or Asn or Arg
  MISC_FEATURE (147)..(147): Arg or Absent or Val or Ser or Asn or Glu
  MISC_FEATURE (148)..(148): Met or Absent or Ser or Ala or Pro
  MISC_FEATURE (149)..(149): His or Absent or Arg or Val
  MISC_FEATURE (150)..(150): Lys or Absent or Ala or Ser or Asn or Thr or Glu
  MISC_FEATURE (151)..(151): Arg or Absent or Glu or Asp or Lys or His
  MISC_FEATURE (152)..(152): Leu or Absent or Ser or Arg
  MISC_FEATURE (153)..(153): Glu or Absent or Tyr or Arg
  MISC_FEATURE (154)..(154): Met or Absent or Gly
  MISC_FEATURE (155)..(155): Ser or Absent or Gly
  MISC_FEATURE (156)..(156): Ser or Absent or Asn
  MISC_FEATURE (157)..(157): Ser or Absent or Pro or Thr
  MISC_FEATURE (158)..(158): Asn or Absent or Ala or Thr or Gly
  MISC_FEATURE (159)..(159): Val or Absent or Asn or Gly or Ser
  MISC_FEATURE (160)..(160): Asn or Absent or Gly or Glu or His
  MISC_FEATURE (161)..(161): Val or Absent or Tyr or Leu
  MISC_FEATURE (162)..(162): Ala or Absent or Asn or Ser
  MISC_FEATURE (163)..(163): Val or Absent or Gly or Lys
  MISC_FEATURE (164)..(164): Ala or Absent or Asn or Lys
  MISC_FEATURE (165)..(165): Asp or Absent or Ser or Gln
  MISC_FEATURE (166)..(166): Val or Absent or Pro or Leu or Gln or Glu
  MISC_FEATURE (167)..(167): Glu or Absent or Met or Ser or Asn or Val or Thr or Ala or Arg
  MISC_FEATURE (168)..(168): Tyr or Absent or Val or Ala or Pro or Thr or Arg or His or Ile
  MISC_FEATURE (169)..(169): Ser or Absent or Pro or Tyr or Ala or Gln or Gly
  MISC_FEATURE (170)..(170): Ser or Absent or Asn or Met or Arg or Lys or Glu
  MISC_FEATURE (171)..(171): Asn or Absent or Phe or Pro or Arg or Lys or Ser or Asp
  MISC_FEATURE (172)..(172): Ala or Absent or Val or Cys or Arg or Lys or Pro or Glu or Thr or Ser
  MISC_FEATURE (173)..(173): Val or Absent or Phe or Ser or Gly or Thr or Ala
  MISC_FEATURE (174)..(174): Ser or Absent or Ala or Pro or Leu or Thr or Arg or Gln or Asp
  MISC_FEATURE (175)..(175): Ser or Absent or Glu or Pro or Arg or Lys or Tyr or Phe
  MISC_FEATURE (176)..(176): Ser or Absent or Glu or Arg or Gly or His
  MISC_FEATURE (177)..(177): Ser or Absent or Ile or Lys or Arg or Glu
  MISC_FEATURE (178)..(178): Val or Absent or Thr or Ser or Asp or Glu or Lys or His or Ala or Gly
  MISC_FEATURE (179)..(179): Ser or Absent or Pro or Arg or Lys or Leu or Glu or Thr
  MISC_FEATURE (180)..(180): Val or Absent or Ile or Leu or Ala or Arg or Asn or Thr
  MISC_FEATURE (181)..(181): Val or Absent or Ile or Pro or Arg or Lys or Glu or Ala or Ser
  MISC_FEATURE (182)..(182): Glu or Absent or Pro or Gln or Ala or Ser
  MISC_FEATURE (183)..(183): Asn or Absent or His or Gln or Lys or Glu or Ala or Arg or Ser or Gly or Thr
  MISC_FEATURE (184)..(184): Asp or Absent or Leu or Ile or Asn or His or Val or Arg or Ser
  MISC_FEATURE (185)..(185): Glu or Absent or Lys or Pro or Asp or Ala or Phe or Gly or Tyr
  MISC_FEATURE (186)..(186): Ile or Absent or Lys or Glu or Leu or Arg or Val or Met or Thr or Pro
  MISC_FEATURE (187)..(187): Val or Absent or Arg or Glu or Gln or Lys or Asp or Ser or Gly
  MISC_FEATURE (188)..(188): Ser or Absent or Tyr or Leu or Pro or Gln
  MISC_FEATURE (189)..(189): Ser or Absent or Leu or His or Ile or Val or Arg or Pro or Met
  MISC_FEATURE (190)..(190): Gln or Absent or Lys or Pro or Val or Ile or Ser or Gly
  MISC_FEATURE (191)..(191): Asp or Absent or Thr or Arg or His or Lys or Met or Pro or Asn
  MISC_FEATURE (192)..(192): Ser or Absent or Arg or Leu or Tyr or Cys or Lys or Gln or Pro or Gly
  MISC_FEATURE (193)..(193): Cys or Absent or Val or Leu or Glu or Asn or Ser or Thr or Trp
  MISC_FEATURE (194)..(194): Ala or Absent or Pro or Val or Gln or Glu or Gly or Arg
  MISC_FEATURE (195)..(195): Thr or Absent or Ile or His or Leu or Gln or Pro or Gly or Arg
  MISC_FEATURE (196)..(196): Ser or Absent or Gly or Ile or Val or Leu or Arg
  MISC_FEATURE (197)..(197): Val or Absent or Arg or Ser or Asp or Leu or Met or Gly
  MISC_FEATURE (198)..(198): Val or Absent or Ala or Phe or Gly or Pro or Arg
  MISC_FEATURE (199)..(199): Arg or Absent or Ile or His or Tyr or Asn or Gly
  MISC_FEATURE (200)..(200): Ala or Absent or Leu or Thr or Arg or Gln or Gly or Lys
  MISC_FEATURE (201)..(201): Asn or Absent or Ile or Cys or Gly or Arg or Pro or Ala or Ser
  MISC_FEATURE (202)..(202): Ala or Absent or Pro or Thr or His or Gly
  MISC_FEATURE (203)..(203): Thr or Absent or Ile or Gly or Leu or Val
  MISC_FEATURE (204)..(204): Thr or Absent or Ser or Asp or Gly or Arg or Glu
  MISC_FEATURE (205)..(205): Arg or Absent or Ile or Ala or Phe or Tyr or Pro or Glu or Gly
  MISC_FEATURE (206)..(206): Thr or Absent or Lys or His or Leu or Gln or Arg or Ile or Glu
  MISC_FEATURE (207)..(207): Asn or Absent or Asp or Ala or Arg or Val or Tyr or Trp or Phe
  MISC_FEATURE (208)..(208): Arg or Absent or Gln or Pro or Thr or Gly
  MISC_FEATURE (209)..(209): Asp or Absent or Ala or His or Gln or Tyr or Phe or Arg or any naturally occurring amino acid
  MISC_FEATURE (210)..(210): Asp or Absent or Ala or Gly or Cys or Pro
  MISC_FEATURE (211)..(211): Glu or Absent or Gln or Leu or Val or Ser or Cys or His
  MISC_FEATURE (212)..(212): Phe or Absent or His or Tyr or Ser or Gly or Arg
  MISC_FEATURE (213)..(213): Asp or Absent or Asn or Ser or Arg or His or Leu or Tyr or Val
  MISC_FEATURE (214)..(214): Val or Absent or Cys or Ser or Leu or Phe or Thr or Pro or Tyr
  MISC_FEATURE (215)..(215): Asp or Absent or Cys or Ala or Glu or Gly or Gln or Pro or Arg
  MISC_FEATURE (216)..(216): Leu or Absent or Cys or Ser or Pro or Lys or Thr or Ala or His or Gln
  MISC_FEATURE (217)..(217): Glu or Absent or Met or Arg or Ser or Ala or Leu or Gln or His or Pro or Lys
  MISC_FEATURE (218)..(218): Asp or Absent or Gly or Glu or Arg or Ser or Gln
  MISC_FEATURE (219)..(219): Ile or Absent or Asn or Ala or Val or Tyr or Phe or Trp or Leu or Pro or Met
  MISC_FEATURE (220)..(220): Met or Absent or Lys or Asn or Asp or Glu or Ser or Tyr or Gly
  MISC_FEATURE (221)..(221): Val or Absent or Leu or Asn or Thr or Ala or Ser or Ile or Lys or Gln or Pro
  MISC_FEATURE (222)..(222): Met or Absent or Gly or Pro or Lys or Asn or Asp or Thr or Leu or Ala or Ser or Arg or His or Gln
  MISC_FEATURE (223)..(223): Glu or Absent or Arg or Lys or Ser or Ile or Val or Met or Ala or Pro
  MISC_FEATURE (224)..(224): Ala or Absent or Lys or Leu or Val or Ile or Asp or Thr or Arg
  MISC_FEATURE (225)..(225): Ile or Absent or Arg or Leu or Gln or Lys or Ala or Ser or Thr
  MISC_FEATURE (226)..(226): Trp or Absent or Gln or Leu or Arg or Lys or Gly or Asn or Ser or Asp
  MISC_FEATURE (227)..(227): Leu or Absent or Ile or Val or Pro or Cys or Arg
  MISC_FEATURE (228)..(228): Ser or Absent or Val or Arg or Ile or Met or His or Thr
  MISC_FEATURE (229)..(229): Ile or Absent or Asp or Glu or Leu or Val or Thr or Ala or Lys
  MISC_FEATURE (230)..(230): Gln or Absent or Glu or Pro or Asn or Lys or Ser or Ala or Asp or Leu or Val or Ile
  MISC_FEATURE (231)..(231): Glu or Absent or Arg or Pro or Lys or Ser or Gly or Ala or Thr or Asp
  MISC_FEATURE (232)..(232): Asn or Absent or Tyr or Gln or Arg or Lys or Leu or Glu
  MISC_FEATURE (233)..(233): Gly or Absent or Thr or Ala or Leu or Arg
  MISC_FEATURE (234)..(234): Arg or Absent or Leu or Lys or His or Ala or Met or Pro or Ile or Tyr
  MISC_FEATURE (235)..(235): Arg or Absent or Pro or Ser or Leu or Thr
  MISC_FEATURE (236)..(236): Arg or Absent or Gln or Gly or Cys or Phe or Ser or Glu
  MISC_FEATURE (237)..(237): Asn or Absent or His or Gln or Met or Tyr or Phe or Trp or Pro or Ala or Leu or Gly
  MISC_FEATURE (238)..(238): Leu or Absent or Gly or Pro or Lys or Thr or Ile or Arg or Met or Phe or Gln
  MISC_FEATURE (239)..(239): Ser or Absent or Leu or Asn or Gly or Pro or Cys
  MISC_FEATURE (240)..(240): Phe or Absent or Ile or Val or Ala or Leu or Ser or Lys
  MISC_FEATURE (241)..(241): Val or Absent or Ala or Glu or Asp or Gln or Asn or Pro or Thr or Tyr
  MISC_FEATURE (242)..(242): Asp or Absent or Ala or Ile or Glu or Ser or Cys or Pro
  MISC_FEATURE (243)..(243): Ala or Absent or Ser or Gly or Cys or Tyr or Phe or His or Pro or Gln
  MISC_FEATURE (244)..(244): Thr or Absent or Gly or Val or Ala or Ser or Asp or Glu or Leu or Arg or Pro or Tyr
  MISC_FEATURE (245)..(245): Ser or Absent or Gly or Lys or Glu or Gln or Asp or Ala or Pro
  MISC_FEATURE (246)..(246): Gly or Absent or Val or Arg or Asp or Thr or Ser or Glu or Ala
  MISC_FEATURE (247)..(247): His or Absent or Gln or Arg or Trp or Ser or Leu or Asp or Gly or Ala or Glu
  MISC_FEATURE (248)..(248): Tyr or Absent or Val or Asp or Pro or Thr or Glu or Gly or Leu
  MISC_FEATURE (249)..(249): Val or Absent or Arg or Ala or Lys or Asp or Glu or Ser or Leu
  MISC_FEATURE (250)..(250): Ala or Absent or Arg or Asp or Glu or His or Val or Cys or Leu or Gly
  MISC_FEATURE (251)..(251): Asp or Absent or Arg or Lys or Glu or Gln or Pro or Asn or Ala or Val or Cys
  MISC_FEATURE (252)..(252): Gly or Absent or Pro or Trp or Val or Leu or Gln or Ile or Asn or Asp or Cys or Lys
  MISC_FEATURE (253)..(253): Arg or Absent or Pro or Val or Ile or Lys or Met or Gly or Leu or Glu
  MISC_FEATURE (254)..(254): Tyr or Absent or Ala or Glu or Arg or Lys or Gly or Ile
  MISC_FEATURE (255)..(255): Val or Absent or Ile or Ala or Leu or Cys
  MISC_FEATURE (256)..(256): Ser or Absent or Asp or Glu or Val or Ile or Ala or Arg or Leu or Pro
  MISC_FEATURE (257)..(257): Ser or Absent or Glu or Asp or Arg or Pro or Lys or Thr or Ile
  MISC_FEATURE (258)..(258): Val or Absent or Arg or Lys or Ser or Gly or Ala or Tyr or Glu or Cys or Leu
  MISC_FEATURE (259)..(259): Ser or Absent or Leu or Ala or Phe or Met or Gly or Thr or Asp
  MISC_FEATURE (260)..(260): Ser or Absent or Thr or Leu or Pro or Val or Arg or Gln or Glu
  MISC_FEATURE (261)..(261): Val or Absent or Arg or Gln or Gly or Leu or Ile or Tyr or Asp or Glu or Phe or Cys
  MISC_FEATURE (262)..(262): Ser or Absent or Pro or His or Lys or Tyr
  MISC_FEATURE (263)..(263): Ser or Absent or His or Ala or Cys or Asp or Pro or Ile
  MISC_FEATURE (264)..(264): Val or Absent or Lys or Pro or Ser or Thr or Ala or Tyr or Cys
  MISC_FEATURE (265)..(265): Met or Absent or Ser or Phe or Ala or Asp or Leu
  MISC_FEATURE (266)..(266): Gly or Absent or Glu or Gln or Asn or Asp or Ser or Leu
  MISC_FEATURE (267)..(267): Pro or Absent or Glu or Gln or Val or Gly or Arg or Phe
  MISC_FEATURE (268)..(268): Pro or Absent or Glu or Asp or His or Asn or Ser or Val or Tyr
  MISC_FEATURE (269)..(269): Thr or Absent or Pro or Val or Leu or Ala or Lys
  MISC_FEATURE (270)..(270): Gly or Absent or Glu or Thr or Asn or Cys or Ser
  MISC_FEATURE (271)..(271): Ser or Absent or Thr or Leu or Cys
  MISC_FEATURE (272)..(272): Ser or Absent or Glu or Ala or Asn
  MISC_FEATURE (273)..(273): Ser or Absent or Phe or Tyr or Lys or Arg
  MISC_FEATURE (274)..(274): Ser or Absent or Glu or Thr or Lys or Gly
  MISC_FEATURE (275)..(275): Pro or Absent or Ala or Gly or Asp or Ile or Lys
  MISC_FEATURE (276)..(276): Ser or Absent or Leu or Val or Thr or Pro or Cys
  MISC_FEATURE (277)..(277): Gly or Absent or Leu or Pro or Lys or Ser or Cys or Thr
  MISC_FEATURE (278)..(278): Gly or Absent or His or Leu or Thr or Val or Ile or Asp or Lys or Ala
  MISC_FEATURE (279)..(279): Leu or Absent or Cys or Gly or Ala or Ser or Lys or Glu
  MISC_FEATURE (280)..(280): Ala or Absent or Asn or Asp or Ser or Gly or Phe
  MISC_FEATURE (281)..(281): Cys or Absent or Ile or Leu or Ala or Val
  MISC_FEATURE (282)..(282): Ala or Absent or Val or Arg or Gly or Asn or Ser or Glu or Cys or Leu
  MISC_FEATURE (283)..(283): Ile or Absent or Gln or Val or Asp or Glu or Lys or Thr or Leu
  MISC_FEATURE (284)..(284): Ala or Absent or Ser or Asp or Pro or Gln or Glu or any naturally occurring amino acid
  MISC_FEATURE (285)..(285): Ala or Absent or Arg or Asp or Glu or His or Thr or Pro or Tyr or Cys
  MISC_FEATURE (286)..(286): Leu or Absent or Ser or Ile or Phe or Pro or Thr or His
  MISC_FEATURE (287)..(287): Ala or Absent or Asp or Leu or Asn or His or Glu or Ser or Val
  MISC_FEATURE (288)..(288): Glu or Absent or Arg or Ser or Ala or Tyr or Gly or Gln or Val
  MISC_FEATURE (289)..(289): Arg or Absent or Val or Leu or Ile or Asn or Asp or Ala or Met or Phe
  MISC_FEATURE (290)..(290): Gln or Absent or Leu or Gly or Val or Ile or Ser or Lys or Arg or Phe
  MISC_FEATURE (291)..(291): Gln or Absent or Leu or Val or Asn or Asp or Thr or Pro or Glu or Ser or Phe
  MISC_FEATURE (292)..(292): Met or Absent or Tyr or Arg or Thr or Lys or Ser or Pro or Asp or Glu or Val
  MISC_FEATURE (293)..(293): Ala or Absent or Ser or Leu or Met or Val or Glu or Gln or Arg or Thr or Lys or Gly or His
  MISC_FEATURE (294)..(294): Gly or Absent or Ser or Asn or Leu or Ala or His or Pro or Gln or Glu or Cys or Thr
  MISC_FEATURE (295)..(295): Glu or Absent or Met or Asn or Lys or Pro or Ser or Leu or Gly or Cys or Ala or Thr
  MISC_FEATURE (296)..(296): Ser or Absent or Arg or Asp or Lys or Val or Gly or Asn or Gln
  MISC_FEATURE (297)..(297): Ser or Absent or Glu or Val or Leu or Arg or Lys or Pro or Tyr
  MISC_FEATURE (298)..(298): Met or Absent or Ile or Gly or Asp or Glu or Pro or Ser or Thr or His
  MISC_FEATURE (299)..(299): Ser or Absent or Arg or Pro or Val or Phe or Ile or Ala or Gln or Thr or His or Trp or Gly
  MISC_FEATURE (300)..(300): Leu or Absent or Ser or Pro or Lys or Gly or Arg or Ala or His or Cys or Tyr or any naturally occurring amino acid
  MISC_FEATURE (301)..(301): Thr or Absent or Asn or His or Asp or Arg or Lys or Gly or Pro or Phe or Ser or Leu
  MISC_FEATURE (302)..(302): Asn or Absent or Gln or Asp or Leu or Val or Ser or Met or Pro or Phe or Tyr
  MISC_FEATURE (303)..(303): Glu or Met or Absent or Thr or Lys or Arg or Ser or His or Gln or Cys or Pro
  MISC_FEATURE (304)..(304): Asn or Lys or Absent or Ile or Met or Leu or Arg or Asp or Ser or Ala or Val or Gln
  MISC_FEATURE (305)..(305): Met or Ile or Absent or Thr or Leu or Ala or Arg or His or Lys or Tyr or Ser
  MISC_FEATURE (306)..(306): Pro or His or Absent or Ser or Trp or Thr or Lys or Ile or Leu or Asn or Met or Val or Ala
  MISC_FEATURE (307)..(307): Ser or His or Absent or Gln or Thr or Leu or Val or Arg or Phe or Gly or Asn or Asp
  MISC_FEATURE (308)..(308): Phe or His or Absent or Arg or Glu or Asp or Thr or Ser or Lys or Pro or Ile or Tyr
  MISC_FEATURE (309)..(309): Asn or Ser or Absent or Gly or Arg or Ala or Pro or Thr or His or Phe
  MISC_FEATURE (310)..(310): Thr or Met or Absent or His or Lys or Asp or Asn or Arg or Ser or Val
  MISC_FEATURE (311)..(311): Leu or Cys or Pro or Arg or Gly or Absent or His or Ser or Glu
  MISC_FEATURE (312)..(312): Pro or His or Gln or Ala or Absent or Ser or Tyr or Thr or Ile or Lys or Phe
  MISC_FEATURE (313)..(313): Gly or Arg or Trp or Pro or Absent or Asn or Phe or Lys or Leu or His or Glu or Ser
  MISC_FEATURE (314)..(314): Ser or Leu or Thr or Cys or Absent or Lys or Arg or Phe or Gly
  MISC_FEATURE (315)..(315): Arg or Leu or Ile or Lys or Tyr or Phe or Absent or Thr or Ser or Cys or Val
  MISC_FEATURE (316)..(316): Arg or Asp or Ser or Pro or Absent or Ile or Val or Leu or Asn or Lys
  MISC_FEATURE (317)..(317): Phe or His or Absent or Gly or Ala or Pro or Leu or Arg or Asn or Ser or Glu or Thr
  MISC_FEATURE (318)..(318): Tyr or Gly or Absent or Ala or Leu or Asp or Ser or Trp or Pro or Thr or Asn or Lys or Met or Glu
  MISC_FEATURE (319)..(319): Asn or Ser or Absent or Glu or Asp or Ile or Gln or Phe or Ala or Gly
  MISC_FEATURE (320)..(320): Arg or Absent or Glu or Asp or Ser or Gly or Lys or any naturally occurring amino acid
  MISC_FEATURE (321)..(321): Leu or Ile or Val or Absent or Thr or Ser or Asp or Ala or Glu or Arg or Asn or Lys or Cys or Pro
  MISC_FEATURE (322)..(322): Gly or Ala or Absent or Pro or Ser or Asp or Glu or Asn or Thr
  MISC_FEATURE (323)..(323): Arg or Absent or Leu or Ile
  MISC_FEATURE (324)..(324): Asp or Absent or Glu
  MISC_FEATURE (325)..(325): Met or Absent or His or Gln
  MISC_FEATURE (326)..(326): Ala or Absent or Met or Leu
  MISC_FEATURE (327)..(327): Absent or Ser or Val
  MISC_FEATURE (328)..(328): Absent or His or Ser
  MISC_FEATURE (329)..(329): Absent or Leu or Ala
  MISC_FEATURE (330)..(330): Absent or Arg
  MISC_FEATURE (331)..(331): Absent or Ile or Thr
  MISC_FEATURE (332)..(332): Absent or Asp or His
  MISC_FEATURE (333)..(333): Absent or Leu or Pro
  MISC_FEATURE (334)..(334): Absent or Asp or Pro
  MISC_FEATURE (335)..(335): Absent or Asn or Cys
  MISC_FEATURE (336)..(336): Absent or Thr or Phe
  MISC_FEATURE (337)..(337): Absent or Thr or Gly
  MISC_FEATURE (338)..(338): Absent or Phe or Pro
  MISC_FEATURE (339)..(339): Absent or Ser or Gly or His
  MISC_FEATURE (340)..(340): Absent or Gln or Ala or Val or Leu
  MISC_FEATURE (341)..(341): Absent or Ser or Leu or Ala or Asp
  MISC_FEATURE (342)..(342): Absent or Ala or Ser or Val
  MISC_FEATURE (343)..(343): Absent or Pro or Leu
  MISC_FEATURE (344)..(344): Absent or Thr or Val or Gln
  MISC_FEATURE (345)..(345): Absent or Pro or Asn or Cys
  MISC_FEATURE (346)..(346): Absent or Ser or Phe or Tyr
  MISC_FEATURE (347)..(347): Absent or Trp or Phe or Arg or Tyr
  MISC_FEATURE (348)..(348): Absent or Met or Leu or Gln or Ser
  MISC_FEATURE (349)..(349): Absent or Arg or Leu
  MISC_FEATURE (350)..(350): Absent or Ser or Val or Leu
  MISC_FEATURE (351)..(351): Absent or Gly
  MISC_FEATURE (352)..(352): Absent or Glu or Val
  MISC_FEATURE (353)..(353): Absent or Pro or Trp
  MISC_FEATURE (354)..(354): Absent or Asp or Ser or Met or Val or Ile or Thr
  MISC_FEATURE (355)..(355): Absent or Gln or Phe or Leu or Glu or Cys
  MISC_FEATURE (356)..(356): Absent or Glu or Gly or Gln or His or Phe
  MISC_FEATURE (357)..(357): Absent or Asp or any naturally occurring amino acid or Ile or Leu or Phe
  MISC_FEATURE (358)..(358): Absent or Gly or Glu or Thr
  MISC_FEATURE (359)..(359): Absent or Asn or Asp or Arg or Glu
  MISC_FEATURE (360)..(360): Absent or Ser or Glu or Asn or Ala or Gln
  MISC_FEATURE (361)..(361): Absent or Lys or Arg or Ala or Thr or Leu
  MISC_FEATURE (362)..(362): Absent or Phe or Tyr or Ile or Thr or Val
  MISC_FEATURE (363)..(363): Absent or Leu or Asn or Ile
  MISC_FEATURE (364)..(364): Absent or Glu or Pro or Ala
  MISC_FEATURE (365)..(365): Absent or Leu or Glu or Arg or Gly or Ser or Ala
  MISC_FEATURE (366)..(366): Absent or Lys or Ile or Leu or Gln
  MISC_FEATURE (367)..(367): Absent or Leu or Thr or Ile or Met
  MISC_FEATURE (368)..(368): Absent or Glu or Met or Gln or Thr or Arg
  MISC_FEATURE (369)..(369): Absent or Ala or Asn or Met or Ser or Val
  MISC_FEATURE (370)..(370): Absent or Arg or Lys or Pro or Ser
  MISC_FEATURE (371)..(371): Absent or Arg or Pro or Lys or Gln or His
  MISC_FEATURE (372)..(372): Absent or Ile or Ser or Thr or Gln or Lys
  MISC_FEATURE (373)..(373): Asn or Absent or Gly or Arg or Pro or Glu or Ala
  MISC_FEATURE (374)..(374): Tyr or Absent or Ser or Glu or Ala or Val or Leu
  MISC_FEATURE (375)..(375): Pro or Absent or Lys or Ala or Ser or Gln
  MISC_FEATURE (376)..(376): Pro or Absent or Ser or Asp
  MISC_FEATURE (377)..(377): Gly or Absent or Ser or Lys or Met or Asp or Glu
  MISC_FEATURE (378)..(378): Asp or Absent or Asn or Pro or Ala or Ile or Glu
  MISC_FEATURE (379)..(379): Asn or Absent or Val or Pro or Glu or Leu or Ala or Asp
  MISC_FEATURE (380)..(380): Leu or Absent or Glu or Pro or Arg or Lys
  MISC_FEATURE (381)..(381): Asn or Absent or Arg or Lys or Asp or Ser or Glu or Met or Ala or Leu
  MISC_FEATURE (382)..(382): Glu or Absent or Thr or His or Asn or Arg or Leu or Lys or Cys
  MISC_FEATURE (383)..(383): Glu or Absent or Gly or Thr or Asp or Gln or Asn or His or Lys or Arg
  MISC_FEATURE (384)..(384): Pro or Absent or Val or Glu or Ile or Ser or Arg or Leu or Lys
  MISC_FEATURE (385)..(385): Leu or Absent or Ser or Ala or Pro or Arg or Gln
  MISC_FEATURE (386)..(386): Asp or Absent or Gln or Ser or Gly or Asn
  MISC_FEATURE (387)..(387): Glu or Absent or Pro or Arg
  MISC_FEATURE (388)..(388): Ala or Absent or Arg or Cys
  MISC_FEATURE (389)..(389): Val or Absent or Lys or Ser
  MISC_FEATURE (390)..(390): Thr or Absent or Ser or Asn or Asp
  MISC_FEATURE (391)..(391): Met or Absent or Ala or Pro or Ser or Tyr or Leu or Thr or Cys or Val
  MISC_FEATURE (392)..(392): Thr or Absent or Cys or Ala or Phe or His or Val or Arg
  MISC_FEATURE (393)..(393): Arg or Absent or Leu or Asn or Val or Thr or Ile or Ala
  MISC_FEATURE (394)..(394): Ser or Absent or Tyr or Pro or Lys or Asn or Leu or Val or any naturally occurring amino acid or Ile
  MISC_FEATURE (395)..(395): His or Absent or Arg or Ser or Asn or Glu or Gly or Phe or Thr or Ala
  MISC_FEATURE (396)..(396): Gly or Absent or Thr or Asp or Pro or Gln or Phe or Glu
  MISC_FEATURE (397)..(397): Glu or Absent or Thr or Asp or Pro or Arg or Val or Tyr
  MISC_FEATURE (398)..(398): Trp or Absent or Ala or Leu or Ile or Pro or Arg or Val or Ser or Thr or Lys
  MISC_FEATURE (399)..(399): Asp or Absent or Ile or Lys or Met or Glu or Ala or Leu or Thr
  MISC_FEATURE (400)..(400): Met or Absent or Thr or Trp or Tyr or Val or Ala or Leu or Arg or Ser
  MISC_FEATURE (401)..(401): Asp or Absent or Ser or Thr or Lys or Tyr or Ala or Arg or any naturally occurring amino acid or Glu
  MISC_FEATURE (402)..(402): His or Absent or Thr or Ser or Ile or Leu or Asp or Val or Ala or Gln or Arg or Tyr
  MISC_FEATURE (403)..(403): Gly or Absent or Cys or His or Ala or Tyr or Ser or Val or Arg
  MISC_FEATURE (404)..(404): Thr or Absent or His or Gly or Ala or Arg or Lys or Leu or Asp or Pro or Glu or Asn
  MISC_FEATURE (405)..(405): Gln or Absent or Asp or Arg or Leu or Asn or Phe or Gly or Ser or Tyr or His or Ile
  MISC_FEATURE (406)..(406): Leu or Absent or Ala or Thr or Asp or Gly or Pro or Asn or Cys or Phe
  MISC_FEATURE (407)..(407): Thr or Absent or Glu or Val or Met or Ala or Ser or Ile or Asn or Asp
  MISC_FEATURE (408)..(408): Glu or Arg or Asp or Thr or Absent
  MISC_FEATURE (409)..(409): Thr or Asp or Cys or Absent or Lys or Gly or Ser
  MISC_FEATURE (410)..(410): Ala or Val or Met or Pro or Gly or Absent or Phe or Tyr
  MISC_FEATURE (411)..(411): Thr or Val or His or Ile or Ala or Absent or Ser
  MISC_FEATURE (412)..(412): Ser or Leu or Cys or Absent or Val or Ala
  MISC_FEATURE (413)..(413): Tyr or Asn or Ile or Phe or Thr or Absent or Pro
  MISC_FEATURE (414)..(414): Thr or Ser or Ala or Met or Leu or Phe or Tyr or Absent or Pro
  MISC_FEATURE (415)..(415): Asn or Absent or Tyr or Phe or any naturally occurring amino acid or Ser or Val or Ala or His
  MISC_FEATURE (416)..(416): Ser or Ala or Phe or Absent or Tyr or Leu or Glu or Lys or Gln or Arg
  MISC_FEATURE (417)..(417): Val or Ala or Absent or Pro or Leu or Asn or Tyr or Ser or Cys
  MISC_FEATURE (418)..(418): Ala or Glu or Lys or Absent or Ser or Met or Gly or Asn or Pro or Thr or His
  MISC_FEATURE (419)..(419): Ala or Asn or Absent or Ser or Val or Pro or Tyr or Gly or Glu or Gln
  MISC_FEATURE (420)..(420): Glu or Leu or Absent or Phe or Met or Ile or Arg or Gln or Val
  MISC_FEATURE (421)..(421): Asp or Absent or Asn or Trp or Gly or Glu
  MISC_FEATURE (422)..(422): Arg or Glu or Absent or Ser or Thr or Tyr or Val or Ile or Met or Lys or Phe or His or Asn
  MISC_FEATURE (423)..(423): Gly or Cys or Asp or Absent or Ser or Thr or Lys or Glu
  MISC_FEATURE (424)..(424): Glu or Pro or Ala or Absent or Arg or Leu or Lys or Val or Thr or Met or Cys
  MISC_FEATURE (425)..(425): Leu or Pro or Absent or Cys or His or Lys or Val
  MISC_FEATURE (426)..(426): Ser or Asn or Asp or Absent or Cys or Met or Glu
  MISC_FEATURE (427)..(427): Ser or Asp or Absent or Leu or Lys or Met or Gly or Gln or Ala or His or Glu or Thr
  MISC_FEATURE (428)..(428): Leu or Ala or Val or Met or Absent or Lys or Gln or Arg or Glu
  MISC_FEATURE (429)..(429): Pro or Met or Ser or Absent or Gly or Arg or Ala or Val
  MISC_FEATURE (430)..(430): Arg or Glu or Gln or Absent or Ile or Thr or Val or Ser
  MISC_FEATURE (431)..(431): Ser or Thr or Absent or Cys or Phe or His or Glu
  MISC_FEATURE (432)..(432): Asp or Thr or Asn or Absent or Glu or Ser or Gln or Pro or Ala
  MISC_FEATURE (433)..(433): Asp or Arg or Ser or Absent or Glu or Ala or Gly or Ile
  MISC_FEATURE (434)..(434): Asn or Ser or Ile or Absent or Cys or Leu or Gln or Glu or Thr
  MISC_FEATURE (435)..(435): Absent or Phe or Leu or Ala or Gly or Ile or Glu or Thr
  MISC_FEATURE (436)..(436): Absent or Leu or Ser or Lys or Val or Gln or Asn
  MISC_FEATURE (437)..(437): Absent or Arg or Tyr or Gln or Ala or Gly or Glu or Lys or Met
  MISC_FEATURE (438)..(438): Absent or Met or Val or Leu or Ile or Tyr or Asn or Thr or Arg
  MISC_FEATURE (439)..(439): Absent or Lys or Arg or Met or Ala or Ile or Gly or any naturally occurring amino acid or Val or Ser or Pro
  MISC_FEATURE (440)..(440): Absent or Asn or Ser or Pro or Thr or Ala or Val or Arg or Glu or Phe
  MISC_FEATURE (441)..(441): Absent or Pro or Ser or Arg or Trp or Ala or Gln or His
  MISC_FEATURE (442)..(442): Absent or Ser or Asn or Glu or Ala or Asp or Phe or Gln or Leu
  MISC_FEATURE (443)..(443): Absent or Ser or Pro or Asn or Ile or Arg or Lys
  MISC_FEATURE (444)..(444): Absent or Ser or Ala or His or Thr or Arg or Gln
  MISC_FEATURE (445)..(445): Absent or Gln or Arg or Leu or Trp or Phe or Pro or Ser or Thr or Ile or Met or Asn
  MISC_FEATURE (446)..(446): Absent or Pro or Ser or Thr or Arg
  MISC_FEATURE (447)..(447): Absent or Thr or His or Gly or Gln or Asp or Asn
  MISC_FEATURE (448)..(448): Absent or Gln or Val or Asp or Glu or Asn or Gly
  MISC_FEATURE (449)..(449): Absent or Lys or His or Glu or Arg or Asn
  MISC_FEATURE (450)..(450): Absent or Phe or Ala or Val or His or Leu or Ile
  MISC_FEATURE (451)..(451): Absent or Leu or Asn or Asp or Glu or Gln
  MISC_FEATURE (452)..(452): Absent or Ile or Glu or Pro or Val or Asp or Met
  MISC_FEATURE (453)..(453): Absent or Asn or Pro or Ala or Thr or Ser or Asp
  MISC_FEATURE (454)..(454): Absent or Leu or Thr or Gln or Glu or Asn or Ala or Pro or Ile
  MISC_FEATURE (455)..(455): Absent or Met or Pro or Asp or Ser or Glu
  MISC_FEATURE (456)..(456): Absent or Gly or Asn or Gln or Asp or Glu or Arg
  MISC_FEATURE (457)..(457): Absent or Phe or Glu or Lys or Thr or Val or Met
  MISC_FEATURE (458)..(458): Absent or Phe or Pro or Asp or Asn or Leu or Thr or Met or Lys
  MISC_FEATURE (459)..(459): Absent or Pro or Asp or Glu or Leu or His or Ala or Val
  MISC_FEATURE (460)..(460): Absent or Phe or Glu or Asn or Ser or Gly or Pro or Met or Tyr or Val
  MISC_FEATURE (461)..(461): Absent or Val or Asp or Leu or Glu or Gly
  MISC_FEATURE (462)..(462): Absent or Lys or Glu or Ala or Gly
  MISC_FEATURE (463)..(463): Absent or Asp or Pro or Ile or Phe or Leu
  MISC_FEATURE (464)..(464): Absent or Glu or Pro or Gln or Trp
  MISC_FEATURE (465)..(465): Absent or Phe or Asp or Asn or Leu or Gly or His or Arg
  MISC_FEATURE (466)..(466): Absent or Asp or Leu or Gln or Pro or Ser
  MISC_FEATURE (467)..(467): Absent or Ser or Lys or Tyr or Gly or Glu or Leu or Pro or Val or Ile or Arg or His
  MISC_FEATURE (468)..(468): Absent or Ser or Ala or Cys or Gly or Ile or Val or Thr or Gln
  MISC_FEATURE (469)..(469): Absent or Leu or Ser or Pro or Asp or Gln or Glu or Ala or Thr
  MISC_FEATURE (470)..(470): Absent or Thr or Lys or Asn or Glu or Arg
  MISC_FEATURE (471)..(471): Absent or Phe or Ala or Val or Leu or Gly or Pro or Gln or Ser
  MISC_FEATURE (472)..(472): Absent or Met or Val or Arg or Ile or Gly or Ala or Thr or Glu
  MISC_FEATURE (473)..(473): Absent or Arg or His or Glu or Gln or Ser or Lys or Asn or Ala or Cys
  MISC_FEATURE (474)..(474): Absent or Cys or Gly or Tyr or Leu or Ser or Ile
  MISC_FEATURE (475)..(475): Absent or Pro or Gly or Thr or Lys or Val
  MISC_FEATURE (476)..(476): Absent or Tyr or Phe or Ala or Asn or Lys
  MISC_FEATURE (477)..(477): Absent or Cys or Ser or Pro
  MISC_FEATURE (478)..(478): Absent or Lys or Gly or Met or Ala or Val or Thr or Ser
  MISC_FEATURE (479)..(479): Asp or His or Absent or Thr or Met or Gln or Glu or Cys or Ser
  MISC_FEATURE (480)..(480): Gly or Absent or Ser or Pro or Ala or Phe or Leu or Lys or Glu or Val or Cys or Ile or Tyr
  MISC_FEATURE (481)..(481): Ser or Gln or Absent or Asn or Ala or Arg or Leu or Glu or Asp or Gly
  MISC_FEATURE (482)..(482): Leu or Trp or Phe or Absent or Tyr or Gly or Thr or Ala
  MISC_FEATURE (483)..(483): Gln or Ser or Absent or Ala or Pro or Leu or Gly or Thr or Val or Phe or Met
  MISC_FEATURE (484)..(484): Ser or Ile or Absent or Val or Gly or Pro
  MISC_FEATURE (485)..(485): Ala or Ser or Phe or Absent or Glu or Ile or Thr or Val or Met or Pro
  MISC_FEATURE (486)..(486): Thr or His or Absent or Tyr or Gly or Ser or Val or Ile or Glu
  MISC_FEATURE (487)..(487): Glu or Arg or Gly or Tyr or Asp or Absent or Ser or Gln or Lys or Thr or Asn or Ile or Leu or His
  MISC_FEATURE (488)..(488): Pro or Ser or Absent or Gly or Arg
  MISC_FEATURE (489)..(489): Ile or Gln or Absent or Gly or Val or Ala or Asp or Tyr or Asn or Pro or Arg or Ser or Leu
  MISC_FEATURE (490)..(490): Val or Absent or Lys or Arg or Gln or Gly or Pro or Ala or Thr or His or Glu or Ser
  MISC_FEATURE (491)..(491): Pro or Ala or Phe or Absent or Thr or Ser or Met or Lys or Asp or Gly or Asn or Trp or Cys or Arg
  MISC_FEATURE (492)..(492): Glu or Lys or Absent or Leu or Arg or Thr or Gly or Val or Pro or Ile or Phe or Tyr
  MISC_FEATURE (493)..(493): Ser or Thr or Met or Absent or Glu or Phe or Ile or Arg or Lys or Gly or Ala or Asp
  MISC_FEATURE (494)..(494): Phe or Thr or Tyr or Absent or Glu or Cys or Gly or Ala or Pro or Leu or Val or His or Ser or Asp or Arg or Gln
  MISC_FEATURE (495)..(495): Glu or Thr or Ala or Absent or Lys or Arg or Tyr or Phe or Gly or Leu or Ile or Ser or Pro
  MISC_FEATURE (496)..(496): Glu or Ser or Absent or Gly or Lys or Ile or Ala or Arg or Leu or Asp or Phe
  MISC_FEATURE (497)..(497): Gln or Tyr or His or Absent or Ile or Phe or Leu or Ala or Asn or Gly or Arg or Ser or Met or Val
  MISC_FEATURE (498)..(498): Met or Ala or Absent or Glu or Gln or Lys or Gly or Asn or Ser or Thr or Pro
  MISC_FEATURE (499)..(499): Met or Asn or Absent or Gln or Arg or Gly or Ile or Ala or Ser or Thr
  MISC_FEATURE (500)..(500): Leu or Ser or Absent or Ile or Val or Glu or Gly or Asn or Pro or Tyr or Ala or Thr
  MISC_FEATURE (501)..(501): Ala or Val or Asp or Absent or Glu or Gln or Pro or Ser or Leu
  MISC_FEATURE (502)..(502): Met or Asp or Val or Leu or Absent or Glu or Trp or Ser or Asn or Ala or Gly or Pro
  MISC_FEATURE (503)..(503): Ala or Absent or Gln or Arg or Thr or Ser or Glu or Asp or Val or Gly or Ile
  MISC_FEATURE (504)..(504): Val or Glu or Lys or Ser or Absent or Arg or Pro or Leu or Tyr or Ala or His or Asp or Thr or Met or Ile
  MISC_FEATURE (505)..(505): Ser or Asp or Phe or Leu or Absent or Val or Pro or Lys or Ala
  MISC_FEATURE (506)..(506): Leu or Absent or Ile or Glu or Ser or Ala or Pro or His
  MISC_FEATURE (507)..(507): Ala or Absent or Val or Glu or Leu or Asn or Asp or Gly or Cys or Ser or Pro
  MISC_FEATURE (508)..(508): Glu or Absent or Ala or Met or Ile or Cys or Leu or Val or Lys or Asn or Asp or Ser or Gly
  MISC_FEATURE (509)..(509): Ala or Absent or Gly or Lys or Leu or Ser or Tyr or Asn
  MISC_FEATURE (510)..(510): Arg or Absent or Ile or Ser or Pro or Asp or Lys or Asn or Thr or Phe or Tyr
  MISC_FEATURE (511)..(511): Ala or Absent or Arg or Leu or Met or Pro or Asp or Gly or Asn or Ser
  MISC_FEATURE (512)..(512): Met or Absent or Ile or Phe or Gly or Pro or Arg or Leu or Ala or Asp or Ser or Cys
  MISC_FEATURE (513)..(513): Ser or Absent or Arg or Leu or Thr or Glu or Ala or Phe or Cys
  MISC_FEATURE (514)..(514): Ser or Absent or Asp or Gln or Leu or Gly or Asn or Val or Lys
  MISC_FEATURE (515)..(515): Gly or Absent or Lys or Leu or Ser or Ala or Gln or Arg
  MISC_FEATURE (516)..(516): Gln or Absent or Glu or Leu or Lys or Val or Ile or Ser or Ala or Thr
  MISC_FEATURE (517)..(517): Ser or Absent or Val or Met or Ala or Asp or Phe or Leu or Ile
  MISC_FEATURE (518)..(518): Ala or Absent or Asp or Glu or Gln or Ser or Leu or Thr
  MISC_FEATURE (519)..(519): Ser or Absent or Glu or Asp or Val or Leu
  MISC_FEATURE (520)..(520): Trp or Absent or Glu or Asp or Gly or Pro or Ser or Gln or His
  MISC_FEATURE (521)..(521): Gln or Absent or Lys or Ala or Ser or Asp or Gly
  MISC_FEATURE (522)..(522): Absent or Ala or Asn or Ser or Gly or Phe or Asp
  MISC_FEATURE (523)..(523): Absent or Lys or Glu or Ser or Ala
  MISC_FEATURE (524)..(524): Absent or Ala or Asp or Asn or Glu
  MISC_FEATURE (525)..(525): Absent or Arg or Gly
  MISC_FEATURE (526)..(526): Absent or Pro or Ile
  MISC_FEATURE (527)..(527): Absent or Ala or Asp
  MISC_FEATURE (528)..(528): Absent or Arg or Thr
  MISC_FEATURE (529)..(529): Absent or Ser or Thr
  MISC_FEATURE (530)..(530): Absent or Asp or Asn
  MISC_FEATURE (531)..(531): Absent or Leu
  MISC_FEATURE (532)..(532): Absent or Gly
  MISC_FEATURE (533)..(533): Absent or Leu
  MISC_FEATURE (534)..(534): Absent or Gly
  MISC_FEATURE (535)..(535): Absent or Ile
  MISC_FEATURE (536)..(536): Absent or Gly
  MISC_FEATURE (537)..(537): Absent or Ala
  MISC_FEATURE (538)..(538): Absent or Ser
  MISC_FEATURE (539)..(539): Absent or Gly
  MISC_FEATURE (540)..(540): Absent or Gly
  MISC_FEATURE (541)..(541): Absent or Phe
  MISC_FEATURE (542)..(542): Absent or Val
  MISC_FEATURE (543)..(543): Absent or Leu or Met
  MISC_FEATURE (544)..(544): Absent or Gly or Asp or Ala
  MISC_FEATURE (545)..(545): Absent or Leu or Asp or Ile or Val
  MISC_FEATURE (546)..(546): Absent or Gly or Val or Arg
  MISC_FEATURE (547)..(547): Absent or Gly or Ala or Thr or Ile or Pro
  MISC_FEATURE (548)..(548): Absent or Thr or Asp or Gly or Glu
  MISC_FEATURE (549)..(549): Absent or Thr or Leu or Asp or Lys or Gly or Gln or Met
  MISC_FEATURE (550)..(550): Absent or Gly or His or Glu or Leu or Ala or Ser or Asn
  MISC_FEATURE (551)..(551): Absent or Ser or His or Leu or Met or Ala or Pro
  MISC_FEATURE (552)..(552): Absent or Ala or Ile or His or Val
  MISC_FEATURE (553)..(553): Absent or Ala or Pro or Thr or Met or Gln or Glu
  MISC_FEATURE (554)..(554): Absent or Glu or Ser or Trp or Ile or Gly or Tyr or Lys or Gln or His
  MISC_FEATURE (555)..(555): Absent or Glu or Gly or Pro or Thr or His or Gln or Ala or Arg
  MISC_FEATURE (556)..(556): Absent or Arg or Lys or Ser or Pro or Gln or Gly or Ala or Thr or Met or Glu
  MISC_FEATURE (557)..(557): Absent or Ile or Met or Gly or Asn or Pro or Thr or Lys or Arg or His or Leu or Tyr or Ser or Gln
  MISC_FEATURE (558)..(558): Absent or Val or Gln or Glu or Ser or Arg or Ala or Lys or Gly or Met
  MISC_FEATURE (559)..(559): Absent or Lys or Glu or Asp or Gly or Ala or His or Arg or Gln
  MISC_FEATURE (560)..(560): Absent or Arg or Gln or Ser or Pro or Ile or Thr or Gly or Ala or Val or Lys or Phe or Glu
  MISC_FEATURE (561)..(561): Absent or Val or Leu or Ser or Gly or Asn or Lys or Asp or Ile or Glu or Gln
  MISC_FEATURE (562)..(562): Absent or Gly or Glu or Val or Tyr or Cys or Phe or Ile or Leu or Ser or Asn
  MISC_FEATURE (563)..(563): Absent or Cys or Ser or Tyr or Val or Arg or Asn or Gly or Ala or Thr or Met or Ile
  MISC_FEATURE (564)..(564): Absent or Ala or Tyr or Glu or Leu or Arg or Ser or His or Gln or Val or Thr
  MISC_FEATURE (565)..(565): Absent or Leu or Pro or Ser or Gly or Arg or Thr or Lys or Asp or Ala
  MISC_FEATURE (566)..(566): Absent or Cys or Ser or Ala or Ile or Lys or Val or Asp or His or Pro or Asn or Gly
  MISC_FEATURE (567)..(567): Absent or Ser or Thr or Pro or Val or Lys or Ile or Gln or His or Arg
  MISC_FEATURE (568)..(568): Absent or Ile or Ser or Arg or Met or Gly or His or Asn or Tyr or Pro or Glu or Thr or Ala
  MISC_FEATURE (569)..(569): Absent or Arg or Ser or Pro or Val or Thr or Ala or Ile or Tyr or Phe
  MISC_FEATURE (570)..(570): Absent or Thr or Ala or Val or Ile or Arg or Pro or Leu
  MISC_FEATURE (571)..(571): Absent or Ser or Gln or Thr or Phe or His or Cys or Val or Ala
  MISC_FEATURE (572)..(572): Absent or Glu or Ala or Leu or Val or Thr or Ser or Ile or Gly or Asp or Phe or Gln
  MISC_FEATURE (573)..(573): Absent or Val or Ala or Met or Asp or Thr or Ile or Pro or Gly
  MISC_FEATURE (574)..(574): Absent or Thr or Val or Phe or Met or Ser or Asp or Arg or Gln or Glu or Leu
  MISC_FEATURE (575)..(575): Absent or Ala or Leu or Gly or His or Ile or Val or Ser or Phe
  MISC_FEATURE (576)..(576): Absent or Asn or Asp or Glu or Thr or His or Arg or Gln
  MISC_FEATURE (577)..(577): Absent or Thr or Met or Pro or Ser or Arg or Tyr
  MISC_FEATURE (578)..(578): Absent or Ala or Glu or Arg or Asp or Gln or Pro or Val or Ser
  MISC_FEATURE (579)..(579): Absent or Tyr or Leu or Trp or Arg or Lys or Cys or Thr
  MISC_FEATURE (580)..(580): Absent or Gly or Ala or Gln or Glu or Ser or His or Val or Asn or Thr
  MISC_FEATURE (581)..(581): Absent or Ser or Thr or Tyr or Ile or Lys or Ala or His or Leu or Phe or Met or Asn
  MISC_FEATURE (582)..(582): Absent or Ala or Thr or Gly or Lys or Glu or Asn or any naturally occurring amino acid or Ser or Val
  MISC_FEATURE (583)..(583): Absent or Ala or Ser or Arg or Leu or Glu or Gln or Gly or Ile or Pro
  MISC_FEATURE (584)..(584): Absent or Asp or Glu or Gly or Val or Ile or Thr or Asn or Ala or Ser
  MISC_FEATURE (585)..(585): Absent or Glu or His or Asp or Phe or Arg or Lys or Ala or Gln or Ser or Leu
  MISC_FEATURE (586)..(586): Absent or Ser or Leu or Pro or Ala or Glu or Val or Met or Arg
  MISC_FEATURE (587)..(587): Absent or Phe or Tyr or Arg or Glu or Lys or Ile or Val or Cys or Gly or Pro or Ser
  MISC_FEATURE (588)..(588): Absent or Val or Gly or Arg or Thr or Leu or Ala or Asn or Ser or Pro
  MISC_FEATURE (589)..(589): Absent or Pro or Leu or Arg or Lys or Gln or Ala or Gly or Val or Asp
  MISC_FEATURE (590)..(590): Absent or Trp or Ala or Leu or Val or Ser or Asn or Glu
  MISC_FEATURE (591)..(591): Absent or Leu or Phe or Val or Ala or Met or Ser or Gly or Asn or Ile
  MISC_FEATURE (592)..(592): Absent or Asp or Ala or Trp or Arg or Ser or Asn
  MISC_FEATURE (593)..(593): Absent or Glu or Lys or Ala or Leu or Arg or Ser or Phe
  MISC_FEATURE (594)..(594): Absent or Glu or Val or Ile or Arg or Ala or Ser or Asp or Gly or Leu or Pro
  MISC_FEATURE (595)..(595): Absent or Thr or Ile or Ser or Leu or Ala or Asn or Asp or Glu
  MISC_FEATURE (596)..(596): Absent or Val or Cys or Tyr or Arg or Asn or Lys or Thr or Ala or Ser or Trp
  MISC_FEATURE (597)..(597): Absent or Ser or Thr or Asn or Leu or Ala or Arg or Val or Trp or Gly
  MISC_FEATURE (598)..(598): Absent or Ser or Thr or Arg or Asn or Val or Ile or Glu or Asp or Tyr or Gln
  MISC_FEATURE (599)..(599): Absent or Gln or Val or Leu or Ala or Ile or Glu or Gly or Asp
  MISC_FEATURE (600)..(600): Absent or Asp or Ile or Glu or Met or Gly or Leu or Pro
  MISC_FEATURE (601)..(601): Absent or Arg or Asp or Trp or Asn or His or Ser or Pro or Ala
  MISC_FEATURE (602)..(602): Absent or Val or Asp or Glu or Ser or Met or Ile or Ala or Thr or Gln or Asn or Pro
  MISC_FEATURE (603)..(603): Absent or Gly or Arg or His or Ser or Thr or Ala or Val or Asn or Pro
  MISC_FEATURE (604)..(604): Absent or Thr or Ser or Glu or Gly or Leu or Asn or Ala or Arg or Lys or Cys or Gln
  MISC_FEATURE (605)..(605): Absent or Ser or Leu or Cys or Ile or Arg or Gln or Phe or Tyr or Asp or Thr or Met or Val
  MISC_FEATURE (606)..(606): Absent or Val or Cys or Asn or Leu or Ala or Ser or Glu or Met or Arg or Pro or His or Ile
  MISC_FEATURE (607)..(607): Absent or Val or Leu or Pro or Thr or Ile or Glu or Met or Gln or Arg
  MISC_FEATURE (608)..(608): Absent or Pro or Thr or Ser or Trp or Tyr or Gly or Asp or Asn or Ile or Val or Ala or Glu or Gln
  MISC_FEATURE (609)..(609): Absent or Gly or Ser or His or Gln or Leu or Ile or Pro or Asn or Arg or Val or Met or Thr
  MISC_FEATURE (610)..(610): Absent or Gln or His or Ser or Asn or Trp or Ala or Gly or Glu or Pro or Ile or Val or Asp or Leu
  MISC_FEATURE (611)..(611): Absent or Asp or Pro or Tyr or Ala or Phe or Asn or His or Arg or Gly or Ser
  MISC_FEATURE (612)..(612): Absent or Val or any naturally occurring amino acid or Gln or Ser or Gly or Ala or Thr or Pro or Ile or Tyr or Met or Asp or Glu or Arg
  MISC_FEATURE (613)..(613): Absent or Val or His or Asn or Arg or Ser or Gly or Thr or Pro or Asp or Glu
  MISC_FEATURE (614)..(614): Absent or Ser or Thr or Val or Ala or Gly or Arg or Tyr or Gln
  MISC_FEATURE (615)..(615): Absent or Asp or Arg or Val or Asn or Tyr or His or Phe or Glu or Ser
  MISC_FEATURE (616)..(616): Absent or Met or Gln or Pro or His or Ser or Ala or Asn or Arg or Cys
  MISC_FEATURE (617)..(617): Absent or Trp or His or Arg or Asn or Met or Thr or Ala or Ser or Pro or Asp
  MISC_FEATURE (618)..(618): Absent or Leu or Ser or Arg or Gly or Pro or Asn or Ala or Thr or Ile or Glu
  MISC_FEATURE (619)..(619): Absent or Ser or Arg or Val or Ala or Gly or Asp or Glu or Leu
  MISC_FEATURE (620)..(620): Absent or Gly or Pro or Asp or Thr or Trp or Gln or Arg or His or Asn or Phe
  MISC_FEATURE (621)..(621): Absent or Lys or Arg or Phe or Leu or Ala or Trp or Pro or Asp
  MISC_FEATURE (622)..(622): Absent or Leu or Gly or Thr or Ala or Asp or Ser or Tyr
  MISC_FEATURE (623)..(623): Absent or Phe or Asn or Arg or Ala or Glu or Leu or Asp
  MISC_FEATURE (624)..(624): Absent or Arg or Thr or Ala or Ser or Val or Met or Gly or Trp or Leu
  MISC_FEATURE (625)..(625): Absent or Asp or Glu or Arg or Ala or Met or Val
  MISC_FEATURE (626)..(626): Absent or Gly or Asp or Val or Glu or Ser
  MISC_FEATURE (627)..(627): Absent or Glu or Gln or Phe or Ser or Val or Ala or Gly or Ile
  MISC_FEATURE (628)..(628): Absent or Phe or Val or Arg or Gly or Pro or Ser or Asp or Met
  MISC_FEATURE (629)..(629): Absent or Asp or Cys or Met or Arg or Gln or Thr or Ser or Tyr or Val
  MISC_FEATURE (630)..(630): Absent or Tyr or Phe or Val or Trp or Leu or Ile or Ser or Arg or Met
  MISC_FEATURE (631)..(631): Absent or Asp or Tyr or Arg or Asn or Gln or any naturally occurring amino acid or Glu
  MISC_FEATURE (632)..(632): Absent or Leu or Gly or Arg or Asn or Cys or Ile or Phe or Tyr or Ser or Ala
  MISC_FEATURE (633)..(633): Absent or Glu or Phe or Thr or Asn or Ser or Val or Ala or Gly or Ile
  MISC_FEATURE (634)..(634): Absent or Asp or Glu or Arg or Ser or Ile or Ala or Val or Gly or Trp
  MISC_FEATURE (635)..(635): Absent or Ile or Leu or Phe or Ser or Asp or His or Gly or Gln or Ala
  MISC_FEATURE (636)..(636): Absent or Met or Ile or Ser or Ala or Gln or Asn or Glu or Asp
  MISC_FEATURE (637)..(637): Absent or Val or His or Arg or Cys or Ser or Pro or Ile or Asp or Gly or Glu or Leu or Ala
  MISC_FEATURE (638)..(638): Absent or Met or Ser or Pro or Asp or Ala or Gly or Thr or Arg or Ile or Val or Gln
  MISC_FEATURE (639)..(639): Absent or Glu or Lys or Gly or Phe or Pro or Ser or Val or Ala or Asp or Thr
  MISC_FEATURE (640)..(640): Absent or Ala or Asn or Thr or Cys or Ser or Gly or Ile or Glu or Asp or Pro
  MISC_FEATURE (641)..(641): Absent or Ile or Ala or Gly or Lys or Ser or Thr or His or Arg
  MISC_FEATURE (642)..(642): Absent or Trp or Gly or Thr or Ser or His or Tyr or Pro or Asp or Arg or Ile or Gln
  MISC_FEATURE (643)..(643): Absent or Leu or Gly or Ala or Asp or Thr or Glu or Ile or Asn or Ser or Val or Gln or His
  MISC_FEATURE (644)..(644): Absent or Ser or His or Gly or Asp or Arg or Ala or Leu or Asn or Met
  MISC_FEATURE (645)..(645): Absent or Val or Met or Ile or Ala or Tyr or Pro or Asn or Gly or Ser or Thr or Gln or Leu
  MISC_FEATURE (646)..(646): Absent or Gln or Leu or Gly or Arg or Ser or Asn or Asp or Pro or Glu
  MISC_FEATURE (647)..(647): Absent or Glu or Leu or Phe or Arg or Ser or Ala or His or Gly or Asn or Pro
  MISC_FEATURE (648)..(648): Absent or Pro or Thr or Ser or Gly or Ala or Glu or Val or Gln or Arg or Asn or Tyr
  MISC_FEATURE (649)..(649): Absent or Gly or Thr or Leu or Asn or Arg or Ala or Ser or Phe
  MISC_FEATURE (650)..(650): Absent or Ser or Ile or Thr or Gly or Ala or Trp or Arg or Val or Asp
  MISC_FEATURE (651)..(651): Absent or Gln or Ala or Ile or Met or Pro or Ser or Leu or Glu or Asp or Thr
  MISC_FEATURE (652)..(652): Absent or Met or Arg or Ser or Asn or Ala or Gly or Asp or Val or Thr
  MISC_FEATURE (653)..(653): Absent or Asn or Gly or Val or Tyr or Ala or Asp or Phe or Leu or Thr
  MISC_FEATURE (654)..(654): Absent or Asn or Thr or Ser or Gly or Leu or Ala or Asp
  MISC_FEATURE (655)..(655): Absent or Ser or Ala or Val or Pro or Leu or Asn or Asp or Met or Gln or Glu
  MISC_FEATURE (656)..(656): Absent or Pro or Ser or Ala or Gly or Glu or Val or Arg or Ile or Thr or Gln
  MISC_FEATURE (657)..(657): Absent or Asp or Gly or Val or Arg or Ala or Asn or Pro or Gln or Tyr
  MISC_FEATURE (658)..(658): Absent or Asp or Glu or Ser or Gly or Arg or Thr or Asn or Pro or Val
  MISC_FEATURE (659)..(659): Absent or Ile or Gly or Ala or Val or Ser or Glu or Thr
  MISC_FEATURE (660)..(660): Absent or Ser or Thr or Asn or Val or Arg or Ile or Glu
  MISC_FEATURE (661)..(661): Absent or Glu or Ser or Gly or Thr or Arg
  MISC_FEATURE (662)..(662): Absent or Ser or Gly or Asp or Arg or His
  MISC_FEATURE (663)..(663): Absent or Arg or Ser or Thr or Asn or Tyr
  MISC_FEATURE (664)..(664): Absent or Gln or Ser or Asn or Asp or Val
  MISC_FEATURE (665)..(665): Absent or Tyr or Trp or Gly or Asn or Arg or Ala
  MISC_FEATURE (666)..(666): Absent or Val or Ser or Gly or Ala or Pro
  MISC_FEATURE (667)..(667): Absent or Lys or Thr or Gly or Ser or Val
  MISC_FEATURE (668)..(668): Absent or Asp or Ser or Pro or Arg or Thr
  MISC_FEATURE (669)..(669): Absent or Arg or Asn or Ser or Cys or Val or Gly or Pro or Thr
  MISC_FEATURE (670)..(670): Absent or Asn or His or Ala or Asp or Pro or Leu
  MISC_FEATURE (671)..(671): Absent or Glu or Ser or Gly or Thr or Asn or His or Gln
  MISC_FEATURE (672)..(672): Absent or Glu or Tyr or Ser or Gly or Thr or Asp or Pro or Ala
  MISC_FEATURE (673)..(673): Absent or Pro or Val or Glu or Ser or Thr or Gly or Ala
  MISC_FEATURE (674)..(674): Absent or Ser or Gly or Asn or Val or Pro
  MISC_FEATURE (675)..(675): Absent or Thr or Ser or Gly or Leu or His or Ala
  MISC_FEATURE (676)..(676): Absent or Pro or Ala or Asn or Glu
  MISC_FEATURE (677)..(677): Absent or Pro or Gly or Tyr or Leu or Thr or Ile
  MISC_FEATURE (678)..(678): Absent or Arg or Pro or Gly or Ala or Ser or Leu
  MISC_FEATURE (679)..(679): Absent or Val or Ser or Arg or Thr or Ala or Pro
  MISC_FEATURE (680)..(680): Absent or Thr or Gly or Ser or Ala or Leu or Ile or Val or Arg
  MISC_FEATURE (681)..(681): Absent or Pro or Ala or Thr or Ser or Gln or Gly or Arg or Met or Val or His
  MISC_FEATURE (682)..(682): Absent or Ile or Trp or Gly or Arg or Val or Ser or Gln or Ala
  MISC_FEATURE (683)..(683): Absent or Val or Ser or Arg or Ala or Pro or Gln or Met or Asp
  MISC_FEATURE (684)..(684): Absent or Glu or Ser or Gln or Asn or Ala or Arg or Gly or Pro or Asp
  MISC_FEATURE (685)..(685): Absent or Pro or Ser or His or Lys or Ala or Asn or Gly or Val or Asp
  MISC_FEATURE (686)..(686): Absent or Ala or Asn or Gly or Tyr or Met or Thr or Arg or Pro or Ser or Phe or Glu
  MISC_FEATURE (687)..(687): Absent or Ser or Thr or Tyr or Leu or Ile or Ala or Pro or Val or Arg or Asp
  MISC_FEATURE (688)..(688): Absent or Ser or Pro or Gly or Ala or Glu or Asn or Gln or Asp or Leu
  MISC_FEATURE (689)..(689): Absent or Ser or Ala or Asn or Asp or Glu or Gly
  MISC_FEATURE (690)..(690): Absent or Ser or Gly or Val or Phe or Leu or Met or Pro
  MISC_FEATURE (691)..(691): Absent or Pro or Ser or Ala or Gly or Glu or Asp or Phe or Val or Ile
  MISC_FEATURE (692)..(692): Absent or Ser or Thr or Val or Gln or Glu or Asp or Lys
  MISC_FEATURE (693)..(693): Absent or Gly or Thr or Glu or Ser or Leu or Gln or Ile or Met or Ala
  MISC_FEATURE (694)..(694): Absent or Gly or Leu or Tyr or Met or Ala or Gln
  MISC_FEATURE (695)..(695): Absent or Leu or Ser or Arg or Ile or Val or Met or Ala
  MISC_FEATURE (696)..(696): Absent or Ala or Ser or Gly or Arg or Gln or Asp or Met or Phe
  MISC_FEATURE (697)..(697): Absent or Cys or Ser or Asn or Arg or Glu or His or Gln or Ala or Leu or Met or Phe or Tyr
  MISC_FEATURE (698)..(698): Absent or Ala or Ser or Arg or Gly or Val
  MISC_FEATURE (699)..(699): Absent or Ile or Ser or Ala or His or Met or Thr
  MISC_FEATURE (700)..(700): Absent or Ala or Ser or Arg or Lys or Gly or Trp
  MISC_FEATURE (701)..(701): Absent or Val or Ala or Pro or Arg or Gly or Gln or Leu
  MISC_FEATURE (702)..(702): Absent or Leu or Asp or Glu or Ser
  MISC_FEATURE (703)..(703): Absent or Ala or Lys or Ser or Leu or Met or Thr or Ile
  MISC_FEATURE (704)..(704): Absent or Glu or Gly or Lys or Ser or Leu or Gln or Ala or Ile or Val
  MISC_FEATURE (705)..(705): Absent or Arg or Ala or Leu or Ile or Asp or Glu or Ser
  MISC_FEATURE (706)..(706): Absent or Gln or Gly or Asp or Ala or His or Glu or Ser or Pro
  MISC_FEATURE (707)..(707): Absent or Gln or Ala or Ser or Asp or Glu or Thr or Arg or His or Gly
  MISC_FEATURE (708)..(708): Absent or Met or Ile or Gln or Gly or Ser or Pro or Asn or Glu or Ala or His
  MISC_FEATURE (709)..(709): Absent or Val or Ser or Lys or Asn or Arg or Ala or Gln or His or Gly
  MISC_FEATURE (710)..(710): Absent or Gly or Asn or Glu or any naturally occurring amino acid or Asp or Ala or Arg or Lys or Gln or Pro or His
  MISC_FEATURE (711)..(711): Absent or Val or Glu or Ala or Gln or Gly or Ser or Thr or Lys or Arg
  MISC_FEATURE (712)..(712): Absent or Ser or Gly or Asn or Thr or Ala or Lys or Arg or Gln or His or Phe
  MISC_FEATURE (713)..(713): Absent or Ser or Thr or Asn or Ile or Lys or Glu or Gln or Leu or Pro or Ala
  MISC_FEATURE (714)..(714): Absent or Ser or Arg or Asn or Glu or Ala or Pro or Gln or Asp or Thr
  MISC_FEATURE (715)..(715): Absent or Asn or His or Ser or Glu or Leu or Pro or Arg or Lys or Gly
  MISC_FEATURE (716)..(716): Absent or Asn or Ser or Pro or Gly or Glu or Gln or Ile or Leu or Tyr
  MISC_FEATURE (717)..(717): Absent or His or Ser or Lys or Pro or Thr or Glu or Arg or Ala or Asn
  MISC_FEATURE (718)..(718): Absent or Asn or Ser or Lys or Gly or Thr or Val or Arg or Asp or Trp
  MISC_FEATURE (719)..(719): Absent or Gln or His or Ser or Lys or Glu or Asp or Leu or Arg or Asn
  MISC_FEATURE (720)..(720): Absent or Asn or Trp or Ile or Gly or Val or Arg or Glu or Lys or Gln or Ser or Met
  MISC_FEATURE (721)..(721): Absent or Val or Ser or Gln or Pro or Ala or Lys or Glu
  MISC_FEATURE (722)..(722): Absent or Asn or Gly or Ser or Gln or Arg or Lys or Pro or Ala
  MISC_FEATURE (723)..(723): Absent or Leu or Val or Ser or Lys or Pro or Arg or Ala or Asn or Phe
  MISC_FEATURE (724)..(724): Absent or Ala or Ser or Asn or Asp or Arg
  MISC_FEATURE (725)..(725): Absent or Ser or Gln or Glu or Lys or Pro or Met
  MISC_FEATURE (726)..(726): Absent or Gln or Tyr or Gly or Ile or Thr or Lys or Leu or Ala or Pro
  MISC_FEATURE (727)..(727): Absent or Asn or Ser or Ala or Gly or Glu or Leu or Pro
  MISC_FEATURE (728)..(728): Absent or Leu or Met or Gly or Asp or Ile or Ser or Ala
  MISC_FEATURE (729)..(729): Absent or Val or Leu or Ser or Glu or Lys or Ala
  MISC_FEATURE (730)..(730): Absent or Pro or Ser or Gly or Phe or Leu
  MISC_FEATURE (731)..(731): Absent or Asp or Gly or Ser or Glu or Arg
  MISC_FEATURE (732)..(732): Absent or Asn or Trp or Ser or Phe
  MISC_FEATURE (733)..(733): Absent or Gly or Cys or Ser or Val
  MISC_FEATURE (734)..(734): Absent or Asn or Asp or Ser or Gly or Arg or Phe
  MISC_FEATURE (735)..(735): Absent or Asn or Ser or Ala or Arg
  MISC_FEATURE (736)..(736): Absent or Ser or Tyr or Gly or Asn or Lys or Ala or Arg or Val
  MISC_FEATURE (737)..(737): Absent or His or Tyr or Ser or Glu or Ala
  MISC_FEATURE (738)..(738): Absent or Tyr or Asp or Gly or Gln or Glu or Ala or Asn or Leu
  MISC_FEATURE (739)..(739): Absent or Asn or Ile or Ser or Glu or Lys or Ala or Asp or Tyr
  MISC_FEATURE (740)..(740): Absent or Ala or Glu or Ser or Ile or Arg or Gly or Pro
  MISC_FEATURE (741)..(741): Absent or Ile or Gln or Ser or Ala or Val or Thr or Glu
  MISC_FEATURE (742)..(742): Absent or Glu or Ser or Gln or Lys or Ala or Asn
  MISC_FEATURE (743)..(743): Absent or Gln or Val or Ser or Pro or Lys or Ala or Thr or Tyr
  MISC_FEATURE (744)..(744): Absent or Asp or Gly or Gln or Ala or Lys or Arg or Pro
  MISC_FEATURE (745)..(745): Absent or Gly or Tyr or Thr or Glu or Ala or Pro
  MISC_FEATURE (746)..(746): Absent or Ile or Leu or Gly or Gln or Asn or Pro
  MISC_FEATURE (747)..(747): Absent or Ser or Asp or Gly or Pro or Glu
  MISC_FEATURE (748)..(748): Absent or Asn or Phe or Ser or Glu or Pro or Thr
  MISC_FEATURE (749)..(749): Absent or His or Gly or Gln or Met or Pro or Ser
  MISC_FEATURE (750)..(750): Absent or Tyr or His or Gln or Asn or Ala or Glu or Asp or Met
  MISC_FEATURE (751)..(751): Absent or Leu or His or Val or Pro or Thr or Phe or Asp
  MISC_FEATURE (752)..(752): Absent or Gln or His or Ser or Lys or Pro or Ala
  MISC_FEATURE (753)..(753): Absent or Arg or Ala or Asn or Ser or Asp or Glu or Leu
  MISC_FEATURE (754)..(754): Absent or His or Val or Leu or Arg or Ala or Thr or Pro
  MISC_FEATURE (755)..(755): Absent or His or Gly or Thr or Leu or Gln or Phe or Glu or Asp
  MISC_FEATURE (756)..(756): Absent or Tyr or Gln or Ser or Gly
  MISC_FEATURE (757)..(757): Absent or Glu or Arg or Pro or Ser or Thr or Ala or Trp or Gly
  MISC_FEATURE (758)..(758): Absent or Met or Phe or Thr or Ser or Pro or His or Leu
  MISC_FEATURE (759)..(759): Absent or Gly or His or Ser or Asn or Arg or Gln or Ala
  MISC_FEATURE (760)..(760): Absent or Glu or Met or Thr or Ser or Asp or His or Val
  MISC_FEATURE (761)..(761): Absent or Thr or Gly or Ala or Leu or Ser or Asn
  MISC_FEATURE (762)..(762): Absent or Gly or Asn or Ser or Gln or Lys
  MISC_FEATURE (763)..(763): Absent or Ala or Ser or Gly or Val or Arg or Asp
  MISC_FEATURE (764)..(764): Absent or Gly or Ser or Ala or Gln or Asp
  MISC_FEATURE (765)..(765): Absent or Ile or Asn or Arg or Leu or Val or Gly or Pro or Thr
  MISC_FEATURE (766)..(766): Absent or Ser or Arg or Val or Gln or Thr or Glu
  MISC_FEATURE (767)..(767): Absent or Tyr or Ala or Glu or Thr or Ser or Trp
  MISC_FEATURE (768)..(768): Absent or Thr or Val or Arg or Glu or Ala or Ser or Leu or Gly
  MISC_FEATURE (769)..(769): Absent or Arg or Ser or Ile or Gly or Asn or Val
  MISC_FEATURE (770)..(770): Absent or Ser or Arg or Asn or Gly or Ala or Asp
  MISC_FEATURE (771)..(771): Absent or Asp or Tyr or Ile or Arg or Ala or Phe or Ser or Leu
  MISC_FEATURE (772)..(772): Absent or Met or Arg or Pro or Asn or Ala or Gly
  MISC_FEATURE (773)..(773): Absent or Thr or Val or Asp or Ser or Pro or Ala or Gly
  MISC_FEATURE (774)..(774): Absent or Asp or Gly or Arg or Ser or Glu or Ala
  MISC_FEATURE (775)..(775): Absent or Asp or Glu or Val or Leu or Ala or Ile
  MISC_FEATURE (776)..(776): Absent or Gly or Arg or Glu or Asp or Ala or Pro or Leu
  MISC_FEATURE (777)..(777): Absent or Phe or Ser or Met or Gln or Val or Ala or Glu
  MISC_FEATURE (778)..(778): Absent or His or Trp or Ala or Ser or Leu
  MISC_FEATURE (779)..(779): Absent or Asn or Ser or Ile or Ala or Val or Thr or Gly
  MISC_FEATURE (780)..(780): Absent or Phe or Arg or Thr or Asn or Leu or Ser or Gln or Glu
  MISC_FEATURE (781)..(781): Absent or Pro or Arg or Ala or Lys or Glu or Asn or Thr or Gln or Ser
  MISC_FEATURE (782)..(782): Absent or Pro or Trp or Ser or Gly or Glu or Asp or Gln or Tyr
  MISC_FEATURE (783)..(783): Absent or Pro or Glu or Ser or Lys or Ala
  MISC_FEATURE (784)..(784): Absent or Pro or Leu or Ser or Gly or Glu or Val
  MISC_FEATURE (785)..(785): Absent or Pro or Arg or Ile or Val or Gly or Ala or Ser
  MISC_FEATURE (786)..(786): Absent or Leu or Asp or Ser or Pro
  MISC_FEATURE (787)..(787): Absent or Val or Glu or Thr or Arg or Ser or Leu or Asn or Ala
  MISC_FEATURE (788)..(788): Absent or Ile or Glu or Gly or Ser or Ala or Thr
  MISC_FEATURE (789)..(789): Absent or Val or Glu or Asn or Pro or Thr or Asp
  MISC_FEATURE (790)..(790): Absent or Pro or Ala or Glu or Ser or His
  MISC_FEATURE (791)..(791): Absent or Glu or Ala or Asn or Arg or Gly
  MISC_FEATURE (792)..(792): Absent or Ser or Leu or Glu or Pro or Arg or Gln or Gly or Ile
  MISC_FEATURE (793)..(793): Absent or Phe or Gly or Thr or Ser or His
  MISC_FEATURE (794)..(794): Absent or Glu or Ser or Gln or Val or Pro
  MISC_FEATURE (795)..(795): Absent or Glu or Ser or Pro or Arg or Ala or Thr
  MISC_FEATURE (796)..(796): Absent or Gln or Val or Thr or Leu or Ser or Ala
  MISC_FEATURE (797)..(797): Absent or Met or Gln or Asn or Glu or Ala or Pro or Thr or Leu
  MISC_FEATURE (798)..(798): Absent or Met or Ser or Ala or Thr or Pro
  MISC_FEATURE (799)..(799): Absent or Met or Asp or Gly or Pro or Ser
  MISC_FEATURE (800)..(800): Absent or Ala or Ser or Asp or Ile or Leu or Thr
  MISC_FEATURE (801)..(801): Absent or Met or Leu or Ser or Pro or Gln or Asp
  MISC_FEATURE (802)..(802): Absent or Ala or Pro or Thr or Asn or Ser or Glu
  MISC_FEATURE (803)..(803): Absent or Val or Gln or Glu or Asn or Ile or Ser or Ala
  MISC_FEATURE (804)..(804): Absent or Ser or Phe or Pro or Arg or Leu or Glu
  MISC_FEATURE (805)..(805): Absent or Met or Val or Pro or Arg or Thr or Ser or Gly
  MISC_FEATURE (806)..(806): Absent or Ala or His or Lys or Leu or Pro or Asp or Ser
  MISC_FEATURE (807)..(807): Absent or Glu or Gln or Ile or Pro or Ala or Asp or Phe
  MISC_FEATURE (808)..(808): Absent or Val or Thr or Pro or His or Gln
  MISC_FEATURE (809)..(809): Absent or His or Ser or Asn
  MISC_FEATURE (810)..(810): Absent or Ala or Val
  MISC_FEATURE (811)..(811): Absent or Ser or Thr or Pro or Gly
  MISC_FEATURE (812)..(812): Absent or Gly or Thr or Glu
  MISC_FEATURE (813)..(813): Absent or Gly or Thr or Met or Ile or Val or Phe or Pro
  MISC_FEATURE (814)..(814): Absent or Glu or Cys or Thr or Lys or Ser or His or Ile
  MISC_FEATURE (815)..(815): Absent or Thr or Ala or Gln or Asp or Asn or Val
  MISC_FEATURE (816)..(816): Absent or Ser or Pro or Thr or Leu or Val or Met or Gln or Ile
  MISC_FEATURE (817)..(817): Absent or Arg or Thr or Asn or Lys or Asp or Pro or Glu
  MISC_FEATURE (818)..(818): Absent or Glu or Phe or Gly or Pro or Ser
  MISC_FEATURE (819)..(819): Absent or Val or Gln or Glu or Ala or Phe
  MISC_FEATURE (820)..(820): Absent or Thr or Glu or Gln or Ala or Leu or Pro
  MISC_FEATURE (821)..(821): Absent or Trp or Ser or Phe or Leu or Ala or Asn or Glu
  MISC_FEATURE (822)..(822): Absent or Gln or Ser or Gly or Leu or Lys or Val
  MISC_FEATURE (823)..(823): Absent or Pro or Ser or Leu or Thr or Met
  MISC_FEATURE (824)..(824): Absent or Ser or Met or Thr
  MISC_FEATURE (825)..(825): Absent or Val or Leu or Gln or Ser or Gly
  MISC_FEATURE (826)..(826): Absent or Ala or Glu or Thr or Gly or Pro or Asp
  MISC_FEATURE (827)..(827): Absent or Ala or Gly or Thr or Met
  MISC_FEATURE (828)..(828): Absent or Asp or Ser or Met or Ala or His or Pro
  MISC_FEATURE (829)..(829): Absent or Glu or Ser or Asp or Thr or Ala or Val
  MISC_FEATURE (830)..(830): Absent or Thr or Lys or Glu or Ala or Ser
  MISC_FEATURE (831)..(831): Absent or Arg or Asn or Leu or Phe or Gly or Gln
  MISC_FEATURE (832)..(832): Absent or Val or Met or Arg or Leu or Ala
  MISC_FEATURE (833)..(833): Absent or His or Glu or Asn or Ser
  MISC_FEATURE (834)..(834): Absent or Asn or Leu or Ala or Glu
  MISC_FEATURE (835)..(835): Absent or Val or Arg or Ile or Ser or Thr
  MISC_FEATURE (836)..(836): Absent or Asp or His or Thr or Ser or Ala
  MISC_FEATURE (837)..(837): Absent or Glu or Val or Ala or Ser or Gln or Arg
  MISC_FEATURE (838)..(838): Absent or Tyr or Ser or Asp or Val or Arg or Thr
  MISC_FEATURE (839)..(839): Absent or Ile or Ser or Pro
  MISC_FEATURE (840)..(840): Absent or Glu or Ala or Met or Ser or Thr
  MISC_FEATURE (841)..(841): Absent or Gln or Ser or Leu or Ala or Glu
  MISC_FEATURE (842)..(842): Absent or Gln or Ser or Pro or Gly or Leu
  MISC_FEATURE (843)..(843): Absent or Asp or Ser or Ile or Pro or Val
  MISC_FEATURE (844)..(844): Absent or Leu or Asn or Ser or Thr or Gln or Trp
  MISC_FEATURE (845)..(845): Absent or Asp or Ser or Thr or Gln
  MISC_FEATURE (846)..(846): Absent or Glu or Ser or Asp or Pro or Leu or Gly
  MISC_FEATURE (847)..(847): Absent or Leu or Ser or Ala or Arg
  MISC_FEATURE (848)..(848): Absent or Ile or Val or Ala or Ser or Glu
  MISC_FEATURE (849)..(849): Absent or His or Glu or Pro or Asn
  MISC_FEATURE (850)..(850): Absent or Ser or Ile or Gly
  MISC_FEATURE (851)..(851): Absent or Pro or Ala or Val
  MISC_FEATURE (852)..(852): Absent or Ile or Phe or Met or Ala or Ser or Arg
  MISC_FEATURE (853)..(853): Absent or Ala or Gly or Pro or Val or Glu
  MISC_FEATURE (854)..(854): Absent or Ser or Glu or Val or Thr or Gln or Met
  MISC_FEATURE (855)..(855): Absent or Thr or Ser or Glu or Leu or Asn or Pro
  MISC_FEATURE (856)..(856): Absent or Asn or Ile or Ser or Thr or Val
  MISC_FEATURE (857)..(857): Absent or Pro or Gly or Val
  MISC_FEATURE (858)..(858): Absent or Phe or Ser or Gly or Asp or Glu or Val
  MISC_FEATURE (859)..(859): Absent or Leu or Gly or Ala or Ser
  MISC_FEATURE (860)..(860): Absent or Ala or Thr or Val or Asp
  MISC_FEATURE (861)..(861): Absent or Asp or Pro or Arg or Leu or Ser
  MISC_FEATURE (862)..(862): Absent or Gln or His or Pro or Thr or Leu or Gly
  MISC_FEATURE (863)..(863): Absent or Phe or Asn or Leu or Thr or Gly or Arg
  MISC_FEATURE (864)..(864): Absent or Ala or Gly or Arg
  MISC_FEATURE (865)..(865): Absent or Arg or Ser or Leu or Pro or Lys
  MISC_FEATURE (866)..(866): Absent or Ser or Val
  MISC_FEATURE (867)..(867): Absent or Glu or Ser or Ala or Pro or Asp
  MISC_FEATURE (868)..(868): Absent or Thr or Ser or Ala or Glu or Pro
  MISC_FEATURE (869)..(869): Absent or Val or Leu or Pro or Ala or Ile or Glu
  MISC_FEATURE (870)..(870): Absent or Asp or Ala or Glu or Pro or Thr or Asn
  MISC_FEATURE (871)..(871): Absent or Leu or Ala or Ser or Gln
  MISC_FEATURE (872)..(872): Absent or Asn or Ile or Val or Ala or Ser
  MISC_FEATURE (873)..(873): Absent or Ala or His or Pro or Ser or Asp or Arg
  MISC_FEATURE (874)..(874): Absent or His or Gly or Val or Ser or Ala
  MISC_FEATURE (875)..(875): Absent or Ile or Phe or Pro or Val
  MISC_FEATURE (876)..(876): Absent or Cys or Arg or Gln or Ser or Val or Glu
  MISC_FEATURE (877)..(877): Absent or Ser or Pro or Gly or Lys
  MISC_FEATURE (878)..(878): Absent or Pro or Leu or Ile or Ser
  MISC_FEATURE (879)..(879): Absent or Ala or Ser or Pro
  MISC_FEATURE (880)..(880): Absent or Leu or Ala or Gly or Val or His or Asn
  MISC_FEATURE (881)..(881): Absent or Ser or Met or Leu or Trp
  MISC_FEATURE (882)..(882): Absent or Val or Ile or Gly or Thr or Ser
  MISC_FEATURE (883)..(883): Absent or Ser or Asp or Gly or Ala
  MISC_FEATURE (884)..(884): Absent or Asp or Val or Ser
  MISC_FEATURE (885)..(885): Absent or Asp or Thr or Leu or Met
  MISC_FEATURE (886)..(886): Absent or Gly or Pro or Ala or Gln
  MISC_FEATURE (887)..(887): Absent or Val or Ser or Glu or Arg or Thr or Lys
  MISC_FEATURE (888)..(888): Absent or Thr or Gly or Gln or Pro or Leu or Glu
  MISC_FEATURE (889)..(889): Absent or Ala or Asp or His or Ile or Tyr
  MISC_FEATURE (890)..(890): Absent or Thr or Ser or Asp or Pro or Lys
  MISC_FEATURE (891)..(891): Absent or Asn or Gly or Pro or Leu or Asp
  MISC_FEATURE (892)..(892): Absent or Lys or Glu or Ser or Ala
  MISC_FEATURE (893)..(893): Absent or Thr or Ser or Ile or Pro
  MISC_FEATURE (894)..(894): Absent or Gln or Met or Ser or Gly or Val
  MISC_FEATURE (895)..(895): Absent or Ser or Asn or Thr or Asp
  MISC_FEATURE (896)..(896): Absent or Ser or Arg or Gln or Thr
  MISC_FEATURE (897)..(897): Absent or Phe or Pro or His or Ala or Trp
  MISC_FEATURE (898)..(898): Absent or Pro or Gly or Ser or Ala or Leu
  MISC_FEATURE (899)..(899): Absent or Ser or Tyr or Thr or Gly
  MISC_FEATURE (900)..(900): Absent or Val or Thr or Pro or Gly or Ala or Asp
  MISC_FEATURE (901)..(901): Absent or Tyr or Asn or Ser or Phe or Gln
  MISC_FEATURE (902)..(902): Absent or Glu or Pro or Ser or Thr
  MISC_FEATURE (903)..(903): Absent or His or Gln or Pro or Leu or Ser
  MISC_FEATURE (904)..(904): Absent or Gln or Val or Pro or Gly or Glu
  MISC_FEATURE (905)..(905): Absent or Leu or Gln or Glu or Pro or Val or Arg
  MISC_FEATURE (906)..(906): Absent or Lys or Gly or Val or Asp or Leu
  MISC_FEATURE (907)..(907): Absent or Ser or Ala or Pro or Glu
  MISC_FEATURE (908)..(908): Absent or Asn or Pro or Gly or Ser or Glu or Val
  MISC_FEATURE (909)..(909): Absent or Glu or Ala or Ser or Leu or Gly
  MISC_FEATURE (910)..(910): Absent or Leu or Val or Ala or Asp or Thr
  MISC_FEATURE (911)..(911): Absent or Glu or Lys or Gly or Pro or Ser
  MISC_FEATURE (912)..(912): Absent or Arg or Glu or His or Gly or Phe
  MISC_FEATURE (913)..(913): Absent or Gly or Pro or Ala or Thr or Ser
  MISC_FEATURE (914)..(914): Absent or His or Ser or Thr or Val or Ala
  MISC_FEATURE (915)..(915): Absent or Glu or Ser or Tyr or Leu
  MISC_FEATURE (916)..(916): Absent or Asn or Phe or Gly or Pro or Val
  MISC_FEATURE (917)..(917): Absent or Ser or Thr or Asn or Pro
  MISC_FEATURE (918)..(918): Absent or Ala or Thr or Leu or Ser
  MISC_FEATURE (919)..(919): Absent or Pro or Thr or Asp or Ala
  MISC_FEATURE (920)..(920): Absent or Asn or Thr or Ser
  MISC_FEATURE (921)..(921): Absent or Glu or Thr or Ser or Ala or Asp
  MISC_FEATURE (922)..(922): Absent or Pro or Thr or Leu
  MISC_FEATURE (923)..(923): Absent or Asp or Pro or Glu
  MISC_FEATURE (924)..(924): Absent or Gln or Pro or Ser or Trp
  MISC_FEATURE (925)..(925): Absent or Val or Leu or Ile or Ser or Glu
  MISC_FEATURE (926)..(926): Absent or Thr or Asp or Gly or Ala
  MISC_FEATURE (927)..(927): Absent or Leu or Ala or Gln or Pro
  MISC_FEATURE (928)..(928): Absent or Leu or His or Ser or Asp
  MISC_FEATURE (929)..(929): Absent or Ser or Ala or Pro or Asp or Ile
  MISC_FEATURE (930)..(930): Absent or Ser or Pro
  MISC_FEATURE (931)..(931): Absent or Ser or Ala or Leu
  MISC_FEATURE (932)..(932): Absent or Pro or Glu or Ala or Asp
  MISC_FEATURE (933)..(933): Absent or Ser or Ala or Pro
  MISC_FEATURE (934)..(934): Absent or Leu or Val or Ser or Thr or Arg
  MISC_FEATURE (935)..(935): Absent or Glu or Pro or Ser or Asn
  MISC_FEATURE (936)..(936): Absent or Gln or Gly or Lys or Arg
  MISC_FEATURE (937)..(937): Absent or Lys or Ser or Val or Glu
  MISC_FEATURE (938)..(938): Absent or Asp or Ser or Gly
  MISC_FEATURE (939)..(939): Absent or Thr or Gly or Asn or Met or Ser
  MISC_FEATURE (940)..(940): Absent or Leu or Phe or Asp or His or Gly
  MISC_FEATURE (941)..(941): Absent or Gly or Ala or Arg
  MISC_FEATURE (942)..(942): Absent or Lys or Ser or Gly or Phe
  MISC_FEATURE (943)..(943): Absent or Glu or Ala or Asn or His
  MISC_FEATURE (944)..(944): Absent or Val or Ala or Ser or Asn
  MISC_FEATURE (945)..(945): Absent or His or Ala or Ser or Cys or Asp
  MISC_FEATURE (946)..(946): Absent or Met or Val or Leu or Ile or Lys
  MISC_FEATURE (947)..(947): Absent or Ser or Pro or Thr or Val
  MISC_FEATURE (948)..(948): Absent or Ser or Pro or Glu or Leu
  MISC_FEATURE (949)..(949): Absent or Ala or Ser or Asp or Val
  MISC_FEATURE (950)..(950): Absent or Glu or Arg or Ser or Thr or Pro
  MISC_FEATURE (951)..(951): Absent or Val or Ile or Ser or Glu or Asp
  MISC_FEATURE (952)..(952): Absent or Leu or Met or Pro or Ser
  MISC_FEATURE (953)..(953): Absent or Pro or Asn or Thr or Glu or Phe
  MISC_FEATURE (954)..(954): Absent or Gln or Pro or Asp or Ala or Glu
  MISC_FEATURE (955)..(955): Absent or Ser or Asn or Asp or Glu
  MISC_FEATURE (956)..(956): Absent or Ser or Asn or Gly or Gln
  MISC_FEATURE (957)..(957): Absent or Leu or Pro or Thr or Asn or Met
  MISC_FEATURE (958)..(958): Absent or Gly or Phe or Ala or Met
  MISC_FEATURE (959)..(959): Absent or Thr or Arg or Pro or Leu
  MISC_FEATURE (960)..(960): Absent or Ala or Arg or Gly
  MISC_FEATURE (961)..(961): Absent or Ser or Tyr or Met
  MISC_FEATURE (962)..(962): Absent or Met or Ala
  MISC_FEATURE (963)..(963): Absent or Gly or Arg or Leu
  MISC_FEATURE (964)..(964): Absent or Glu or Leu or Ser
  MISC_FEATURE (965)..(965): Absent or Gln or Asp or Leu
  MISC_FEATURE (966)..(966): Absent or His or Thr or Ala
  MISC_FEATURE (967)..(967): Absent or Asp
  MISC_FEATURE (968)..(968): Absent or Glu or Ala
  MISC_FEATURE (969)..(969): Absent or Glu or Gln
  MISC_FEATURE (970)..(970): Absent or Arg or Ala
  MISC_FEATURE (971)..(971): Absent or Arg
  MISC_FEATURE (972)..(972): Absent or Val
  MISC_FEATURE (973)..(973): Absent or Arg
  MISC_FEATURE (974)..(974): Absent or His
  MISC_FEATURE (975)..(975): Absent or Gly
  MISC_FEATURE (976)..(976): Absent or Gly
  MISC_FEATURE (977)..(977): Absent or Asn
  MISC_FEATURE (978)..(978): Absent or His
  MISC_FEATURE (979)..(979): Absent or Ser
  MISC_FEATURE (980)..(980): Absent or Gly
  MISC_FEATURE (981)..(981): Absent or Pro
  MISC_FEATURE (982)..(982): Absent or Leu
  MISC_FEATURE (983)..(983): Absent or Pro
  MISC_FEATURE (984)..(984): Absent or Gln
  MISC_FEATURE (985)..(985): Absent or Ala
  MISC_FEATURE (986)..(986): Absent or Thr
  MISC_FEATURE (987)..(987): Absent or His
  MISC_FEATURE (988)..(988): Absent or Phe
  MISC_FEATURE (989)..(989): Absent or Thr
  MISC_FEATURE (990)..(990): Absent or Asp
  MISC_FEATURE (991)..(991): Absent or Ala
  MISC_FEATURE (992)..(992): Absent or Gln
  MISC_FEATURE (993)..(993): Absent or Ala
  MISC_FEATURE (994)..(994): Absent or Arg
  MISC_FEATURE (995)..(995): Absent or Val
  MISC_FEATURE (996)..(996): Absent or Arg
  MISC_FEATURE (997)..(997): Absent or Gln
  MISC_FEATURE (998)..(998): Absent or Gly
  MISC_FEATURE (999)..(999): Absent or Ile
  MISC_FEATURE (1000)..(1000): Absent or Ser
  MISC_FEATURE (1001)..(1001): Absent or Arg
  MISC_FEATURE (1002)..(1002): Absent or Ser
  MISC_FEATURE (1003)..(1003): Absent or Gly
  MISC_FEATURE (1004)..(1004): Absent or Pro
  MISC_FEATURE (1005)..(1005): Absent or Leu
  MISC_FEATURE (1006)..(1006): Absent or Pro
  MISC_FEATURE (1007)..(1007): Absent or Arg
  MISC_FEATURE (1008)..(1008): Absent or Pro
  MISC_FEATURE (1009)..(1009): Absent or Thr
  MISC_FEATURE (1010)..(1010): Absent or Tyr
  MISC_FEATURE (1011)..(1011): Absent or Ile
  MISC_FEATURE (1012)..(1012): Absent or Gly
  MISC_FEATURE (1013)..(1013): Absent or Gln
XXXXXXXXXXXXXXXXXXXXXXXXXXXXXXXXXXXXXXXXXXXXXXXXXXXXXXXXXXXXXXXXXXXXXXXXXXXXXXXXXXXXXXXXXXXXXXXXXXXXXXXXXXXXXXXXXXXXXXXXXXXXXXXXXXXXXXXXXXXXXXXXXXXXXXXXXXXXXXXXXXXXXXXXXXXXXXXXXXXXXXXXXXXXXXXXXXXXXXXXXXXXXXXXXXXXXXXXXXXXXXXXXXXXXXXXXXXXXXXXXXXXXXXXXXXXXXXXXXXXXXXXXXXXXXXXXXXXXXXXXXXXXXXXXXXXXXXXXXXXXXXXXXXXXXXXXXXXXXXXXXXXXXXXXXXXXXXXXXXXXXXXXXXXXXXXXXXXXXXXXXXXXXXXXXXXXXXXXXXXXXXXXXXXXXXXXXXXXXXXXXXXXXXXXXXXXXXXXXXXXXXXXXXXXXXXXXXXXXXXXXXXXXXXXXXXXXXXXXXXXXXXXXXXXXXXXXXXXXXXXXXXXXXXXXXXXXXXXXXXXXXXXXXXXXXXXXXXXXXXXXXXXXXXXXXXXXXXXXXXXXXXXXXXXXXXXXXXXXXXXXXXXXXXXXXXXXXXXXXXXXXXXXXXXXXXXXXXXXXXXXXXXXXXXXXXXXXXXXXXXXXXXXXXXXXXXXXXXXXXXXXXXXXXXXXXXXXXXXXXXXXXXXXXXXXXXXXXXXXXXXXXXXXXXXXXXXXXXXXXXXXXXXXXXXXXXXXXXXXXXXXXXXXXXXXXXXXXXXXXXXXXXXXXXXXXXXXXXXXXXXXXXXXXXXXXXXXXXXXXXXXXXXXXXXXXXXXXXXXXXXXXXXXXXXXXXXXXXXXXXXXXXXXXXXXXXXXXXXXXXXXXXXXXXXXXXXXXXXXXXXXXXXXXXXXXXXXXXXXXXXXXXXXXXXXXXXXXXXXXXXXXXXXXXXXXXXXXXXXXXXXXXXXXXXXXXXXXXXXXXXXXXXXXXXXXXXXXXXXXXXXXXXXXXXXXXXXXXXXXXXXXXXXXXXXXXXXXXXXXXXXXXXXXXXXXX

SEQ ID NO: 17382 - protein, 693 aa, Artificial
  Consensus Sequence of SEQ ID NO 133 and its homologs
  MISC_FEATURE (1)..(1): Absent or Met
  MISC_FEATURE (2)..(2): Absent or Ala or Gly
  MISC_FEATURE (3)..(3): Absent or Asn or Ser
  MISC_FEATURE (4)..(4): Absent or His or Arg
  MISC_FEATURE (5)..(5): Absent or Arg or Ile or Thr
  MISC_FEATURE (6)..(6): Absent or Arg or Thr
  MISC_FEATURE (7)..(7): Absent or Val or Arg
  MISC_FEATURE (8)..(8): Absent or Ser or Gly
  MISC_FEATURE (9)..(9): Absent or Phe
  MISC_FEATURE (10)..(10): Absent or Gly
  MISC_FEATURE (11)..(11): Absent or Val or Met
  MISC_FEATURE (12)..(12): Absent or Ile or Glu
  MISC_FEATURE (13)..(13): Absent or Gly or Asp or Ala
  MISC_FEATURE (14)..(14): Absent or Glu or Asp or Arg
  MISC_FEATURE (15)..(15): Absent or Thr or Lys or Leu
  MISC_FEATURE (16)..(16): Absent or Gly or Leu
  MISC_FEATURE (17)..(17): Absent or Leu or Ala or Gly
  MISC_FEATURE (18)..(18): Absent or Ser or Glu or Ala
  MISC_FEATURE (19)..(19): Absent or Asp or Thr or Arg or Glu
  MISC_FEATURE (20)..(20): Absent or Ser or Gly
  MISC_FEATURE (21)..(21): Absent or Pro or Met or Arg
  MISC_FEATURE (22)..(22): Absent or Pro or Lys
  MISC_FEATURE (23)..(23): Absent or Ser or Glu
  MISC_FEATURE (24)..(24): Absent or Asn or Phe or Gly
  MISC_FEATURE (25)..(25): Absent or His or Asn or Ser
  MISC_FEATURE (26)..(26): Absent or His or Ser or Gly
  MISC_FEATURE (27)..(27): Absent or His or Asp or Glu or Val
  MISC_FEATURE (28)..(28): Absent or His or Leu or Ala
  MISC_FEATURE (29)..(29): Absent or His or Pro or Glu
  MISC_FEATURE (30)..(30): Absent or Val or Ile or Asp
  MISC_FEATURE (31)..(31): Absent or Ser or Met
  MISC_FEATURE (32)..(32): Absent or Tyr or Asp or Asn or Ala
  MISC_FEATURE (33)..(33): Absent or Val or Ala or Ser
  MISC_FEATURE (34)..(34): Absent or Val or Cys or Ser or Glu
  MISC_FEATURE (35)..(35): Absent or His or Tyr
  MISC_FEATURE (36)..(36): Absent or Gly or Thr or Ala
  MISC_FEATURE (37)..(37): Absent or Ile or Glu or Thr
  MISC_FEATURE (38)..(38): Absent or Asn or Gly or Ala
  MISC_FEATURE (39)..(39): Absent or Asn or Ser or Arg
  MISC_FEATURE (40)..(40): Absent or Asn or Thr or Met
  MISC_FEATURE (41)..(41): Absent or Pro or Val or Ile or Arg
  MISC_FEATURE (42)..(42): Absent or Ala or Asp or Arg
  MISC_FEATURE (43)..(43): Absent or Ser or Ala or Arg
  MISC_FEATURE (44)..(44): Absent or Phe or Leu
  MISC_FEATURE (45)..(45): Absent or Ile or His or Arg
  MISC_FEATURE (46)..(46): Absent or Asn or Val or Arg
  MISC_FEATURE (47)..(47): Absent or Gln or Ser or Arg
  MISC_FEATURE (48)..(48): Absent or Glu or Asp or Cys
  MISC_FEATURE (49)..(49): Absent or Gly or Phe or Cys
  MISC_FEATURE (50)..(50): Absent or Ser or Gly or Arg
  MISC_FEATURE (51)..(51): Absent or Ala or Asn
  MISC_FEATURE (52)..(52): Absent or Phe or Leu
  MISC_FEATURE (53)..(53): Absent or Asp or Gly or Ile
  MISC_FEATURE (54)..(54): Absent or Phe or Gln or Pro
  MISC_FEATURE (55)..(55): Absent or Gly or Pro or Asn
  MISC_FEATURE (56)..(56): Absent or Tyr or Leu
  MISC_FEATURE (57)..(57): Absent or Glu or Arg or Val
  MISC_FEATURE (58)..(58): Absent or Leu or Ile or Val or Phe
  MISC_FEATURE (59)..(59): Absent or Glu or Arg
  MISC_FEATURE (60)..(60): Absent or Glu or Asp
  MISC_FEATURE (61)..(61): Absent or Ala or Arg
  MISC_FEATURE (62)..(62): Absent or Ile or Val or Arg
  MISC_FEATURE (63)..(63): Absent or Val or Ala or Cys or Arg
  MISC_FEATURE (64)..(64): Absent or Leu or Arg
  MISC_FEATURE (65)..(65): Absent or Gln or Ser or Gly
  MISC_FEATURE (66)..(66): Absent or Gly or Lys
  MISC_FEATURE (67)..(67): Absent or Val or Asn or Gly
  MISC_FEATURE (68)..(68): Absent or Lys or Ser or Pro or Ala
  MISC_FEATURE (69)..(69): Absent or Asn or Gly
  MISC_FEATURE (70)..(70): Absent or Ser or Gly
  MISC_FEATURE (71)..(71): Absent or Leu or Val or Ile or Asn
  MISC_FEATURE (72)..(72): Absent or Ser or Phe or Tyr or Thr
  MISC_FEATURE (73)..(73): Absent or Asn or Arg
  MISC_FEATURE (74)..(74): Absent or Asp or Ser or Ile
  MISC_FEATURE (75)..(75): Absent or Glu or Leu
  MISC_FEATURE (76)..(76): Absent or Gly or Lys or Trp
  MISC_FEATURE (77)..(77): Absent or Lys or Val or Ser
  MISC_FEATURE (78)..(78): Absent or Ala or Ser or Met
  MISC_FEATURE (79)..(79): Absent or Leu or Gly or Ser
  MISC_FEATURE (80)..(80): Absent or Phe or Gln or His
  MISC_FEATURE (81)..(81): Absent or Thr or Glu
  MISC_FEATURE (82)..(82): Absent or Glu or Ile or Arg
  MISC_FEATURE (83)..(83): Absent or Ala or Ser or Lys
  MISC_FEATURE (84)..(84): Absent or Arg or Pro or Ala
  MISC_FEATURE (85)..(85): Absent or Pro or Gly or Phe
  MISC_FEATURE (86)..(86): Absent or Ala or Pro or Ser or Gly
  MISC_FEATURE (87)..(87): Absent or Ala or Val
  MISC_FEATURE (88)..(88): Absent or Thr or His or Met
  MISC_FEATURE (89)..(89): Absent or Leu or Ile or Met
  MISC_FEATURE (90)..(90): Absent or Glu or Ser or Leu
  MISC_FEATURE (91)..(91): Absent or Met or Thr or Ser or Pro
  MISC_FEATURE (92)..(92): Absent or Phe or Leu or Asp
  MISC_FEATURE (93)..(93): Absent or Pro or Gly or Asp
  MISC_FEATURE (94)..(94): Absent or Ser or Lys or Gln or Met
  MISC_FEATURE (95)..(95): Absent or Trp or Phe or Leu or Thr
  MISC_FEATURE (96)..(96): Absent or Pro or Gly
  MISC_FEATURE (97)..(97): Absent or Ile or Thr or Asp
  MISC_FEATURE (98)..(98): Absent or Arg or Ser or Ala
  MISC_FEATURE (99)..(99): Absent or Phe or Leu or Ala
  MISC_FEATURE (100)..(100): Absent or His or Asp or Thr
  MISC_FEATURE (101)..(101): Absent or His or Lys or Phe
  MISC_FEATURE (102)..(102): Absent or Thr or Ser or Met or Ala
  MISC_FEATURE (103)..(103): Absent or Pro or Met or Ala or Leu
  MISC_FEATURE (104)..(104): Absent or Arg or Leu or Ala or His
  MISC_FEATURE (105)..(105): Absent or Gly or Glu or Thr or Ala or Gln
  MISC_FEATURE (106)..(106): Absent or Ser or Asn or Thr or Met
  MISC_FEATURE (107)..(107): Absent or Ser or Glu or Pro or Thr or Gly
  MISC_FEATURE (108)..(108): Absent or Lys or Ser or Ala or Pro or Val
  MISC_FEATURE (109)..(109): Absent or Ser or His or Pro or Thr or Lys
  MISC_FEATURE (110)..(110): Absent or Gly or Leu or Pro or Ser or Glu
  MISC_FEATURE (111)..(111): Absent or Gly or Asp or Ser or Pro
  MISC_FEATURE (112)..(112): Absent or Glu or His or Arg or Ile
  MISC_FEATURE (113)..(113): Absent or Ser or Gln or Asp or Gly or Pro or Met or Ala
  MISC_FEATURE (114)..(114): Absent or Thr or Arg or Gly or Gln or Pro or Ala or Lys or Met
  MISC_FEATURE (115)..(115): Absent or Glu or His or Gly or Ser or Asn or Asp
  MISC_FEATURE (116)..(116): Absent or Glu or Pro or Leu or Arg or Ser or Asp
  MISC_FEATURE (117)..(117): Absent or Ser or His or Ala or Asn or Leu or Val or Glu
  MISC_FEATURE (118)..(118): Met or Gly or Absent or Arg or Glu or Ala
  MISC_FEATURE (119)..(119): Thr or Ser or Absent or Leu or Asn or Lys or Glu
  MISC_FEATURE (120)..(120): Pro or Gly or Absent or Gln or Arg or Ala or Leu or His or Lys or Ser
  MISC_FEATURE (121)..(121): Leu or Absent or Ser or Pro or Ala or Val or Asn or Arg
  MISC_FEATURE (122)..(122): Ala or Asn or Absent or Thr or Gln or Pro or Gly
  MISC_FEATURE (123)..(123): Phe or Ser or Absent or Lys or Arg or Pro or Ala or Val
  MISC_FEATURE (124)..(124): Ser or Val or Absent or Leu or Glu or Pro
  MISC_FEATURE (125)..(125): Gln or Ser or Absent or Pro or Asp or Lys or Met or Leu
  MISC_FEATURE (126)..(126): Phe or Glu or Absent or Ser or Gly or Asn or Asp
  MISC_FEATURE (127)..(127): Tyr or Ala or Absent or Ser or Asn or Gly or Asp or Met or Ile
  MISC_FEATURE (128)..(128): Glu or Gln or Absent or Asn or Lys or Ala or Pro
  MISC_FEATURE (129)..(129): Lys or Leu or Absent or Pro or Ser or Thr or Arg
  MISC_FEATURE (130)..(130): Trp or Asp or Absent or Ser or Phe or Tyr
  MISC_FEATURE (131)..(131): Phe or Leu or Absent or Ser or Ala or His or Glu or Gln
  MISC_FEATURE (132)..(132): Asp or Glu or Absent or Ser or Lys or Arg
  MISC_FEATURE (133)..(133): Leu or Ser or Absent or Thr or Phe or Cys
  MISC_FEATURE (134)..(134): Leu or Pro or Absent or Ile or Phe or Tyr
  MISC_FEATURE (135)..(135): His or Ile or Absent or Leu or Pro or Glu or Asp or Arg or Asn
  MISC_FEATURE (136)..(136): His or Thr or Absent or Ser or Val or Gly or Cys or Lys
  MISC_FEATURE (137)..(137): Leu or Ile or Absent or Val or Gly or Trp
  MISC_FEATURE (138)..(138): Val or Lys or Absent or His or Asn or Arg or Ile or Leu
  MISC_FEATURE (139)..(139): Asn or Pro or Absent or Ile or Thr or Arg or Ser or Leu or Ala or Phe or Cys or Gln
  MISC_FEATURE (140)..(140): Gln or Ser or Absent or Glu or Asp or Arg or Gly
  MISC_FEATURE (141)..(141): Leu or Ser or Absent or Asn or Arg or Gln or Glu
  MISC_FEATURE (142)..(142): Ser or Absent or Gln or Lys or Glu or Asp
  MISC_FEATURE (143)..(143): Asp or Ser or Absent or Glu or Pro or Arg or Gln or Gly or Ala or Asn
  MISC_FEATURE (144)..(144): Phe or Ser or Absent or Glu or Asp or Tyr or Gly or Leu
  MISC_FEATURE (145)..(145): Ala or Ser or Absent or Phe or Pro or Leu
  MISC_FEATURE (146)..(146): Ser or Absent or Thr or Ala or Glu or Lys or His or Gln
  MISC_FEATURE (147)..(147): Ser or His or Absent or Met or Glu or Ala or Gln
  MISC_FEATURE (148)..(148): Ile or His or Absent or Ala or any naturally occurring amino acid or Leu
  MISC_FEATURE (149)..(149): Ala or His or Absent or Asp or Arg or Val or Leu or Glu or Lys
  MISC_FEATURE (150)..(150): Asn or His or Absent or Ala or Ser or Ile or Arg
  MISC_FEATURE (151)..(151): Ser or His or Absent or Ala or Val
  MISC_FEATURE (152)..(152): Lys or Leu or Absent or Pro or Gly or Ala or Ser or His
  MISC_FEATURE (153)..(153): Glu or Gln or Absent or Arg or Ser or Thr or Asn or Ala
  MISC_FEATURE (154)..(154): Glu or Val or Absent or Thr or Trp or Ala or Asp or Asn
  MISC_FEATURE (155)..(155): Tyr or Asp or Absent or any naturally occurring amino acid or Arg or Ala or Val or Ile
  MISC_FEATURE (156)..(156): Ile or Met or Absent or Pro or Thr or Ser
  MISC_FEATURE (157)..(157): Ser or Ala or Absent or Asn or Lys
  MISC_FEATURE (158)..(158): Pro or Asn or Absent or Thr or Gly
  MISC_FEATURE (159)..(159): Leu or Asp or Absent or Pro or Asn or Ala
  MISC_FEATURE (160)..(160): Val or Ala or Absent or Asn or Glu
  MISC_FEATURE (161)..(161): Ala or Ser or Absent or Asp or Asn or Glu or Gly
  MISC_FEATURE (162)..(162): Ala or Thr or Absent or Ser or Pro or Val or Gly or Arg
  MISC_FEATURE (163)..(163): Lys or Pro or Absent or Asp or Ala or Val or Met or Leu or Arg
  MISC_FEATURE (164)..(164): Gln or Gly or Absent or Asp or Pro or Glu or Ser or Thr or Asn
  MISC_FEATURE (165)..(165): Glu or Ser or Absent or Lys or Asp or any naturally occurring amino acid
  MISC_FEATURE (166)..(166): Glu or Ser or Absent or Asn or Ala or Arg or Ile or Gln
  MISC_FEATURE (167)..(167): Lys or Asn or Absent or Gln or Asp or Glu or Val
  MISC_FEATURE (168)..(168): Leu or Absent or Arg or Pro or Gln or His or Cys or Phe
  MISC_FEATURE (169)..(169): Ala or Absent or Phe or Arg or His or Val or Gln
  MISC_FEATURE (170)..(170): Gln or Asn or Absent or Asp or any naturally occurring amino acid or Arg or Pro or Gly or Ala or Thr or Lys
  MISC_FEATURE (171)..(171): Leu or Gln or Absent or Thr or Arg or Val
  MISC_FEATURE (172)..(172): Ile or Thr or Absent or Asn or Val
  MISC_FEATURE (173)..(173): Gly or Pro or Absent or Gln or any naturally occurring amino acid or Asp or Asn or Lys or Ser or Glu or Arg
  MISC_FEATURE (174)..(174): Lys or Pro or Absent or Ser or Arg or Gln
  MISC_FEATURE (175)..(175): Val or Lys or Absent or Leu or Cys
  MISC_FEATURE (176)..(176): Met or Pro or Absent or Val or Ala or Leu or Ile or Thr or Tyr
  MISC_FEATURE (177)..(177): Leu or Thr or Absent or Pro or Ala or any naturally occurring amino acid or Gly or Gln or Asp
  MISC_FEATURE (178)..(178): His or Gln or Absent or Val or Asp or Gly or Leu
  MISC_FEATURE (179)..(179): His or Asp or Absent or Gly or Ser or Tyr or Phe
  MISC_FEATURE (180)..(180): Glu or Lys or Absent or Ser or Ala or Gln or Thr
  MISC_FEATURE (181)..(181): Glu or Arg or Absent or Asp or any naturally occurring amino acid or Gln or His or Gly or Ala or Ser
  MISC_FEATURE (182)..(182): Tyr or Lys or Absent or Ser or any naturally occurring amino acid or Ala
  MISC_FEATURE (183)..(183): Phe or Val or Absent or Ser or Tyr or Ala
  MISC_FEATURE (184)..(184): Arg or Ser or Absent or Asp or Glu or Thr or Lys or His
  MISC_FEATURE (185)..(185): Ala or Ser or Absent or Arg or Thr or Glu or Val
  MISC_FEATURE (186)..(186): Lys or Ser or Absent or Arg
  MISC_FEATURE (187)..(187): Ser or Asp or Absent or Lys or Ala or Trp or Arg or Val or Ile
  MISC_FEATURE (188)..(188): Leu or Lys or Absent or Asp or Ala or Glu or Arg
  MISC_FEATURE (189)..(189): Ile or Gln or Absent or Lys or Gly or Ala or Tyr or Leu
  MISC_FEATURE (190)..(190): Thr or Leu or Absent or Ser or Ala or Ile
  MISC_FEATURE (191)..(191): Glu or Asp or Absent or Ser or Ala or Gly or His or Arg
  MISC_FEATURE (192)..(192): Asn or Ala or Absent or Gln or Asp or Thr or Glu or Lys
  MISC_FEATURE (194)..(194): Pro or Thr or Absent or Val or Ile or Cys or Gly or Ala
  MISC_FEATURE (195)..(195): Leu or Absent or Phe or Ser or Val
  MISC_FEATURE (196)..(196): Ser or Arg or Absent or Pro or Cys or Gly or Ala or Val or Tyr
  MISC_FEATURE (197)..(197): Val or Arg or Absent or Met or Phe or Tyr or Ile
  MISC_FEATURE (198)..(198): Val or Leu or Absent or Phe or Tyr or Ala or Thr
  MISC_FEATURE (199)..(199): Ala or Absent or Thr or Ser or Asn or Gly or Cys
  MISC_FEATURE (200)..(200): Ser or Gln or Absent or Pro or Gly
  MISC_FEATURE (201)..(201): Pro or Asn or Absent or Ser or Thr or Val or Ala
  MISC_FEATURE (203)..(203): Ala or Glu or Absent or Ile or Thr or Arg or Leu or Asn or Cys or Lys
  MISC_FEATURE (204)..(204): Thr or Ala or Absent or Ser or Asn
  MISC_FEATURE (205)..(205): Thr or Ala or Absent or Asn or Pro or Lys or Ser
  MISC_FEATURE (206)..(206): Leu or Arg or Absent or Thr or Phe
  MISC_FEATURE (208)..(208): Arg or Ser or Absent or Asn or Gly or Lys or Ala
  MISC_FEATURE (209)..(209): Ser or Arg or Absent or Leu or Ala or Gly
  MISC_FEATURE (210)..(210): Leu or Absent or Tyr or Phe or Cys or Val or Met
  MISC_FEATURE (211)..(211): His or Arg or Absent or Leu or Phe or Ser or Met
  MISC_FEATURE (213)..(213): Val or Lys or Absent or any naturally occurring amino acid or Cys or Ile or Leu or Met
  MISC_FEATURE (214)..(214): Thr or Ala or Absent or Gly
  MISC_FEATURE (216)..(216): Trp or Val or Absent or Cys
  MISC_FEATURE (217)..(217): Arg or Gln or any naturally occurring amino acid or Absent or Lys
  MISC_FEATURE (219)..(219): Thr or Leu or Absent or Ser
  MISC_FEATURE (220)..(220): Thr or Glu or Ser or Ala or Absent or Met or Leu
  MISC_FEATURE (221)..(221): Ala or Ser or any naturally occurring amino acid or Absent or Ile or Phe or Thr
  MISC_FEATURE (222)..(222): Phe or Ser or any naturally occurring amino acid or Ile or Absent or Leu or Val
  MISC_FEATURE (223)..(223): His or Arg or any naturally occurring amino acid or Gln or Absent or Gly or Val
  MISC_FEATURE (224)..(224): Leu or Ile or Met or Absent or Val
  MISC_FEATURE (225)..(225): Val or Lys or Leu or Absent or Ile or Thr
  MISC_FEATURE (226)..(226): Tyr or Leu or any naturally occurring amino acid or Absent or Asp or Glu or Phe
  MISC_FEATURE (227)..(227): Thr or Ser or Absent or Arg or Ala or Asn
  MISC_FEATURE (228)..(228): Glu or Gln or Lys or Absent or Leu
  MISC_FEATURE (229)..(229): Ser or Leu or Absent or Cys or Ile or Met
  MISC_FEATURE (230)..(230): Ser or Glu or Gly or Absent
  MISC_FEATURE (231)..(231): Val or Gln or Leu or Met or Absent or Ala or Ser or Glu or Ile
  MISC_FEATURE (232)..(232): Leu or Asp or Glu or Gln or Absent or Cys or Gly
  MISC_FEATURE (233)..(233): Phe or Leu or Val or Absent or Ala or Ile or Met
  MISC_FEATURE (234)..(234): Glu or Gln or any naturally occurring amino acid or Absent
  MISC_FEATURE (235)..(235): Ser or Arg or Gly or His or Absent or Ala or Thr or Asn
  MISC_FEATURE (236)..(236): His or Ala or any naturally occurring amino acid or Gln or Absent or Arg or Glu
  MISC_FEATURE (237)..(237): Ile or Arg or Leu or Absent or Val
  MISC_FEATURE (238)..(238): Gly or Ser or Gln or Pro or Absent or Glu
  MISC_FEATURE (239)..(239): Asp or Gln or Gly or Ala or Absent or Val or Arg or Glu
  MISC_FEATURE (240)..(240): Ile or Gly or Phe or Absent or Leu or Tyr
  MISC_FEATURE (241)..(241): Leu or Ile or Val or Absent
  MISC_FEATURE (242)..(242): Arg or Phe or Absent or Asp or Ala or Leu or Thr or Met or Gly or Glu
  MISC_FEATURE (243)..(243): Gly or Leu or Ile or Absent or Val or Arg or Gln
  MISC_FEATURE (244)..(244): Val or Ser or Absent or Gly or Ile or Lys or Arg or Leu
  MISC_FEATURE (245)..(245): Asn or Gly or Ser or Absent or Thr or Asp
  MISC_FEATURE (246)..(246): Absent or Cys or Ser or Leu or Glu or Asn
  MISC_FEATURE (247)..(247): Absent or Gly or Arg or Asn
  MISC_FEATURE (248)..(248): Absent or Gly or Glu or Asp or Ile or Val
  MISC_FEATURE (249)..(249): Absent or Gly or Gln or Asp or Ile
  MISC_FEATURE (250)..(250): Absent or Gly or Ser or Thr or Ala or Asp or Pro
  MISC_FEATURE (251)..(251): Absent or Gly or Gln or His
  MISC_FEATURE (252)..(252): Absent or Asn or Ser or Thr or His
  MISC_FEATURE (253)..(253): Absent or Ile or Thr or Leu or Gly or Asp
  MISC_FEATURE (254)..(254): Absent or Ser or Lys or Asp or Thr or Ala or Gly
  MISC_FEATURE (255)..(255): Thr or Absent or Gly or Asp or Ala or Trp or Val or Leu
  MISC_FEATURE (256)..(256): Gly or Pro or Asn or Absent or Asp or Thr or Arg or Lys or Ser
  MISC_FEATURE (257)..(257): Asp or Gly or Absent or Leu or Pro or Ser
  MISC_FEATURE (258)..(258): Leu or Gly or Ala or Absent or Thr or Val or Met
  MISC_FEATURE (259)..(259): Gly or Ala or Ser or Met or Absent or Val or Leu
  MISC_FEATURE (260)..(260): Asp or Ile or Ser or Gln or Absent or Arg or Gly or Tyr or Val or Glu or Ala or Thr
  MISC_FEATURE (261)..(261): Leu or Phe or Absent or Cys or Ile
  MISC_FEATURE (262)..(262): Ser or Asp or His or Absent or Gly or Val or Thr
  MISC_FEATURE (263)..(263): Pro or Met or Val or Ala or Absent or Gly or Glu or Ser
  MISC_FEATURE (264)..(264): Thr or Glu or Absent or Ala or Gly or Asp or Lys
  MISC_FEATURE (266)..(266): Phe or Gly or Ser or Ala or Absent or Leu or Ile or Val
  MISC_FEATURE (267)..(267): Arg or Absent or Gln or Asp or Glu or Val or Ala or Ser
  MISC_FEATURE (268)..(268): Arg or Trp or Absent or Ala or Lys or Leu
  MISC_FEATURE (269)..(269): Val or Leu or Absent or Ala or Ile
  MISC_FEATURE (270)..(270): Ser or Glu or Absent or Asp or Asn
  MISC_FEATURE (271)..(271): Glu or Asp or Absent or Gln or Ala or Val
  MISC_FEATURE (273)..(273): Gln or Glu or Asn or Absent or Arg or His
  MISC_FEATURE (274)..(274): Cys or Arg or Absent or Lys or Val or Ser or Gln
  MISC_FEATURE (275)..(275): Asp or His or Arg or Gln or Absent or Ile or Lys
  MISC_FEATURE (276)..(276): Thr or Ile or Absent or Val
  MISC_FEATURE (277)..(277): Val or Ser or Asn or Absent or Ile or Arg or Lys
  MISC_FEATURE (278)..(278): Lys or Glu or Absent or Arg or Ser or Phe or Leu or His or Thr
  MISC_FEATURE (279)..(279): Glu or Leu or Absent or Arg or Lys or Asp or Gln or Ala
  MISC_FEATURE (281)..(281): Asn or Arg or Glu or Ala or Absent or Lys or Asp
  MISC_FEATURE (282)..(282): Gln or Gly or Ala or Absent or Glu or Lys or Arg or Val
  MISC_FEATURE (283)..(283): Ile or Leu or Val or Absent or Ser
  MISC_FEATURE (284)..(284): Thr or Gln or Ser or Asn or Absent or Glu
  MISC_FEATURE (285)..(285): Asp or Ala or Ser or Absent or Glu or Asn or Thr or Arg or Lys
  MISC_FEATURE (286)..(286): Glu or His or Absent or Ala or Lys or Arg
  MISC_FEATURE (287)..(287): Leu or Ala or Absent
  MISC_FEATURE (288)..(288): Ser or Ala or Absent
  MISC_FEATURE (289)..(289): Absent or Asp or Ser or Gly
  MISC_FEATURE (290)..(290): Absent or Lys or Gly or Thr or Leu or Met or Tyr
  MISC_FEATURE (291)..(291): Absent or Asp or Glu or Ala or Ser
  MISC_FEATURE (292)..(292): Absent or Leu or Arg or Asn or Thr or Val
  MISC_FEATURE (293)..(293): Absent or Gly or Arg or Val or Tyr or Gln or Phe or Leu
  MISC_FEATURE (294)..(294): Absent or Gln
  MISC_FEATURE (295)..(295): Absent or Val
  MISC_FEATURE (296)..(296): Absent or Cys
  MISC_FEATURE (297)..(297): Absent or Phe
  MISC_FEATURE (298)..(298): Absent or Asp
  MISC_FEATURE (299)..(299): Absent or Ala
  MISC_FEATURE (300)..(300): Absent or Phe
  MISC_FEATURE (301)..(301): Absent or Asn
  MISC_FEATURE (302)..(302): Absent or His
  MISC_FEATURE (303)..(303): Absent or Arg
  MISC_FEATURE (304)..(304): Absent or Gly
  MISC_FEATURE (305)..(305): Absent or Ala or Leu
  MISC_FEATURE (307)..(307): Absent or Glu or any naturally occurring amino acid or Val or Met
  MISC_FEATURE (308)..(308): Absent or Val or Leu or Met or Ala or Ser or Thr or Asp
  MISC_FEATURE (309)..(309): Absent or Met or Ile or Leu or Val
  MISC_FEATURE (310)..(310): Absent or Val or Thr or Ala
  MISC_FEATURE (311)..(311): Absent or Asp or Thr
  MISC_FEATURE (312)..(312): Absent or Gly or Ala or Thr or Val or Arg or Met or Gln
  MISC_FEATURE (313)..(313): Absent or Tyr or Val or Ile or Thr or Lys or Ser or Pro or Gln
  MISC_FEATURE (314)..(314): Absent or Ile or Leu or Met or Val or Thr
  MISC_FEATURE (315)..(315): Absent or Ser or Thr or Ala or Val or Leu
  MISC_FEATURE (316)..(316): Absent or His or Glu or Val or Pro or Arg
  MISC_FEATURE (317)..(317): Absent or Tyr or Leu or Asn or Ile or Ala
  MISC_FEATURE (318)..(318): Absent or Asp or Glu or Ala or Ser or Val or Gly or Thr
  MISC_FEATURE (319)..(319): Absent or Glu or Asp or Gly or His or Arg or Phe or Thr
  MISC_FEATURE (320)..(320): Absent or Ile or Gly or Lys or Leu or Thr or Trp or Gln or Ala
  MISC_FEATURE (321)..(321): Absent or Phe or Gly or Cys or Val or Ala or Arg or Asp
  MISC_FEATURE (322)..(322): Absent or Arg or Gly or any naturally occurring amino acid or Thr or Cys or Asp or Glu or Pro
  MISC_FEATURE (323)..(323): Absent or Leu or Ile or Met or Arg or Ser or Val or Gln or Pro
  MISC_FEATURE (324)..(324): Absent or Arg or Lys or Asp or Leu or Ala or Ser or Pro
  MISC_FEATURE (325)..(325): Absent or Gly or Asn or Ala or Met or Ser
  MISC_FEATURE (326)..(326): Absent or Met or Ala or Asp or Glu
  MISC_FEATURE (327)..(327): Absent or Ala
  MISC_FEATURE (328)..(328): Absent or Arg
  MISC_FEATURE (329)..(329): Absent or Leu
  MISC_FEATURE (330)..(330): Absent or Gly
  MISC_FEATURE (331)..(331): Absent or Ala
  MISC_FEATURE (332)..(332): Absent or Ala
  MISC_FEATURE (333)..(333): Absent or Ala
  MISC_FEATURE (334)..(334): Absent or Ala
  MISC_FEATURE (335)..(335): Absent or Ala
  MISC_FEATURE (336)..(336): Absent or Ser
  MISC_FEATURE (337)..(337): Absent or Gly
  MISC_FEATURE (338)..(338): Absent or Ser
  MISC_FEATURE (339)..(339): Absent or Cys
  MISC_FEATURE (340)..(340): Absent or Asp
  MISC_FEATURE (341)..(341): Absent or Ile or Val or Gly
  MISC_FEATURE (342)..(342): Absent or Ser or Gly or Arg or Ala
  MISC_FEATURE (343)..(343): Absent or Gly or Asn or Ala
  MISC_FEATURE (344)..(344): Absent or Ser or Glu or Arg
  MISC_FEATURE (345)..(345): Absent or Arg or Glu
  MISC_FEATURE (346)..(346): Absent or Gly or Leu or Arg
  MISC_FEATURE (347)..(347): Absent or Gly or Val or Leu
  MISC_FEATURE (348)..(348): Absent or Gly or Val or Arg
  MISC_FEATURE (349)..(349): Absent or Gly or Val or Ala
  MISC_FEATURE (350)..(350): Absent or Gly or Glu or Val or Ala
  MISC_FEATURE (351)..(351): Absent or Gly or Arg
  MISC_FEATURE (352)..(352): Absent or Ile or Asp or Val or Gly or Asn or Leu
  MISC_FEATURE (353)..(353): Absent or Ala or Lys or His or Val or Gly or Cys or Ser
  MISC_FEATURE (354)..(354): Asp or Ala or Absent or Ile or Glu or Gln or Phe
  MISC_FEATURE (355)..(355): Trp or Lys or Absent or Leu or Ser or Val or Ala or Asn
  MISC_FEATURE (356)..(356): Gln or Ser or Ala or Absent or Trp or Asp or Thr or Glu or Met
  MISC_FEATURE (357)..(357): Asp or Absent or Gly or Glu or Val or Ala
  MISC_FEATURE (358)..(358): Thr or Val or Absent or Ala or Leu or Gly or Glu
  MISC_FEATURE (359)..(359): Ala or Phe or Absent or Met or Val or Ile
  MISC_FEATURE (360)..(360): Ser or His or Absent or Asp or Gly or Glu or Arg or Lys
  MISC_FEATURE (361)..(361): His or Leu or Ile or Absent or Arg or any naturally occurring amino acid or Met or Ala or Val or Asp or Glu
  MISC_FEATURE (362)..(362): Leu or Ile or Absent or Glu or any naturally occurring amino acid or Asn or Ala or Val
  MISC_FEATURE (363)..(363): Met or Thr or Ser or Absent or Ile or Leu or Val
  MISC_FEATURE (364)..(364): Gly or Absent or Gln or His or Asp or Arg or Ala or Lys or Glu
  MISC_FEATURE (365)..(365): Pro or Met or Absent or Ala or Gly or Ser or Thr or Lys
  MISC_FEATURE (366)..(366): Arg or Trp or Absent or Lys or Leu or Val or His or Tyr
  MISC_FEATURE (367)..(367): Ala or Thr or Lys or Absent or Glu or Leu
  MISC_FEATURE (368)..(368): Glu or Thr or Absent or Ala or Asp or Val
  MISC_FEATURE (369)..(369): Ser or Pro or Absent or Gly or Ala or Arg or Cys or Glu
  MISC_FEATURE (370)..(370): Lys or Ala or Absent or Met or Leu
  MISC_FEATURE (371)..(371): Glu or Absent or Arg or Lys or Ile or Gly or Ser
  MISC_FEATURE (373)..(373): Ile or Cys or Absent or Val or Met or Leu
  MISC_FEATURE (374)..(374): Glu or Phe or Absent or Leu or Val or Met
  MISC_FEATURE (375)..(375): Arg or Ile or Leu or Absent or Glu or Gln or Lys or Ala or Val
  MISC_FEATURE (376)..(376): Leu or Trp or Absent or Met or Lys or Ala or Glu
  MISC_FEATURE (378)..(378): Cys or Gly or Absent or Asp or Glu
  MISC_FEATURE (379)..(379): Ile or Gly or Absent or Ala or Asn or Cys or Lys or Glu or Thr
  MISC_FEATURE (380)..(380): Thr or Phe or Absent or Leu or Val
  MISC_FEATURE (382)..(382): Lys or Pro or Ser or Absent or Leu or Val or Met
  MISC_FEATURE (383)..(383): Arg or Ser or Absent or Glu or Asn or Lys or Ala or Gln
  MISC_FEATURE (384)..(384): Met or Asp or Glu or Absent or Thr or Ala
  MISC_FEATURE (385)..(385): Ile or Leu or Absent or Asp or Met or Ala
  MISC_FEATURE (386)..(386): Tyr or Ile or Leu or Absent or Arg or Lys or Gln
  MISC_FEATURE (387)..(387): Gly or Lys or Absent or Glu or Arg or Ala
  MISC_FEATURE (388)..(388): Ser or Met or Leu or Absent or Val or Ile
  MISC_FEATURE (389)..(389): Glu or Leu or Absent or Val or Ala or Phe or Tyr
  MISC_FEATURE (390)..(390): Absent or Ile or Val or Ala or Thr
  MISC_FEATURE (391)..(391): Absent or Ser or Thr or Asn or Ala or Gly or Asp or Glu
  MISC_FEATURE (392)..(392): Absent or Gln or Leu or Ile or Val
  MISC_FEATURE (394)..(394): Absent or Asp or Glu or Arg or Thr or Ala or Asn or Ser
  MISC_FEATURE (396)..(396): Arg or Leu or Absent or Ala or Ser or Thr or Pro or Val or Ile
  MISC_FEATURE (397)..(397): Cys or Thr or Absent or Arg or Gln
  MISC_FEATURE (398)..(398): Ala or Glu or Absent or Gly or Cys or Ser
  MISC_FEATURE (399)..(399): Ala or Gln or Absent or Val or Ile or Leu
  MISC_FEATURE (400)..(400): Trp or Gln or Absent or Asn or His or Glu or Asp
  MISC_FEATURE (401)..(401): Leu or Val or Absent or Phe or Met or Tyr
  MISC_FEATURE (402)..(402): Val or Met or Leu or Absent or Ala or Ser
  MISC_FEATURE (403)..(403): Ala or Gly or Absent or Ser or Leu or Val or Ile
  MISC_FEATURE (404)..(404): Val or Ile or Absent or His or Ala or Gly or Ser
  MISC_FEATURE (405)..(405): Ala or Tyr or Asn or Thr or Absent or Ile or Gly
  MISC_FEATURE (406)..(406): Ala or Ser or Asn or Absent or Thr or Cys or Lys or Leu
  MISC_FEATURE (407)..(407): Thr or Leu or Absent or Ile or Glu or Ala or Met or Arg or His
  MISC_FEATURE (408)..(408): Arg or Gln or Absent or Ser or Leu or Phe or Met
  MISC_FEATURE (409)..(409): Arg or His or Gln or Absent or Ala
  MISC_FEATURE (410)..(410): Leu or Ser or Thr or Absent or Tyr or Val or Ile or Phe or Lys
  MISC_FEATURE (411)..(411): Asn or Ser or Absent or Gly or Ala or Arg or Gln
  MISC_FEATURE (412)..(412): Pro or Gln or Absent or Ala or Val or Leu or Ile
  MISC_FEATURE (413)..(413): His or Gln or Absent or Asn or Arg or Tyr
  MISC_FEATURE (414)..(414): Asn or Ala or Absent or Thr or Asp or Lys or Glu or Arg
  MISC_FEATURE (415)..(415): Val or Glu or Absent or Tyr or Phe or Trp or Leu
  MISC_FEATURE (416)..(416): Cys or Glu or Asp or Absent or Ile or Gly or Ser
  MISC_FEATURE (417)..(417): Absent or Ala or Trp or Arg or Lys or Asn or Gln or Glu
  MISC_FEATURE (418)..(418): Absent or Leu or Arg or Ile or Glu or Asn or Ala
  MISC_FEATURE (419)..(419): Absent or Tyr or Ser or Asp or Lys or Glu or Arg or Phe
  MISC_FEATURE (420)..(420): Absent or Gln or Lys or Asp or His or Glu
  MISC_FEATURE (421)..(421): Absent or Gly or Ala or Asn or Glu
  MISC_FEATURE (422)..(422): Absent or Leu or Met or Arg or Ala or Asp or Thr or Val or Gln or Ser
  MISC_FEATURE (423)..(423): Absent or Glu or His or any naturally occurring amino acid or Ala or Gly or Thr or Lys or Arg
  MISC_FEATURE (424)..(424): Absent or Gln or Ala or Val or Ser or His or Gly or Phe
  MISC_FEATURE (425)..(425): Absent or Leu or Ser or Thr or Ala or Arg or Gly
  MISC_FEATURE (426)..(426): Absent or Gln or Gly or Ser or Glu or Thr or Asn or Cys or Asp
  MISC_FEATURE (427)..(427): Absent or Gln or Met or Pro or Val or Ala
  MISC_FEATURE (428)..(428): Absent or Ser or Glu or Pro or Ala or Ile or His or Gln or Asn
  MISC_FEATURE (429)..(429): Absent or Leu or Val or Pro or Arg or Ile or Ala
  MISC_FEATURE (430)..(430): Absent or Met or Ala or Leu or Pro or Arg or Tyr or Gly
  MISC_FEATURE (431)..(431): Absent or Asp or Glu or Ser or Arg or Tyr or Gly
  MISC_FEATURE (432)..(432): Absent or Thr or Tyr or Arg or Ser or Glu or Leu or Gln
  MISC_FEATURE (433)..(433): Absent or Ile or Leu or Arg or His or Ser or Gly
  MISC_FEATURE (434)..(434): Absent or Ala or Ser or His or Pro
  MISC_FEATURE (435)..(435): Absent or Gly or Thr or Ser or Asp or His or Asn or Arg or Pro
  MISC_FEATURE (436)..(436): Absent or Gly or Asp or His or Ser or Asn or Leu or Thr
  MISC_FEATURE (437)..(437): Absent or Ala or His or Arg or Gln or Val or Pro or Gly or Asp
  MISC_FEATURE (438)..(438): Absent or Pro or Ala or Trp or Leu or Ile or Gln or Asn
  MISC_FEATURE (439)..(439): Absent or Ser or Ala or Asp or Arg or Phe or Pro or His or Thr or Ile
  MISC_FEATURE (440)..(440): Absent or Ser or Ala or Leu or Arg or Val or Trp
  MISC_FEATURE (441)..(441): Absent or Ser or Leu or Gly or Pro or Arg or Glu
  MISC_FEATURE (442)..(442): Absent or Gly or Ala or Arg or Pro or Ile
  MISC_FEATURE (443)..(443): Absent or Ser or Arg or Glu or Ala
  MISC_FEATURE (444)..(444): Absent or Ser or Arg or His or Thr
  MISC_FEATURE (445)..(445): Absent or Gly or Asp or Met or Gln
  MISC_FEATURE (446)..(446): Absent or Pro or Asn or Gln or Lys or Gly
  MISC_FEATURE (447)..(447): Absent or Leu or Val or Pro or Gly or Asp
  MISC_FEATURE (448)..(448): Absent or Val or Ala or Leu
  MISC_FEATURE (449)..(449): Absent or Asp or Asn or Val or Pro or Lys
  MISC_FEATURE (450)..(450): Absent or Gly or Tyr or Asp or Phe or Lys
  MISC_FEATURE (451)..(451): Absent or Met or Val or Leu
  MISC_FEATURE (452)..(452): Absent or Gln or Gly or Cys or Ala or Arg
  MISC_FEATURE (453)..(453): Absent or Gln or Val or Leu or Glu
  MISC_FEATURE (454)..(454): Absent or Met or Arg or Ala
  MISC_FEATURE (455)..(455): Absent or Ala or Val or Cys or Leu
  MISC_FEATURE (456)..(456): Absent or Val or Met or Leu or Ser or Asp
  MISC_FEATURE (457)..(457): Absent or Ala or Met
  MISC_FEATURE (458)..(458): Absent or Leu or Met or Cys
  MISC_FEATURE (459)..(459): Absent or Ala or Gly or Pro
  MISC_FEATURE (460)..(460): Absent or Lys or Asp
  MISC_FEATURE (461)..(461): Absent or Ile or Leu or Pro
  MISC_FEATURE (462)..(462): Absent or Ser or Gly
  MISC_FEATURE (463)..(463): Absent or Asn or Thr or Ser
  MISC_FEATURE (464)..(464): Absent or Leu or Thr
  MISC_FEATURE (465)..(465): Absent or Glu or Asp
  MISC_FEATURE (466)..(466): Absent or Gly or Tyr
  MISC_FEATURE (467)..(467): Absent or Phe or Glu
  MISC_FEATURE (468)..(468): Absent or Val or Ile or Gly
  MISC_FEATURE (469)..(469): Absent or Arg
  MISC_FEATURE (470)..(470): Absent or Gln or Thr
  MISC_FEATURE (471)..(471): Absent or Ala or Pro
  MISC_FEATURE (472)..(472): Absent or Asp or Leu
  MISC_FEATURE (473)..(473): Absent or Asn or His
  MISC_FEATURE (474)..(474): Absent or Leu
  MISC_FEATURE (475)..(475): Absent or Arg or Ala
  MISC_FEATURE (476)..(476): Absent or Gln or Ala
  MISC_FEATURE (477)..(477): Absent or Gln or Gly
  MISC_FEATURE (478)..(478): Absent or Thr or Lys
  MISC_FEATURE (479)..(479): Absent or Leu or Gly
  MISC_FEATURE (480)..(480): Absent or His or Gln
  MISC_FEATURE (481)..(481): Absent or Gln or Ser
  MISC_FEATURE (482)..(482): Absent or Leu or Met or Glu
  MISC_FEATURE (483)..(483): Absent or Arg or His or Cys
  MISC_FEATURE (484)..(484): Absent or Arg or Val
  MISC_FEATURE (485)..(485): Absent or Ile or Ala
  MISC_FEATURE (486)..(486): Absent or Leu
  MISC_FEATURE (487)..(487): Absent or Thr or His or Leu
  MISC_FEATURE (488)..(488): Absent or Val or Ser or Thr
  MISC_FEATURE (489)..(489): Absent or Arg or Glu
  MISC_FEATURE (490)..(490): Absent or Gln or Ala or Arg
  MISC_FEATURE (491)..(491): Absent or Ala or Ser or Gly
  MISC_FEATURE (492)..(492): Absent or Ala
  MISC_FEATURE (493)..(493): Absent or Arg or Glu
  MISC_FEATURE (494)..(494): Absent or Cys or Ala or Ile
  MISC_FEATURE (495)..(495): Absent or Phe or Leu or Asn
  MISC_FEATURE (496)..(496): Absent or Leu or Ile
  MISC_FEATURE (497)..(497): Absent or Val or Ala or Lys
  MISC_FEATURE (498)..(498): Absent or Ile or Asp
  MISC_FEATURE (499)..(499): Absent or Ala or His or Asn
  MISC_FEATURE (500)..(500): Absent or Glu or Asp
  MISC_FEATURE (501)..(501): Absent or Tyr or Gly
  MISC_FEATURE (502)..(502): Absent or Tyr or Phe or Val
  MISC_FEATURE (503)..(503): Absent or Ala or Asp or Ser or Thr
  MISC_FEATURE (504)..(504): Absent or Arg or Pro
  MISC_FEATURE (505)..(505): Absent or Leu
  MISC_FEATURE (506)..(506): Absent or Arg or Thr or Leu
  MISC_FEATURE (507)..(507): Absent or Ala or Ile or Glu
  MISC_FEATURE (508)..(508): Absent or Leu or Cys or Ala
  MISC_FEATURE (509)..(509): Absent or Ser or Ala or Leu
  MISC_FEATURE (510)..(510): Absent or Ser or Lys
  MISC_FEATURE (511)..(511): Absent or Leu or Arg or Gly
  MISC_FEATURE (512)..(512): Absent or Trp or Leu or Gly
  MISC_FEATURE (513)..(513): Absent or Ala or Tyr or Leu or His
  MISC_FEATURE (514)..(514): Absent or Thr or Asn or Ala or Asp
  MISC_FEATURE (515)..(515): Absent or Arg or Lys or Trp
  MISC_FEATURE (516)..(516): Absent or Pro or Cys or Thr
  MISC_FEATURE (517)..(517): Absent or Arg or Thr or Ala
  MISC_FEATURE (518)..(518): Absent or Glu or Asp or Lys
  MISC_FEATURE (519)..(519): Absent or Tyr or Ile
  MISC_FEATURE (520)..(520): Absent or Leu
  MISC_FEATURE (521)..(521): Absent or Arg
  MISC_FEATURE (522)..(522): Absent or Asn
  MISC_FEATURE (523)..(523): Absent or Asn
  MISC_FEATURE (524)..(524): Absent or Gly
  MISC_FEATURE (525)..(525): Absent or Ala
  MISC_FEATURE (526)..(526): Absent or Lys
  MISC_FEATURE (527)..(527): Absent or Pro
  MISC_FEATURE (528)..(528): Absent or Asp
  MISC_FEATURE (529)..(529): Absent or Val
  MISC_FEATURE (530)..(530): Absent or Lys
  MISC_FEATURE (531)..(531): Absent or Asp
  MISC_FEATURE (532)..(532): Absent or Ala
  MISC_FEATURE (533)..(533): Absent or Gly
  MISC_FEATURE (534)..(534): Absent or Asn
  MISC_FEATURE (535)..(535): Absent or Glu
  MISC_FEATURE (536)..(536): Absent or Leu
  MISC_FEATURE (537)..(537): Absent or Cys
  MISC_FEATURE (538)..(538): Absent or Lys
  MISC_FEATURE (539)..(539): Absent or Ala
  MISC_FEATURE (540)..(540): Absent or Ala
  MISC_FEATURE (541)..(541): Absent or Ala
  MISC_FEATURE (542)..(542): Absent or Cys
  MISC_FEATURE (543)..(543): Absent or Gly
  MISC_FEATURE (544)..(544): Absent or Asp
  MISC_FEATURE (545)..(545): Absent or Met
  MISC_FEATURE (546)..(546): Absent or Glu
  MISC_FEATURE (547)..(547): Absent or Phe
  MISC_FEATURE (548)..(548): Absent or Val
  MISC_FEATURE (549)..(549): Absent or Glu
  MISC_FEATURE (550)..(550): Absent or Arg
  MISC_FEATURE (551)..(551): Absent or Leu
  MISC_FEATURE (552)..(552): Absent or Val
  MISC_FEATURE (553)..(553): Absent or Lys
  MISC_FEATURE (554)..(554): Absent or Ala
  MISC_FEATURE (555)..(555): Absent or Gly
  MISC_FEATURE (556)..(556): Absent or Val
  MISC_FEATURE (557)..(557): Absent or Asp
  MISC_FEATURE (558)..(558): Absent or Pro
  MISC_FEATURE (559)..(559): Absent or Asn
  MISC_FEATURE (560)..(560): Absent or Glu
  MISC_FEATURE (561)..(561): Absent or Thr
  MISC_FEATURE (562)..(562): Absent or Asp
  MISC_FEATURE (563)..(563): Absent or Tyr
  MISC_FEATURE (564)..(564): Absent or Ser
  MISC_FEATURE (565)..(565): Absent or Gln
  MISC_FEATURE (566)..(566): Absent or Arg
  MISC_FEATURE (567)..(567): Absent or Thr
  MISC_FEATURE (568)..(568): Absent or Pro
  MISC_FEATURE (569)..(569): Absent or Leu
  MISC_FEATURE (570)..(570): Absent or His
  MISC_FEATURE (571)..(571): Absent or Ile
  MISC_FEATURE (572)..(572): Absent or Val
  MISC_FEATURE (573)..(573): Absent or Ala
  MISC_FEATURE (574)..(574): Absent or Ala
  MISC_FEATURE (575)..(575): Absent or Asp
  MISC_FEATURE (576)..(576): Absent or Gly
  MISC_FEATURE (577)..(577): Absent or Thr
  MISC_FEATURE (578)..(578): Absent or Ala
  MISC_FEATURE (579)..(579): Absent or Lys
  MISC_FEATURE (580)..(580): Absent or Asp
  MISC_FEATURE (581)..(581): Absent or Ala
  MISC_FEATURE (582)..(582): Absent or Glu
  MISC_FEATURE (583)..(583): Absent or Phe
  MISC_FEATURE (584)..(584): Absent or Leu
  MISC_FEATURE (585)..(585): Absent or Val
  MISC_FEATURE (586)..(586): Absent or His
  MISC_FEATURE (587)..(587): Absent or Lys
  MISC_FEATURE (588)..(588): Absent or Gly
  MISC_FEATURE (589)..(589): Absent or Ala
  MISC_FEATURE (590)..(590): Absent or Asp
  MISC_FEATURE (591)..(591): Absent or Val
  MISC_FEATURE (592)..(592): Absent or Phe
  MISC_FEATURE (593)..(593): Absent or Ala
  MISC_FEATURE (594)..(594): Absent or Lys
  MISC_FEATURE (595)..(595): Absent or Asp
  MISC_FEATURE (596)..(596): Absent or Arg
  MISC_FEATURE (597)..(597): Absent or Tyr
  MISC_FEATURE (598)..(598): Absent or Ala
  MISC_FEATURE (599)..(599): Absent or Leu
  MISC_FEATURE (600)..(600): Absent or Asn
  MISC_FEATURE (601)..(601): Absent or Phe
  MISC_FEATURE (602)..(602): Absent or Pro
  MISC_FEATURE (603)..(603): Absent or Tyr
  MISC_FEATURE (604)..(604): Absent or Phe
  MISC_FEATURE (605)..(605): Absent or Ser
  MISC_FEATURE (606)..(606): Absent or Thr
  MISC_FEATURE (607)..(607): Absent or Arg
  MISC_FEATURE (608)..(608): Absent or Leu
  MISC_FEATURE (609)..(609): Absent or Asn
  MISC_FEATURE (610)..(610): Absent or Glu
  MISC_FEATURE (611)..(611): Absent or His
  MISC_FEATURE (612)..(612): Absent or Ser
  MISC_FEATURE (613)..(613): Absent or Leu
  MISC_FEATURE (614)..(614): Absent or Glu
  MISC_FEATURE (615)..(615): Absent or Ile
  MISC_FEATURE (616)..(616): Absent or Ala
  MISC_FEATURE (617)..(617): Absent or Lys
  MISC_FEATURE (618)..(618): Absent or Ile
  MISC_FEATURE (619)..(619): Absent or Met
  MISC_FEATURE (620)..(620): Absent or Leu
  MISC_FEATURE (621)..(621): Absent or Ser
  MISC_FEATURE (622)..(622): Absent or Cys
  MISC_FEATURE (623)..(623): Absent or Ser
  MISC_FEATURE (624)..(624): Absent or His
  MISC_FEATURE (625)..(625): Absent or Gly
  MISC_FEATURE (626)..(626): Absent or Tyr
  MISC_FEATURE (627)..(627): Absent or Thr
  MISC_FEATURE (628)..(628): Absent or Pro
  MISC_FEATURE (629)..(629): Absent or Leu
  MISC_FEATURE (630)..(630): Absent or Asp
  MISC_FEATURE (631)..(631): Absent or Glu
  MISC_FEATURE (632)..(632): Absent or Ala
  MISC_FEATURE (633)..(633): Absent or Gln
  MISC_FEATURE (634)..(634): Absent or Gly
  MISC_FEATURE (635)..(635): Absent or Ser
  MISC_FEATURE (636)..(636): Absent or Asp
  MISC_FEATURE (637)..(637): Absent or Asn
  MISC_FEATURE (638)..(638): Absent or Lys
  MISC_FEATURE (639)..(639): Absent or Ala
  MISC_FEATURE (640)..(640): Absent or Thr
  MISC_FEATURE (641)..(641): Absent or Leu
  MISC_FEATURE (642)..(642): Absent or Arg
  MISC_FEATURE (643)..(643): Absent or Val
  MISC_FEATURE (644)..(644): Absent or Leu
  MISC_FEATURE (645)..(645): Absent or Glu
  MISC_FEATURE (646)..(646): Absent or Ala
  MISC_FEATURE (647)..(647): Absent or Ala
  MISC_FEATURE (648)..(648): Absent or Val
  MISC_FEATURE (649)..(649): Absent or Ala
  MISC_FEATURE (650)..(650): Absent or Leu
  MISC_FEATURE (651)..(651): Absent or Arg
  MISC_FEATURE (652)..(652): Absent or Gln
  MISC_FEATURE (653)..(653): Absent or Gln
  MISC_FEATURE (654)..(654): Absent or Gln
  MISC_FEATURE (655)..(655): Absent or Leu
  MISC_FEATURE (656)..(656): Absent or Asp
  MISC_FEATURE (657)..(657): Absent or Asp
  MISC_FEATURE (658)..(658): Absent or Glu
  MISC_FEATURE (659)..(659): Absent or Glu
  MISC_FEATURE (660)..(660): Absent or Asp
  MISC_FEATURE (661)..(661): Absent or Tyr
  MISC_FEATURE (662)..(662): Absent or Ser
  MISC_FEATURE (663)..(663): Absent or Thr
  MISC_FEATURE (664)..(664): Absent or Ser
  MISC_FEATURE (665)..(665): Absent or Asp
  MISC_FEATURE (666)..(666): Absent or Asp
  MISC_FEATURE (667)..(667): Absent or Asn
  MISC_FEATURE (668)..(668): Absent or Ser
  MISC_FEATURE (669)..(669): Absent or Ser
  MISC_FEATURE (670)..(670): Absent or Ser
  MISC_FEATURE (671)..(671): Absent or Ser
  MISC_FEATURE (672)..(672): Absent or Pro
  MISC_FEATURE (673)..(673): Absent or Leu
  MISC_FEATURE (674)..(674): Absent or Asp
  MISC_FEATURE (675)..(675): Absent or Asp
  MISC_FEATURE (676)..(676): Absent or Ala
  MISC_FEATURE (677)..(677): Absent or Gln
  MISC_FEATURE (678)..(678): Absent or Cys
  MISC_FEATURE (679)..(679): Absent or Asp
  MISC_FEATURE (680)..(680): Absent or Ser
  MISC_FEATURE (681)..(681): Absent or Asp
  MISC_FEATURE (682)..(682): Absent or Met
  MISC_FEATURE (683)..(683): Absent or Glu
  MISC_FEATURE (684)..(684): Absent or Leu
  MISC_FEATURE (685)..(685): Absent or Thr
  MISC_FEATURE (686)..(686): Absent or Glu
  MISC_FEATURE (687)..(687): Absent or Gly
  MISC_FEATURE (688)..(688): Absent or Asp
  MISC_FEATURE (689)..(689): Absent or Gln
  MISC_FEATURE (690)..(690): Absent or Trp
  MISC_FEATURE (691)..(691): Absent or Ser
  MISC_FEATURE (692)..(692): Absent or Met
  MISC_FEATURE (693)..(693): Absent or Cys
XXXXXXXXXXXXXXXXXXXXXXXXXXXXXXXXXXXXXXXXXXXXXXXXXXXXXXXXXXXXXXXXXXXXXXXXXXXXXXXXXXXXXXXXXXXXXXXXXXXXXXXXXXXXXXXXXXXXXXXXXXXXXXXXXXXXXXXXXXXXXXXXXXXXXXXXXXXXXXXXXXXXXXXXXXXXXXXXXXXXXXXXXXXXXXXXDXXXXXXXXWXXXXEXXXXWXXGXXPXXXXXXXXXXXXXXXXXXXXXXXXXXXXXXXXXXXXXXXXXXXXXXQXXXXXXLXXXXXXXEXXXXXXXXXXXXXXXXXXXXXXXXXQXXXXXXXXXXXXXXXXXXXXXXXXXXXXXXXXXXXXXXXXXXXXXXXXXXXXXXXXXXXXXXXXXRXXXXAXXXRXXXXXXXXXXXLXPXXXXXXXXXXXXXXXXXXXXXXXXXXXXXXXXXXXXXXXXXXXXXXXXXXXXXXXXXXXXXXXXXXXXXXXXXXXXXXXXXXXXXXXXXXXXXXXXXXXXXXXXXXXXXXXXXXXXXXXXXXXXXXXXXXXXXXXXXXXXXXXXXXXXXXXXXXXXXXXXXXXXXXXXXXXXXXXXXXXXXXXXXXXXXXXXXXXXXXXXXXXXXXXXXXXXXXXXXXXXXXXXXXXXXXXXXXXXXXXXXXXXXXXXXXXXXXXXXXXXXXXXXXXXXXXXXXXXXXXXXXXXXXXXXXXXXXXXXX

SEQ ID NO: 17383 - protein, 906 aa, Artificial
  Consensus Sequence of SEQ ID NO 136 and its homologs
  MISC_FEATURE (1)..(1): Absent or Pro
  MISC_FEATURE (2)..(2): Absent or Ser
  MISC_FEATURE (3)..(3): Absent or Glu
  MISC_FEATURE (4)..(4): Absent or Phe
  MISC_FEATURE (5)..(5): Absent or Cys
  MISC_FEATURE (6)..(6): Absent or Ser
  MISC_FEATURE (7)..(7): Absent or Ser
  MISC_FEATURE (8)..(8): Absent or Ser
  MISC_FEATURE (9)..(9): Absent or Ser
  MISC_FEATURE (10)..(10): Absent or Gly
  MISC_FEATURE (11)..(11): Absent or Ser
  MISC_FEATURE (12)..(12): Absent or Ser
  MISC_FEATURE (13)..(13): Absent or Met or Arg
  MISC_FEATURE (14)..(14): Absent or Met or Gln or Cys
  MISC_FEATURE (15)..(15): Absent or Asp or Ala
  MISC_FEATURE (16)..(16): Absent or Met or Ser or Cys
  MISC_FEATURE (17)..(17): Absent or Asp or Ser or Cys or Gln or Val
  MISC_FEATURE (18)..(18): Absent or Gln or Gly or Ser or Ile or Leu
  MISC_FEATURE (19)..(19): Absent or Ala or Thr or Ser or Phe or Gly
  MISC_FEATURE (20)..(20): Absent or Ala or Asp or Ser or Phe or Glu
  MISC_FEATURE (21)..(21): Absent or Ser or Lys or Glu or Arg
  MISC_FEATURE (22)..(22): Absent or Gly or Ala or Met or Lys or Glu
  MISC_FEATURE (23)..(23): Absent or Lys or Glu or Asp
  MISC_FEATURE (24)..(24): Absent or Ala or Glu or Asp or Asn
  MISC_FEATURE (25)..(25): Absent or Met or Leu or Val or Pro
  MISC_FEATURE (26)..(26): Absent or Pro or His or Leu or Val
  MISC_FEATURE (27)..(27): Absent or Leu or Val or Gly or Cys
  MISC_FEATURE (28)..(28): Absent or Ile or Gly or Arg
  MISC_FEATURE (29)..(29): Absent or Pro or Leu or Ile or Met
  MISC_FEATURE (30)..(30): Absent or Ser or Asp
  MISC_FEATURE (31)..(31): Absent or Glu or Pro or Ala
  MISC_FEATURE (32)..(32): Absent or Lys or Thr or Ala or Met or Leu
  MISC_FEATURE (33)..(33): Absent or Ser or Thr or Met or Ala
  MISC_FEATURE (34)..(34): Absent or Asp or Glu or Ser or Pro
  MISC_FEATURE (35)..(35): Absent or Pro or Glu
  MISC_FEATURE (36)..(36): Absent or Asn or Glu or Thr
  MISC_FEATURE (37)..(37): Absent or Ser or Tyr or Phe
  MISC_FEATURE (38)..(38): Absent or Glu or Ala
  MISC_FEATURE (39)..(39): Ala or Val or Thr or Absent or Ser
  MISC_FEATURE (40)..(40): Glu or Gln or Absent
  MISC_FEATURE (42)..(42): Glu or Lys or Absent
  MISC_FEATURE (45)..(45): His or Gln or Absent or Lys
  MISC_FEATURE (46)..(46): Ser or Ala or Glu or Absent
  MISC_FEATURE (47)..(47): Leu or Phe or Absent
  MISC_FEATURE (48)..(48): Tyr or Ile or Absent or Thr
  MISC_FEATURE (49)..(49): Ala or Asn or Absent or Ser
  MISC_FEATURE (50)..(50): Ile or Absent or Val or Ala
  MISC_FEATURE (51)..(51): Pro or Absent or Ala
  MISC_FEATURE (53)..(53): Ile or Leu or Absent
  MISC_FEATURE (54)..(54): Asp or Absent or Glu
  MISC_FEATURE (55)..(55): Lys or Absent or Ser or Gly
  MISC_FEATURE (57)..(57): Trp or Absent or Ser or Phe
  MISC_FEATURE (58)..(58): Ala or Thr or Ile or Absent or Leu or Val
  MISC_FEATURE (59)..(59): Ile or Phe or Absent or Leu
  MISC_FEATURE (60)..(60): Pro or Asn or Absent or Lys or Gln
  MISC_FEATURE (61)..(61): Ser or Absent or Arg or Thr
  MISC_FEATURE (62)..(62): Cys or Arg or Absent
  MISC_FEATURE (63)..(63): Gln or Lys or Asp or Absent or Asn
  MISC_FEATURE (64)..(64): Gly or Glu or Ser or Absent or Asn or Asp
  MISC_FEATURE (65)..(65): Gly or Glu or Absent
  MISC_FEATURE (66)..(66): Ala or Gly or Absent or Lys or Asp
  MISC_FEATURE (67)..(67): Gly or Absent or Arg
  MISC_FEATURE (68)..(68): Phe or Ser or Absent
  MISC_FEATURE (69)..(69): Asp or Gln or Absent or Thr or Arg
  MISC_FEATURE (70)..(70): Val or Ala or Absent
  MISC_FEATURE (71)..(71): Val or Ala or Met or Absent
  MISC_FEATURE (72)..(72): Val or Phe or Absent or Tyr
  MISC_FEATURE (73)..(73): Ala or Absent or Ser
  MISC_FEATURE (74)..(74): Met or Leu or Absent or Ile
  MISC_FEATURE (77)..(77): Val or Ala or Absent or Thr or Pro
  MISC_FEATURE (78)..(78): Asn or Absent or Asp
  MISC_FEATURE (80)..(80): Pro or Leu or Absent
  MISC_FEATURE (83)..(83): Ala or Lys or Absent or Asn or Thr
  MISC_FEATURE (84)..(84): Lys or Absent or Arg or Asn
  MISC_FEATURE (85)..(85): Arg or Lys or Absent
  MISC_FEATURE (86)..(86): Thr or Lys or Absent
  MISC_FEATURE (87)..(87): Phe or Absent or Gln or Tyr
  MISC_FEATURE (88)..(88): Leu or Met or Absent or Ile or Val
  MISC_FEATURE (89)..(89): Ser or Leu or Absent
  MISC_FEATURE (90)..(90): Thr or Ser or Absent or His or Phe or Tyr
  MISC_FEATURE (91)..(91): Val or Gly or Absent or Ala or Ser
  MISC_FEATURE (92)..(92): Tyr or His or Absent
  MISC_FEATURE (94)..(94): Pro or Ala or Ser or Absent or Val or Met or Thr
  MISC_FEATURE (95)..(95): Glu or Asn or Absent or Lys or Thr or Arg
  MISC_FEATURE (96)..(96): Thr or Glu or Absent or His or Asn or Arg
  MISC_FEATURE (97)..(97): Ser or Ala or Absent or Gly
  MISC_FEATURE (98)..(98): Ser or Asp or Absent or Gly
  MISC_FEATURE (99)..(99): Absent or Thr
  MISC_FEATURE (100)..(100): Absent or Gly
  MISC_FEATURE (101)..(101): Absent or Thr
  MISC_FEATURE (102)..(102): Absent or Gly
  MISC_FEATURE (103)..(103): Ala or Asp or Asn or Absent or Thr
  MISC_FEATURE (104)..(104): Thr or Gln or Absent or His or Met or Asn
  MISC_FEATURE (105)..(105): Ile or Ser or Absent or Pro or Leu
  MISC_FEATURE (106)..(106): Thr or Val or Absent or Leu or Pro
  MISC_FEATURE (107)..(107): Asp or Asn or Absent or Glu
  MISC_FEATURE (108)..(108): Tyr or Phe or Absent or Cys
  MISC_FEATURE (109)..(109): His or Absent or Gln or Lys
  MISC_FEATURE (111)..(111): Ser or Ala or Absent
  MISC_FEATURE (115)..(115): Phe or Ile or Absent or Thr
  MISC_FEATURE (116)..(116): Glu or Absent or Gln
  MISC_FEATURE (117)..(117): Ile or Val or Met or Absent or Thr
  MISC_FEATURE (118)..(118): Ser or Thr or Absent or Met or Asp
  MISC_FEATURE (120)..(120): Ala or Absent or Val
  MISC_FEATURE (122)..(122): Leu or Ala or Absent or Thr
  MISC_FEATURE (123)..(123): Ile or Phe or Absent or Met or Val or Thr
  MISC_FEATURE (130)..(130): Ala or Leu or Absent or Ser
  MISC_FEATURE (132)..(132): Val or Leu or Absent
  MISC_FEATURE (134)..(134): Ile or Val or Absent
  MISC_FEATURE (135)..(135): Ile or Absent or Val
  MISC_FEATURE (138)..(138): Pro or Absent or Gly
  MISC_FEATURE (139)..(139): Lys or Glu or Absent
  MISC_FEATURE (140)..(140): Asp or Asn or Absent or Lys or Arg
  MISC_FEATURE (141)..(141): Ser or Ala or Absent
  MISC_FEATURE (142)..(142): Thr or Glu or Absent or Gly
  MISC_FEATURE (143)..(143): Ser or Absent or Cys
  MISC_FEATURE (144)..(144): Pro or Absent or Arg
  MISC_FEATURE (146)..(146): Asn or Arg or Lys or Absent or Gln or Thr
  MISC_FEATURE (147)..(147): Leu or Phe or Absent
  MISC_FEATURE (148)..(148): Glu or Gln or Absent
  MISC_FEATURE (150)..(150): Trp or Absent or Val
  MISC_FEATURE (151)..(151): Gly or Asn or Absent or Asp or Cys
  MISC_FEATURE (152)..(152): Pro or Ser or Absent or Gln
  MISC_FEATURE (153)..(153): Gly or Ser or Absent
  MISC_FEATURE (154)..(154): Gln or Absent or His
  MISC_FEATURE (155)..(155): Leu or Absent or Val
  MISC_FEATURE (156)..(156): Leu or Glu or Absent
  MISC_FEATURE (157)..(157): Arg or Lys or Absent
  MISC_FEATURE (159)..(159): Ile or Phe or Absent
  MISC_FEATURE (160)..(160): Phe or Tyr or His or Absent or Asn
  MISC_FEATURE (161)..(161): Val or Ile or Absent
  MISC_FEATURE (162)..(162): Ala or Ser or Pro or Absent or Asp
  MISC_FEATURE (163)..(163): Ser or Gln or Absent or Gly
  MISC_FEATURE (164)..(164): Ser or Lys or Absent
  MISC_FEATURE (165)..(165): Val or Absent or Ile
  MISC_FEATURE (168)..(168): Ser or Absent or Pro or Ala
  MISC_FEATURE (169)..(169): Val or Ile or Absent or Leu
  MISC_FEATURE (171)..(171): Gly or Val or Absent or Thr
  MISC_FEATURE (173)..(173): Gly or Absent or Glu
  MISC_FEATURE (176)..(176): Glu or Absent or His
  MISC_FEATURE (178)..(178): Val or Ile or Absent
  MISC_FEATURE (181)..(181): Ser or Asp or Absent or Asn
  MISC_FEATURE (182)..(182): Gln or His or Ser or Absent
  MISC_FEATURE (183)..(183): Asn or His or Asp or Absent or Glu
  MISC_FEATURE (185)..(185): Glu or Thr or Absent
  MISC_FEATURE (186)..(186): Ser or Phe or His or Absent or Leu
  MISC_FEATURE (187)..(187): Ile or Val or Absent
  MISC_FEATURE (188)..(188): Ala or Ser or Absent
  MISC_FEATURE (190)..(190): Val or Absent or Ile
  MISC_FEATURE (193)..(193): Glu or Absent or Gln or Asp or Ala
  MISC_FEATURE (194)..(194): Pro or Absent or Ser
  MISC_FEATURE (195)..(195): Val or Ala or Ser or Absent or Pro
  MISC_FEATURE (196)..(196): Val or Asn or Arg or Absent or Pro or Gln or Glu or Thr
  MISC_FEATURE (197)..(197): Ser or Pro or Absent
  MISC_FEATURE (198)..(198): Arg or Lys or Absent
  MISC_FEATURE (200)..(200): Val or Thr or Absent or Ala
  MISC_FEATURE (201)..(201): Phe or Tyr or Absent
  MISC_FEATURE (202)..(202): Gly or Asp or Absent or Asn
  MISC_FEATURE (203)..(203): Gln or Pro or His or Absent or Gly or Asn or Asp or Arg
  MISC_FEATURE (204)..(204): Ser or Thr or Leu or Absent or Ala
  MISC_FEATURE (205)..(205): Ala or Gly or Absent
  MISC_FEATURE (206)..(206): Ser or Tyr or Absent
  MISC_FEATURE (207)..(207): Thr or Tyr or Absent or Arg
  MISC_FEATURE (208)..(208): Pro or Ser or Lys or Absent or Arg
  MISC_FEATURE (209)..(209): Gly or Lys or Absent or Glu
  MISC_FEATURE (210)..(210): Gln or Thr or Glu or Absent or Gly
  MISC_FEATURE (211)..(211): Asn or Absent or Asp or Gly
  MISC_FEATURE (212)..(212): Absent or Cys
  MISC_FEATURE (213)..(213): Ser or His or Absent or Gly
  MISC_FEATURE (214)..(214): Asn or Thr or Ser or Absent or Asp
  MISC_FEATURE (215)..(215): Ala or Gly or Leu or Absent or Ser
  MISC_FEATURE (216)..(216): Thr or Ala or Asp or Absent or Glu
  MISC_FEATURE (217)..(217): Leu or Pro or Lys or Absent or Glu or Gly
  MISC_FEATURE (218)..(218): Glu or Gly or Absent or Asp
  MISC_FEATURE (219)..(219): Ala or Ile or Absent or Ser or Cys
  MISC_FEATURE (220)..(220): Gly or Absent or Asn or Ser
  MISC_FEATURE (221)..(221): Asn or Ser or Absent or Ala
  MISC_FEATURE (223)..(223): Lys or Absent or Arg
  MISC_FEATURE (225)..(225): Gln or Glu or Absent or Leu
  MISC_FEATURE (227)..(227): Asp or Absent or Glu or Val
  MISC_FEATURE (229)..(229): Val or Tyr or Glu or Absent
  MISC_FEATURE (230)..(230): Glu or Absent or Arg
  MISC_FEATURE (231)..(231): Asp or Glu or Absent or His
  MISC_FEATURE (235)..(235): Ser or Cys or Ala or Absent or Thr
  MISC_FEATURE (237)..(237): Ser or Ala or Absent
  MISC_FEATURE (238)..(238): Absent or any naturally occurring amino acid
  MISC_FEATURE (239)..(239): Gly or Absent or Arg or Lys
  MISC_FEATURE (241)..(241): Arg or Absent or Gly
  MISC_FEATURE (242)..(242): Arg or Gln or Absent
  MISC_FEATURE (244)..(244): Val or Ala or Absent or Ser
  MISC_FEATURE (248)..(248): Ala or Ile or Absent or Leu
  MISC_FEATURE (249)..(249): Asn or Absent or Asp
  MISC_FEATURE (250)..(250): Val or Absent or Ile
  MISC_FEATURE (251)..(251): Ser or Gly or Asp or Absent or Glu or Ala or Asn or Pro
  MISC_FEATURE (252)..(252): Thr or Ser or Absent or Arg
  MISC_FEATURE (253)..(253): Gly or Absent or Glu
  MISC_FEATURE (254)..(254): Ala or Val or Glu or Absent
  MISC_FEATURE (256)..(256): Gln or Glu or Absent or His or Arg or Val
  MISC_FEATURE (257)..(257): Ala or Val or Pro or Absent
  MISC_FEATURE (258)..(258): Val or Ile or Absent or Ala
  MISC_FEATURE (259)..(259): Glu or Lys or Absent or Arg
  MISC_FEATURE (260)..(260): Gly or Absent or Asp
  MISC_FEATURE (261)..(261): Ile or Absent or Val
  MISC_FEATURE (262)..(262): Ser or Pro or Absent or Thr or Leu
  MISC_FEATURE (263)..(263): Arg or Absent or Lys or Thr
  MISC_FEATURE (264)..(264): Asp or Ser or Absent
  MISC_FEATURE (265)..(265): Ile or Leu or Absent or Met
  MISC_FEATURE (267)..(267): Ala or Val or Absent or Ile
  MISC_FEATURE (271)..(271): Val or Absent or Ile
  MISC_FEATURE (273)..(273): Ala or Val or Ser or Absent
  MISC_FEATURE (275)..(275): Gln or Glu or Asn or Absent or Leu or Pro
  MISC_FEATURE (276)..(276): Pro or Val or Ser or Absent or Ala
  MISC_FEATURE (277)..(277): Ala or Val or Asn or Absent or Glu or Ser or Pro
  MISC_FEATURE (278)..(278): Ser or Absent or Cys or Gly
  MISC_FEATURE (279)..(279): Absent or Ser
  MISC_FEATURE (280)..(280): Absent or Asp
  MISC_FEATURE (281)..(281): Pro or Absent
  MISC_FEATURE (282)..(282): Asp or Thr or Gly or Absent
  MISC_FEATURE (283)..(283): Gly or Ser or Absent or Phe or His or Arg
  MISC_FEATURE (284)..(284): Pro or Ala or Absent or Ser or Gln or His
  MISC_FEATURE (285)..(285): Gln or Leu or Absent or Lys
  MISC_FEATURE (286)..(286): Ser or Tyr or Absent or Leu
  MISC_FEATURE (288)..(288): Val or Absent or Ile
  MISC_FEATURE (290)..(290): Val or Ala or Absent
  MISC_FEATURE (293)..(293): Ser or Leu or Absent
  MISC_FEATURE (294)..(294): Ser or Absent or Glu
  MISC_FEATURE (295)..(295): Tyr or Phe or Absent or His or Arg
  MISC_FEATURE (296)..(296): Ala or Absent or Asn
  MISC_FEATURE (297)..(297): Glu or Asp or Absent or Gly
  MISC_FEATURE (298)..(298): Asn or Absent or Phe
  MISC_FEATURE (299)..(299): Absent or Phe
  MISC_FEATURE (300)..(300): Phe or Absent or Gln
  MISC_FEATURE (301)..(301): Ser or Gly or Absent or Asn
  MISC_FEATURE (302)..(302): Thr or Asp or Absent or Glu
  MISC_FEATURE (303)..(303): Pro or Lys or Absent or Thr or Ala
  MISC_FEATURE (304)..(304): Arg or Absent or Lys
  MISC_FEATURE (306)..(306): Leu or Phe or Absent
  MISC_FEATURE (307)..(307): Gly or Absent or Arg
  MISC_FEATURE (308)..(308): Met or Ile or Absent or any naturally occurring amino acid
  MISC_FEATURE (310)..(310): Tyr or His or Absent
  MISC_FEATURE (312)..(312): Phe or Tyr or Absent or Ser
  MISC_FEATURE (317)..(317): His or Ala or Absent or Ser
  MISC_FEATURE (318)..(318): Leu or Ile or Absent
  MISC_FEATURE (320)..(320): His or Ala or Absent or Ser
  MISC_FEATURE (321)..(321): Val or Ile or Absent or Thr or Ala
  MISC_FEATURE (322)..(322): Glu or Lys or Absent or Arg or His or Leu or Pro
  MISC_FEATURE (323)..(323): Ala or Phe or Absent or Ser or Cys or Arg
  MISC_FEATURE (324)..(324): Pro or Thr or Absent
  MISC_FEATURE (325)..(325): Val or Ser or Absent or Phe or Ile
  MISC_FEATURE (326)..(326): Pro or Asp or Absent or Cys or Glu or Gln
  MISC_FEATURE (327)..(327): Asp or Gly or Glu or Absent
  MISC_FEATURE (328)..(328): Arg or Thr or Pro or Absent or Ser or Glu
  MISC_FEATURE (329)..(329): Glu or Lys or Absent or Pro or Ser
  MISC_FEATURE (330)..(330): Pro or Asp or Absent or Ala or Asn
  MISC_FEATURE (331)..(331): Ser or Asp or Absent or Asn or Ala or Val or any naturally occurring amino acid or Pro
  MISC_FEATURE (332)..(332): Asp or Asn or Absent or Glu or Gly
  MISC_FEATURE (333)..(333): Ala or Absent or Leu or Asn or His
  MISC_FEATURE (334)..(334): Pro or Ala or Absent or Gln
  MISC_FEATURE (335)..(335): Arg or Pro or Absent or Ser
  MISC_FEATURE (336)..(336): Absent or Asn or Ala
  MISC_FEATURE (337)..(337): Absent or Asn or Ser or Thr
  MISC_FEATURE (338)..(338): Absent or Val or Gly or Asp or Thr
  MISC_FEATURE (339)..(339): Absent or Ala or Asn or Ser
  MISC_FEATURE (340)..(340): Absent or Asn or Glu or Lys or Ser
  MISC_FEATURE (341)..(341): Absent or Glu or Asp or Ser or Leu
  MISC_FEATURE (342)..(342): Absent or Phe or Ser or Val or Glu or Gly
  MISC_FEATURE (343)..(343): Absent or Pro or Thr or Lys
  MISC_FEATURE (344)..(344): Absent or Ile or Val or Ala or Ser
  MISC_FEATURE (345)..(345): Absent or His or Val or Ser or Gly
  MISC_FEATURE (346)..(346): Absent or Ser
  MISC_FEATURE (347)..(347): Absent or Gly
  MISC_FEATURE (348)..(348): Absent or Gly
  MISC_FEATURE (349)..(349): Absent or Ala
  MISC_FEATURE (350)..(350): Glu or Val or Absent
  MISC_FEATURE (351)..(351): Ala or Absent
  MISC_FEATURE (352)..(352): Thr or Val or Absent or Ile or Arg
  MISC_FEATURE (353)..(353): Asn or Lys or Absent
  MISC_FEATURE (356)..(356): Glu or Gly or Lys or Absent or Gln or Pro
  MISC_FEATURE (357)..(357): Gly or Thr or Ser or Absent
  MISC_FEATURE (358)..(358): Val or Ile or Absent or Phe
  MISC_FEATURE (361)..(361): Ala or Gly or Absent
  MISC_FEATURE (362)..(362): Phe or Absent or Leu
  MISC_FEATURE (363)..(363): Ser or Cys or Absent or Phe
  MISC_FEATURE (367)..(367): Absent or Arg
  MISC_FEATURE (368)..(368): Absent or Thr
  MISC_FEATURE (369)..(369): Absent or Leu
  MISC_FEATURE (370)..(370): Absent or Asn
  MISC_FEATURE (371)..(371): Absent or His
  MISC_FEATURE (372)..(372): Absent or Ala
  MISC_FEATURE (373)..(373): Absent or Arg
  MISC_FEATURE (374)..(374): Absent or Lys
  MISC_FEATURE (375)..(375): Absent or Ile
  MISC_FEATURE (376)..(376): Absent or Leu
  MISC_FEATURE (377)..(377): Absent or His
  MISC_FEATURE (378)..(378): Absent or Gly
  MISC_FEATURE (379)..(379): Absent or Lys
  MISC_FEATURE (380)..(380): Absent or Ser
  MISC_FEATURE (381)..(381): Absent or Leu
  MISC_FEATURE (382)..(382): Absent or Ile
  MISC_FEATURE (383)..(383): Absent or Ile
  MISC_FEATURE (384)..(384): Absent or Phe
  MISC_FEATURE (385)..(385): Absent or Asn
  MISC_FEATURE (387)..(387): Pro or Lys or Absent or Arg
  MISC_FEATURE (388)..(388): Asp or Asn or Absent
  MISC_FEATURE (390)..(390): Lys or Absent or Arg
  MISC_FEATURE (391)..(391): Lys or Met or Phe or Absent or Leu
  MISC_FEATURE (395)..(395): Leu or Val or Absent
  MISC_FEATURE (397)..(397): Ala or Absent or Ser
  MISC_FEATURE (398)..(398): Glu or Lys or Absent or Asn
  MISC_FEATURE (399)..(399): Ala or Thr or Absent or Ser or Cys or Arg or Gln
  MISC_FEATURE (400)..(400): Ala or Absent or Ser
  MISC_FEATURE (402)..(402): Lys or Ser or Asp or Absent
  MISC_FEATURE (404)..(404): Gly or Absent or Asp
  MISC_FEATURE (407)..(407): Asn or Trp or Absent or Ser
  MISC_FEATURE (410)..(410): Asn or Glu or Absent or Asp
  MISC_FEATURE (414)..(414): Leu or Cys or Arg or Absent or Lys or Val
  MISC_FEATURE (416)..(416): Asp or Asn or Absent or Ala
  MISC_FEATURE (419)..(419): Thr or Ala or Ser or Absent
  MISC_FEATURE (421)..(421): Leu or Gly or Absent or Trp
  MISC_FEATURE (422)..(422): Ile or Lys or Absent
  MISC_FEATURE (423)..(423): Arg or Val or Leu or Absent or Pro or Ala or Met
  MISC_FEATURE (424)..(424): Ile or Cys or Pro or Absent or Asp
  MISC_FEATURE (425)..(425): Gly or Lys or Glu or Absent or Pro or Gln
  MISC_FEATURE (426)..(426): Glu or Gln or Ser or Absent or Tyr
  MISC_FEATURE (427)..(427): Lys or Thr or Absent or Ala or Leu
  MISC_FEATURE (428)..(428): Pro or Absent
  MISC_FEATURE (429)..(429): Gln or Asn or Absent or Ser or Glu or Asp
  MISC_FEATURE (430)..(430): Val or Ile or Absent
  MISC_FEATURE (431)..(431): Lys or Val or Absent or Thr
  MISC_FEATURE (432)..(432): Asp or Absent or Gln
  MISC_FEATURE (433)..(433): Ile or Val or Absent
  MISC_FEATURE (434)..(434): Absent or Ser
  MISC_FEATURE (435)..(435): Absent or Ile
  MISC_FEATURE (436)..(436): Absent or Tyr
  MISC_FEATURE (437)..(437): Absent or Leu
  MISC_FEATURE (438)..(438): Absent or Thr
  MISC_FEATURE (439)..(439): Absent or Ser
  MISC_FEATURE (440)..(440): Absent or Glu
  MISC_FEATURE (441)..(441): Absent or Leu
  MISC_FEATURE (442)..(442): Absent or Cys
  MISC_FEATURE (443)..(443): Absent or Gln
  MISC_FEATURE (444)..(444): Val or Ile or Absent
  MISC_FEATURE (445)..(445): Asn or Lys or Gln or Absent or Pro
  MISC_FEATURE (446)..(446): Val or Absent or Ile
  MISC_FEATURE (447)..(447): Val or Absent or Met
  MISC_FEATURE (448)..(448): Gln or Asn or Absent or Met
  MISC_FEATURE (449)..(449): His or Cys or Absent
  MISC_FEATURE (450)..(450): Ala or Pro or Absent
  MISC_FEATURE (451)..(451): Glu or Lys or Absent or Gln
  MISC_FEATURE (452)..(452): Glu or Asp or Absent
  MISC_FEATURE (453)..(453): Absent or Asp
  MISC_FEATURE (454)..(454): Absent or Asp
  MISC_FEATURE (455)..(455): Absent or Gly
  MISC_FEATURE (457)..(457): Ala or Cys or Absent or Tyr
  MISC_FEATURE (463)..(463): Cys or Val or Absent
  MISC_FEATURE (464)..(464): Tyr or Ser or Thr or Absent
  MISC_FEATURE (465)..(465): Asn or Ser or Gly or Absent or Ala
  MISC_FEATURE (466)..(466): Leu or Absent or Ile or Met or Val
  MISC_FEATURE (467)..(467): Val or Ile or Leu or Absent
  MISC_FEATURE (468)..(468): Ala or Val or Ser or Absent or Pro
  MISC_FEATURE (469)..(469): Asn or Asp or Absent
  MISC_FEATURE (473)..(473): Asp or Asn or Ser or Absent
  MISC_FEATURE (474)..(474): Asp or Gly or Absent
  MISC_FEATURE (475)..(475): Gly or Ser or Absent or His or Arg
  MISC_FEATURE (476)..(476): Ser or His or Absent or Cys or Arg
  MISC_FEATURE (477)..(477): Thr or Ser or Absent
  MISC_FEATURE (478)..(478): Leu or Absent or Met or Val
  MISC_FEATURE (479)..(479): Leu or Met or Absent or Ile or Val
  MISC_FEATURE (481)..(481): Ser or Absent or Thr
  MISC_FEATURE (482)..(482): Ser or Thr or Absent
  MISC_FEATURE (483)..(483): Ala or Ser or Tyr or Absent
  MISC_FEATURE (485)..(485): Arg or Absent or His
  MISC_FEATURE (487)..(487): Gln or Cys or Absent or Thr or Ala
  MISC_FEATURE (488)..(488): Gln or Arg or Absent or Glu
  MISC_FEATURE (492)..(492): Ser or Gly or Absent
  MISC_FEATURE (493)..(493): Ile or Val or Absent
  MISC_FEATURE (494)..(494): Asp or Asn or Absent
  MISC_FEATURE (495)..(495): Val or Ile or Leu or Absent
  MISC_FEATURE (496)..(496): Glu or Val or Leu or Absent
  MISC_FEATURE (499)..(499): Asn or Asp or Glu or Absent or Lys
  MISC_FEATURE (500)..(500): Val or Absent or Ala
  MISC_FEATURE (501)..(501): Ser or Absent or Thr or Ala
  MISC_FEATURE (502)..(502): Arg or Thr or Absent or His
  MISC_FEATURE (503)..(503): Val or Ala or Absent or Ile
  MISC_FEATURE (504)..(504): Ser or Absent or Thr
  MISC_FEATURE (505)..(505): Ser or Pro or Absent
  MISC_FEATURE (506)..(506): Ser or Absent or Asn or Gln or Glu
  MISC_FEATURE (507)..(507): Asp or Absent or Asn
  MISC_FEATURE (509)..(509): Leu or Asp or Absent or Gly or Glu or Cys
  MISC_FEATURE (510)..(510): Ala or Tyr or Absent or Phe
  MISC_FEATURE (513)..(513): Asn or Absent or Ser or Arg
  MISC_FEATURE (514)..(514): Leu or Ala or Absent or Val or Thr
  MISC_FEATURE (516)..(516): Gly or Ala or Absent or Thr
  MISC_FEATURE (517)..(517): Leu or Met or Absent or Ile or Val
  MISC_FEATURE (518)..(518): Gln or His or Asp or Absent or Ser
  MISC_FEATURE (519)..(519): Asn or Gly or Absent
  MISC_FEATURE (520)..(520): Ser or Asp or Absent or Asn or His or Thr
  MISC_FEATURE (521)..(521): Cys or Ser or Absent or Asn
  MISC_FEATURE (522)..(522): Ile or Val or Absent
  MISC_FEATURE (523)..(523): Val or Absent or Leu
  MISC_FEATURE (524)..(524): Ala or Absent or Ser or Val
  MISC_FEATURE (525)..(525): Thr or Val or Absent
  MISC_FEATURE (526)..(526): Val or Ser or Absent or Cys
  MISC_FEATURE (530)..(530): Ile or Thr or Val or Absent
  MISC_FEATURE (531)..(531): Gln or Ser or Absent or Asp
  MISC_FEATURE (532)..(532): Pro or Val or Absent or Ile
  MISC_FEATURE (533)..(533): Ser or Gln or Pro or Absent
  MISC_FEATURE (534)..(534): Ser or Asn or Glu or Absent or Gln
  MISC_FEATURE (535)..(535): Leu or Ile or Absent or Met
  MISC_FEATURE (536)..(536): His or Lys or Absent or Arg or Ser
  MISC_FEATURE (537)..(537): Leu or Tyr or Absent
  MISC_FEATURE (539)..(539): His or Lys or Absent or Ala or Trp or Arg
  MISC_FEATURE (540)..(540): Ser or Ile or Lys or Absent or Leu or Arg or Gln
  MISC_FEATURE (541)..(541): Ala or Gly or Absent or Val or Leu
  MISC_FEATURE (542)..(542): Ser or Leu or Absent or Lys or Glu or Ala
  MISC_FEATURE (543)..(543): Val or Pro or Asp or Absent or Lys or Thr or Leu
  MISC_FEATURE (544)..(544): Gly or Asp or Ser or Absent or Ala or Thr or Glu or Lys
  MISC_FEATURE (545)..(545): Ser or Ala or Absent or Thr or Asp or Pro
  MISC_FEATURE (546)..(546): Pro or Leu or Gly or Absent or Asn or Ala or His or Gln
  MISC_FEATURE (547)..(547): Leu or Ile or Lys or Absent or Asn or Ser or Asp or Thr or Glu
  MISC_FEATURE (548)..(548): Lys or Arg or Absent or Gly
  MISC_FEATURE (549)..(549): Gly or Ser or Absent or Arg or Glu
  MISC_FEATURE (550)..(550): Gly or Absent or Ala
  MISC_FEATURE (551)..(551): Lys or Pro or Absent or Asp or Cys or Arg
  MISC_FEATURE (552)..(552): Glu or Ser or Absent or Ala or Thr or Arg
  MISC_FEATURE (554)..(554): Lys or Asn or Leu or Absent or Ser or Val or Thr
  MISC_FEATURE (556)..(556): Ser or Absent or Leu or Asp
  MISC_FEATURE (557)..(557): Ala or Asn or Absent or Asp or Glu
  MISC_FEATURE (558)..(558): Ile or Absent or Val
  MISC_FEATURE (559)..(559): Asn or Gln or Absent or Ala or Ser or Thr
  MISC_FEATURE (560)..(560): Val or Leu or Ser or Absent or Asn
  MISC_FEATURE (561)..(561): Absent or Asn
  MISC_FEATURE (563)..(563): Ser or Ile or Absent or Leu or Phe
  MISC_FEATURE (564)..(564): Leu or Arg or Absent or Phe or Pro or Thr or Met
  MISC_FEATURE (565)..(565): Lys or Gln or Absent or Arg or Ala
  MISC_FEATURE (566)..(566): Phe or Tyr or Absent or Cys or Ala or Ser
  MISC_FEATURE (567)..(567): Ala or Ser or Absent or Asn
  MISC_FEATURE (568)..(568): Ser or Ala or Glu or Absent or Asp or Asn
  MISC_FEATURE (571)..(571): Glu or Met or Absent or Arg or Lys
  MISC_FEATURE (572)..(572): Ser or Ala or Absent
  MISC_FEATURE (573)..(573): Val or Ala or Gly or Absent or Leu
  MISC_FEATURE (574)..(574): Met or Leu or Absent or Ile
  MISC_FEATURE (575)..(575): Gln or Arg or Ser or Absent or Leu
  MISC_FEATURE (576)..(576): Ser or Ala or Absent or His
  MISC_FEATURE (577)..(577): Met or Leu or Absent or His
  MISC_FEATURE (578)..(578): Lys or Gln or Absent or Thr or Ser
  MISC_FEATURE (579)..(579): Tyr or Phe or Absent or Leu or Val
  MISC_FEATURE (580)..(580): Glu or Lys or Absent or Ser
  MISC_FEATURE (583)..(583): Gln or Arg or Lys or Absent
  MISC_FEATURE (584)..(584): Val or Absent or Ile
  MISC_FEATURE (586)..(586): Pro or Ala or Absent
  MISC_FEATURE (587)..(587): Pro or Absent
  MISC_FEATURE (588)..(588): Lys or Met or Ile or Absent or Val
  MISC_FEATURE (589)..(589): Ala or Thr or Ser or Absent or Lys or Pro
  MISC_FEATURE (590)..(590): Asp or Absent or Asn or Ser
  MISC_FEATURE (591)..(591): Pro or Val or Absent or Ile
  MISC_FEATURE (593)..(593): Lys or Glu or Absent or Ala or Asp
  MISC_FEATURE (594)..(594): Ser or Gly or Absent or Cys or Glu or Asp
  MISC_FEATURE (596)..(596): Ser or Ala or Absent or Thr
  MISC_FEATURE (597)..(597): Val or Glu or Absent or Lys or Asp
  MISC_FEATURE (599)..(599): Ser or Ala or Absent or Gly
  MISC_FEATURE (600)..(600): Gly or Lys or Absent or Ser or Cys or Gln
  MISC_FEATURE (601)..(601): Gln or Asn or Absent or Lys or Leu
  MISC_FEATURE (603)..(603): Phe or Ile or Absent or Tyr or Leu
  MISC_FEATURE (610)..(610): Pro or Ser or Absent or Cys
  MISC_FEATURE (611)..(611): Thr or Ser or Absent
  MISC_FEATURE (612)..(612): Gly or Absent
  MISC_FEATURE (613)..(613): Ser or Absent
  MISC_FEATURE (614)..(614): Ile or Absent
  MISC_FEATURE (615)..(615): Arg or Asn or Absent
  MISC_FEATURE (616)..(616): Pro or Ser or Absent
  MISC_FEATURE (617)..(617): Leu or Pro or Absent
  MISC_FEATURE (618)..(618): Thr or Absent
  MISC_FEATURE (619)..(619): Glu or Lys or Absent or Asn or Cys
  MISC_FEATURE (620)..(620): Glu or Ser or Absent or Thr or Lys
  MISC_FEATURE (621)..(621): Pro or Lys or Absent or Asp or Gly
  MISC_FEATURE (622)..(622): Arg or Glu or Absent or Lys or Ser
  MISC_FEATURE (623)..(623): Ile or Asn or Absent or Ser
  MISC_FEATURE (624)..(624): Glu or Gly or Absent or Asp or Gln or His or Arg
  MISC_FEATURE (625)..(625): Ser or Lys or Absent or Ala or Thr
  MISC_FEATURE (626)..(626): Ile or Cys or Absent or Leu
  MISC_FEATURE (627)..(627): Pro or Asp or Absent or Lys or Ser
  MISC_FEATURE (629)..(629): Leu or Absent or Thr
  MISC_FEATURE (630)..(630): Val or Ile or Absent
  MISC_FEATURE (631)..(631): Val or Ala or Absent or Leu
  MISC_FEATURE (642)..(642): Gln or Pro or Absent or Leu or Ser or Val
  MISC_FEATURE (643)..(643): Thr or Cys or Absent or Ser
  MISC_FEATURE (645)..(645): Phe or Absent or Tyr
  MISC_FEATURE (647)..(647): Arg or Absent or Lys
  MISC_FEATURE (648)..(648): Asn or Thr or Absent or Pro or Ser
  MISC_FEATURE (649)..(649): Ala or Thr or Met or Absent or Leu or Ser
  MISC_FEATURE (651)..(651): Phe or Tyr or Absent
  MISC_FEATURE (653)..(653): Ser or Absent or Ala
  MISC_FEATURE (657)..(657): Phe or Tyr or Absent
  MISC_FEATURE (658)..(658): Asn or Ser or Absent
  MISC_FEATURE (661)..(661): His or Ile or Absent or Val
  MISC_FEATURE (667)..(667): Ser or Absent or Thr
  MISC_FEATURE (668)..(668): Leu or Absent or Pro
  MISC_FEATURE (670)..(670): Phe or Tyr or Absent
  MISC_FEATURE (688)..(688): Asp or Ser or Lys or Absent or Asn or Gln or Glu
  MISC_FEATURE (690)..(690): Val or Cys or Absent
  MISC_FEATURE (692)..(692): Ala or Leu or Absent or Thr
  MISC_FEATURE (694)..(694): Leu or Val or Absent or Ile or Ala
  MISC_FEATURE (696)..(696): Leu or His or Absent or Tyr or Phe
  MISC_FEATURE (697)..(697): Val or Ala or Absent
  MISC_FEATURE (698)..(698): Ile or Absent or Val
  MISC_FEATURE (699)..(699): Gly or Arg or Glu or Absent or Asn or Asp
  MISC_FEATURE (700)..(700): Asn or Met or Absent or Leu or Glu or Gly
  MISC_FEATURE (701)..(701): Gly or Absent or Glu
  MISC_FEATURE (702)..(702): Met or Ile or Absent or Leu
  MISC_FEATURE (703)..(703): Ala or Absent or Cys or Val or Ile
  MISC_FEATURE (705)..(705): Pro or Absent or Ala
  MISC_FEATURE (707)..(707): Arg or Absent or Lys
  MISC_FEATURE (708)..(708): Val or Ile or Absent
  MISC_FEATURE (711)..(711): Leu or Absent or Val or Ile
  MISC_FEATURE (713)..(713): Gly or Absent or Ile
  MISC_FEATURE (730)..(730): Arg or Lys or Absent
  MISC_FEATURE (732)..(732): Ala or Thr or Val or Absent or Met
  MISC_FEATURE (733)..(733): Thr or Ala or Absent or Val
  MISC_FEATURE (744)..(744): Ser or Ala or Absent
  MISC_FEATURE (745)..(745): Ser or Absent or Leu
  MISC_FEATURE (747)..(747): Val or Absent or Ile or Ala or Asn
  MISC_FEATURE (749)..(749): Ile or Absent or Thr
  MISC_FEATURE (758)..(758): Val or Phe or Ala or Absent
  MISC_FEATURE (759)..(759): Glu or Val or Absent
  MISC_FEATURE (761)..(761): Phe or Tyr or Arg or Cys or Absent
  MISC_FEATURE (763)..(763): Lys or Asp or Thr or Ser or Absent
  MISC_FEATURE (764)..(764): Asp or Gln or Ile or Lys or Glu or Absent
  MISC_FEATURE (765)..(765): Gly or Absent or Ala
  MISC_FEATURE (766)..(766): Leu or Val or Absent or Lys or Arg
  MISC_FEATURE (767)..(767): Ser or Ala or Asn or Asp or Arg or Gln or Absent
  MISC_FEATURE (768)..(768): Asn or His or Cys or Lys or Ser or Leu or Tyr or Absent
  MISC_FEATURE (769)..(769): Tyr or Phe or Ala or Absent
  MISC_FEATURE (770)..(770): Ser or Thr or Absent
  MISC_FEATURE (772)..(772): Ala or Pro or Ser or Absent
  MISC_FEATURE (775)..(775): Val or Thr or Ala or Leu or Pro or Absent
  MISC_FEATURE (776)..(776): Lys or Glu or Asp or Gly or Absent
  MISC_FEATURE (777)..(777): Asp or Gln or His or Absent
  MISC_FEATURE (779)..(779): Ser or Thr or Arg or Absent or Gly
  MISC_FEATURE (780)..(780): Val or Arg or Leu or Ile or Absent or Phe
  MISC_FEATURE (782)..(782): Tyr or His or Gln or Absent
  MISC_FEATURE (784)..(784): Ile or Cys or Met or Lys or Arg or Absent
  MISC_FEATURE (790)..(790): Ile or Leu or Val or Absent
  MISC_FEATURE (792)..(792): Absent or Lys
  MISC_FEATURE (793)..(793): Absent or Val
  MISC_FEATURE (794)..(794): Absent or Cys
  MISC_FEATURE (795)..(795): Absent or Cys
  MISC_FEATURE (796)..(796): Absent or Phe
  MISC_FEATURE (797)..(797): Absent or Phe
  MISC_FEATURE (798)..(798): Absent or Pro
  MISC_FEATURE (799)..(799): Absent or Ala
  MISC_FEATURE (800)..(800): Absent or Cys
  MISC_FEATURE (801)..(801): Absent or Leu
  MISC_FEATURE (802)..(802): Absent or Leu
  MISC_FEATURE (803)..(803): Absent or Leu
  MISC_FEATURE (804)..(804): Absent or Ser
  MISC_FEATURE (805)..(805): Absent or Tyr
  MISC_FEATURE (806)..(806): Absent or Gln
  MISC_FEATURE (807)..(807): Absent or Leu
  MISC_FEATURE (808)..(808): Absent or Val
  MISC_FEATURE (809)..(809): Absent or Asp
  MISC_FEATURE (810)..(810): Absent or Leu
  MISC_FEATURE (811)..(811): Absent or Ile
  MISC_FEATURE (812)..(812): Absent or Val
  MISC_FEATURE (813)..(813): Absent or Val
  MISC_FEATURE (814)..(814): Absent or Leu
  MISC_FEATURE (815)..(815): Absent or Val
  MISC_FEATURE (816)..(816): Absent or Val
  MISC_FEATURE (817)..(817): Absent or Arg
  MISC_FEATURE (818)..(818): Absent or Thr
  MISC_FEATURE (819)..(819): Absent or Val
  MISC_FEATURE (820)..(820): Absent or Asp
  MISC_FEATURE (821)..(821): Absent or Gly
  MISC_FEATURE (822)..(822): Absent or Ala
  MISC_FEATURE (823)..(823): Absent or Leu
  MISC_FEATURE (824)..(824): Absent or Leu
  MISC_FEATURE (825)..(825): Absent or Ser
  MISC_FEATURE (826)..(826): Absent or Glu
  MISC_FEATURE (827)..(827): Absent or Ser
  MISC_FEATURE (828)..(828): Absent or Val
  MISC_FEATURE (832)..(832): Val or Thr or Ala or Absent
  MISC_FEATURE (834)..(834): Thr or Ile or Leu or Phe
  MISC_FEATURE (836)..(836): Phe or Met or Val
  MISC_FEATURE (840)..(840): Ala or Thr or Gly
  MISC_FEATURE (841)..(841): Gln or Lys or Ala
  MISC_FEATURE (847)..(847): Val or Ile or Met or Ala
  MISC_FEATURE (856)..(856): Ala or Glu or Ser
  MISC_FEATURE (858)..(858): Arg or Lys or Ile
  MISC_FEATURE (862)..(862): Gln or Val or Gly
  MISC_FEATURE (863)..(863): Glu or Gln or Asp
  MISC_FEATURE (864)..(864): Val or Ile
  MISC_FEATURE (865)..(865): Lys or Arg
  MISC_FEATURE (866)..(866): Val or Ile or Thr
  MISC_FEATURE (867)..(867): Ile or Leu or Met
  MISC_FEATURE (868)..(868): Val or Leu or Met or Ile
  MISC_FEATURE (871)..(871): Glu or Asn or Asp
  MISC_FEATURE (873)..(873): Val or Asn or Thr or Ile
  MISC_FEATURE (875)..(875): Ala or Pro or Gly or Glu
  MISC_FEATURE (877)..(877): Asp or Lys or Glu or Asn
  MISC_FEATURE (878)..(878): Arg or Ile or Leu
  MISC_FEATURE (880)..(880): Gln or Arg
  MISC_FEATURE (896)..(896): Phe or Tyr or His
  MISC_FEATURE (897)..(897): Ile or Met or Cys or Leu
  MISC_FEATURE (898)..(898): Absent or His or Lys or Glu or Ser or Asn
  MISC_FEATURE (899)..(899): Absent or Leu or Gln or Ile or Ala
  MISC_FEATURE (900)..(900): Absent or Ile or Ser or Val
  MISC_FEATURE (901)..(901): Absent or Ala
  MISC_FEATURE (902)..(902): Absent or Ser
  MISC_FEATURE (903)..(903): Absent or Asp
  MISC_FEATURE (904)..(904): Absent or Ala
  MISC_FEATURE (905)..(905): Absent or Ser
  MISC_FEATURE (906)..(906): Absent or Ala
XXXXXXXXXXXXXXXXXXXXXXXXXXXXXXXXXXXXXXXXSXLLXXXXXXXSXXXAXXXXXXXXXXXXXXXXXXSQXXLXANXXXXXXXXXXIXXXXXXXXXXXXXXXXWXPFPXXXXGXSXXVPSPSGXKXLXXRNXXXXXXXTXXXIXXXXXXXXEXXXXXXXHGXXYXDXWFXGXSWXXXEXXXXYXAEXXXXXXPXXXXXXXXXXXXXXXXXXXXXXWXGXGXWXXXWGEXYXXXKXXPXLFVXXXXXXXVXXXXXXXXXXSXGQVXWXPXXXXXXXXXXXXLXFXGWXXXXXXXXXXXXKXXXKXCXNRPCXXYXXXXXXXXXXXXXXXXXXXXXXXXXXXXXXXXXXLTXXXSSXXXPRFXXXXXXXXXXXXXXXXXXXSXXGXXLVFXSXXXXVXSXAHXATXSLHXIXWPXDXXXXXXXXXXXXXXXXXXXXXXXXXXXXXXXXXXXGXFPGLYXXXXXXXPWLXXXXXXXLXXXWXSXXVILXXXXXSGXXXXXXXXXSXXSWXXLXXXXXXXXXXXSSPXXXXXXXXGXXXXXXXXXXXXXXWXWXXXXXXPXXXXXXKVXXXXXXXXXXILXXPXXXXXXSXXLXXGXXXPXEAIFVSXXXXXXXXXXXXXXXXXXPXXXVLHGGPHSVSXXSXSXXXAXLXSLGXXLLXVNYRGXXGXGEEALQSLPGKVGSQDVXDXLXAXDXXXXXXXXDXSXXAVXGXSHGGFLTTHLIGQAPDXFXXAAARNPVCNLXXMXGXTDIPDWCYXXAXGXXXXXXXXEXPSXXXLXXFXQXSPIAHXSXXXXXXXXXXXXXXXXXXXXXXXXXXXXXXXXXXXXXKVKXPXLXLLGXXDLRVPXSNGLQYARXLXERGXXXXXXXFPXDXHXIXXPXSDFESFLNIGVWFKKXXXXXXXXXXX

SEQ ID NO: 17384 - protein, 243 aa, Artificial
  Consensus Sequence of SEQ ID NO 138 and its homologs
  MISC_FEATURE (1)..(1): Absent or Met
  MISC_FEATURE (2)..(2): Absent or Ala
  MISC_FEATURE (3)..(3): Absent or Leu
  MISC_FEATURE (4)..(4): Absent or Arg
  MISC_FEATURE (5)..(5): Absent or Met
  MISC_FEATURE (6)..(6): Absent or Pro
  MISC_FEATURE (7)..(7): Absent or Cys
  MISC_FEATURE (8)..(8): Absent or Arg or Asp
  MISC_FEATURE (9)..(9): Absent or Thr or Asp
  MISC_FEATURE (10)..(10): Absent or His or Gly
  MISC_FEATURE (11)..(11): Absent or Gly
  MISC_FEATURE (12)..(12): Absent or Val or Ser
  MISC_FEATURE (13)..(13): Absent or Tyr or Gln
  MISC_FEATURE (14)..(14): Absent or Asp or Pro
  MISC_FEATURE (15)..(15): Absent or Thr or Pro
  MISC_FEATURE (16)..(16): Absent or Thr or Tyr
  MISC_FEATURE (17)..(17): Absent or Gly
  MISC_FEATURE (18)..(18): Absent or Arg
  MISC_FEATURE (19)..(19): Absent or Asn or Lys
  MISC_FEATURE (20)..(20): Absent or Pro or Arg
  MISC_FEATURE (21)..(21): Absent or Arg or Thr
  MISC_FEATURE (22)..(22): Absent or Gly or Ala
  MISC_FEATURE (23)..(23): Absent or Ser or Leu
  MISC_FEATURE (24)..(24): Absent or Leu
  MISC_FEATURE (25)..(25): Absent or Glu or Gln
  MISC_FEATURE (26)..(26): Absent or Gln or Arg
  MISC_FEATURE (27)..(27): Absent or Val
  MISC_FEATURE (28)..(28): Absent or Arg or Gly
  MISC_FEATURE (29)..(29): Absent or Arg
  MISC_FEATURE (30)..(30): Absent or Ala
  MISC_FEATURE (31)..(31): Absent or Gly
  MISC_FEATURE (32)..(32): Absent or Lys
  MISC_FEATURE (33)..(33): Absent or Asp
  MISC_FEATURE (34)..(34): Absent or Gly
  MISC_FEATURE (35)..(35): Absent or Thr
  MISC_FEATURE (36)..(36): Absent or Ala
  MISC_FEATURE (37)..(37): Absent or Leu
  MISC_FEATURE (38)..(38): Absent or Ala
  MISC_FEATURE (39)..(39): Absent or Gln
  MISC_FEATURE (40)..(40): Absent or Gly
  MISC_FEATURE (41)..(41): Absent or Arg
  MISC_FEATURE (42)..(42): Absent or Ser
  MISC_FEATURE (43)..(43): Absent or Leu
  MISC_FEATURE (44)..(44): Absent or Pro
  MISC_FEATURE (45)..(45): Absent or Pro
  MISC_FEATURE (46)..(46): Absent or Ala
  MISC_FEATURE (47)..(47): Absent or Trp
  MISC_FEATURE (48)..(48): Absent or Thr
  MISC_FEATURE (49)..(49): Absent or Leu
  MISC_FEATURE (50)..(50): Absent or Val
  MISC_FEATURE (51)..(51): Absent or Val or Thr
  MISC_FEATURE (52)..(52): Absent or Pro
  MISC_FEATURE (53)..(53): Absent or Leu or Tyr
  MISC_FEATURE (54)..(54): Absent or Cys
  MISC_FEATURE (55)..(55): Absent or Ala or Lys
  MISC_FEATURE (56)..(56): Absent or Ser or Arg
  MISC_FEATURE (57)..(57): Absent or Val or Thr
  MISC_FEATURE (58)..(58): Absent or Ser or Arg
  MISC_FEATURE (59)..(59): Absent or Ala or Pro
  MISC_FEATURE (60)..(60): Absent or Pro or Gly
  MISC_FEATURE (61)..(61): Absent or Arg
  MISC_FEATURE (62)..(62): Absent or Gly
  MISC_FEATURE (63)..(63): Absent or Pro or Ala
  MISC_FEATURE (64)..(64): Absent or Pro or Asn
  MISC_FEATURE (65)..(65): Absent or Thr
  MISC_FEATURE (66)..(66): Absent or Val or Lys
  MISC_FEATURE (67)..(67): Absent or Tyr or Ala
  MISC_FEATURE (68)..(68): Absent or Ser or Ala
  MISC_FEATURE (69)..(69): Absent or Gly
  MISC_FEATURE (70)..(70): Absent or Ser
  MISC_FEATURE (71)..(71): Absent or Thr
  MISC_FEATURE (72)..(72): Absent or Phe or Leu
  MISC_FEATURE (73)..(73): Absent or Pro
  MISC_FEATURE (74)..(74): Absent or Arg
  MISC_FEATURE (75)..(75): Absent or Leu
  MISC_FEATURE (76)..(76): Absent or Gln or Ser
  MISC_FEATURE (77)..(77): Absent or Ala or Pro
  MISC_FEATURE (78)..(78): Absent or Glu or Ser
  MISC_FEATURE (79)..(79): Absent or Ala or Gly
  MISC_FEATURE (80)..(80): Absent or Cys
  MISC_FEATURE (81)..(81): Absent or Leu or Phe
  MISC_FEATURE (82)..(82): Absent or Leu or Ser
  MISC_FEATURE (83)..(83): Absent or Asn or Pro
  MISC_FEATURE (84)..(84): Absent or Pro or Leu
  MISC_FEATURE (85)..(85): Absent or Thr or Arg
  MISC_FEATURE (86)..(86): Absent or Leu or Val
  MISC_FEATURE (87)..(87): Absent or Leu or Pro
  MISC_FEATURE (88)..(88): Absent or Phe or Pro
  MISC_FEATURE (89)..(89): Absent or Leu or Arg
  MISC_FEATURE (90)..(90): Absent or Cys or Ala
  MISC_FEATURE (91)..(91): Absent or Phe or Asp
  MISC_FEATURE (92)..(92): Absent or Pro
  MISC_FEATURE (93)..(93): Absent or Ala or Ser
  MISC_FEATURE (94)..(94): Absent or Ser or Gly
  MISC_FEATURE (95)..(95): Absent or Ser or Leu
  MISC_FEATURE (96)..(96): Absent or Gly
  MISC_FEATURE (97)..(97): Absent or His
  MISC_FEATURE (98)..(98): Absent or Ala
  MISC_FEATURE (99)..(99): Absent or Val
  MISC_FEATURE (100)..(100): Absent or Leu or Thr
  MISC_FEATURE (101)..(101): Absent or Leu or Ile
  MISC_FEATURE (102)..(102): Absent or Phe or Tyr
  MISC_FEATURE (103)..(103): Absent or Phe or Ser
  MISC_FEATURE (104)..(104): Absent or Leu or Ser
  MISC_FEATURE (105)..(105): Absent or Leu or Val
  MISC_FEATURE (106)..(106): Absent or Ala or Gln
  MISC_FEATURE (107)..(107): Absent or Pro or Gly
  MISC_FEATURE (108)..(108): Absent or Ser or Pro
  MISC_FEATURE (109)..(109): Absent or Phe or Pro
  MISC_FEATURE (110)..(110): Absent or Glu or Gly
  MISC_FEATURE (111)..(111): Absent or Ser or Ala
  MISC_FEATURE (112)..(112): Absent or Arg or Asn
  MISC_FEATURE (113)..(113): Absent or Glu or Gly or Ser
  MISC_FEATURE (114)..(114): Absent or Arg or His or Ser
  MISC_FEATURE (115)..(115): Absent or Cys or Leu or Ser
  MISC_FEATURE (116)..(116): Absent or Trp or Val
  MISC_FEATURE (117)..(117): Absent or Val or Cys or Gly
  MISC_FEATURE (118)..(118): Absent or Gln or Arg
  MISC_FEATURE (119)..(119): Absent or Leu or Ile or Arg
  MISC_FEATURE (120)..(120): Absent or Ala or Gln or Arg
  MISC_FEATURE (121)..(121): Absent or Trp or Gln or Arg
  MISC_FEATURE (122)..(122): Absent or Ser or Leu or Arg
  MISC_FEATURE (123)..(123): Absent or Lys or Gly or Arg
  MISC_FEATURE (124)..(124): Absent or Gln or Ala or Arg
  MISC_FEATURE (125)..(125): Absent or Ala or Pro or Arg
  MISC_FEATURE (126)..(126): Absent or Asp or Arg
  MISC_FEATURE (127)..(127): Absent or Pro or Arg
  MISC_FEATURE (128)..(128): Absent or Gly or Ala
  MISC_FEATURE (129)..(129): Absent or Ile or Thr
  MISC_FEATURE (130)..(130): Absent or Gly
  MISC_FEATURE (131)..(131): Absent or Leu or Arg
  MISC_FEATURE (132)..(132): Absent or Ser
  MISC_FEATURE (133)..(133): Absent or Gly or Lys
  MISC_FEATURE (134)..(134): Absent or Asp or Gln
  MISC_FEATURE (135)..(135): Absent or Pro or Glu
  MISC_FEATURE (136)..(136): Absent or Thr or Glu
  MISC_FEATURE (137)..(137): Absent or Gly or Glu
  MISC_FEATURE (138)..(138): Absent or Leu or Glu
  MISC_FEATURE (139)..(139): Absent or Gly or Ser or Glu
  MISC_FEATURE (140)..(140): Absent or Ala
  MISC_FEATURE (141)..(141): Absent or Asp or Ser
  MISC_FEATURE (142)..(142): Absent or Arg or Ser or Lys
  MISC_FEATURE (143)..(143): Absent or Ser or Glu
  MISC_FEATURE (144)..(144): Absent or Ala or Pro or Lys
  MISC_FEATURE (145)..(145): Absent or Glu or Pro or Lys
  MISC_FEATURE (153)..(153): Leu or Val or Ala
  MISC_FEATURE (154)..(154): Ile or Val
  MISC_FEATURE (156)..(156): Ala or Val or Thr or Trp
  MISC_FEATURE (170)..(170): Met or Ile or Leu or Phe
  MISC_FEATURE (172)..(172): Gly or Ala
  MISC_FEATURE (173)..(173): Lys or Gly or Arg or Gln or His or Ser or Asn
  MISC_FEATURE (174)..(174): Glu or Gly or Ser or Cys
  MISC_FEATURE (176)..(176): Pro or Val or Ile or Thr or Leu
  MISC_FEATURE (178)..(178): Asp or Glu or Ala or Gly
  MISC_FEATURE (181)..(181): Asn or Ser or Thr or Lys
  MISC_FEATURE (183)..(183): Lys or Gln or His or Arg or Glu
  MISC_FEATURE (185)..(185): Absent or any naturally occurring amino acid
  MISC_FEATURE (188)..(188): Ala or Leu or Val or Ile or Arg
  MISC_FEATURE (189)..(189): Ala or Ser
  MISC_FEATURE (194)..(194): Leu or Ala or Thr or Ser
  MISC_FEATURE (195)..(195): Val or Ile or Phe
  MISC_FEATURE (196)..(196): Ile or Leu
  MISC_FEATURE (197)..(197): Tyr or Phe
  MISC_FEATURE (199)..(199): Leu or Gly or Ala
  MISC_FEATURE (201)..(201): Leu or Ile or Tyr or Asp or Phe
  MISC_FEATURE (202)..(202): Val or Thr or Ala
  MISC_FEATURE (214)..(214): Val or Ser or Ala or Phe or Leu or Absent or Thr
  MISC_FEATURE (216)..(216): Absent or Leu or Ser
  MISC_FEATURE (217)..(217): Absent or Arg or Ser
  MISC_FEATURE (218)..(218): Absent or Pro
  MISC_FEATURE (219)..(219): Absent or Gly
  MISC_FEATURE (220)..(220): Absent or Val
  MISC_FEATURE (221)..(221): Absent or Phe
  MISC_FEATURE (222)..(222): Absent or Asn
  MISC_FEATURE (223)..(223): Absent or His
  MISC_FEATURE (224)..(224): Absent or Thr
  MISC_FEATURE (225)..(225): Absent or Pro
  MISC_FEATURE (226)..(226): Absent or Ser
  MISC_FEATURE (227)..(227): Absent or Ser
  MISC_FEATURE (228)..(228): Absent or Leu
  MISC_FEATURE (229)..(229): Absent or Pro
  MISC_FEATURE (230)..(230): Absent or Leu
  MISC_FEATURE (231)..(231): Absent or Ile
  MISC_FEATURE (232)..(232): Absent or Ile
  MISC_FEATURE (233)..(233): Absent or Gly
  MISC_FEATURE (234)..(234): Absent or Pro
  MISC_FEATURE (235)..(235): Absent or Ala
  MISC_FEATURE (236)..(236): Absent or Ser
  MISC_FEATURE (237)..(237): Absent or Phe
  MISC_FEATURE (238)..(238): Absent or Leu
  MISC_FEATURE (239)..(239): Absent or Val
  MISC_FEATURE (240)..(240): Absent or Met
  MISC_FEATURE (241)..(241): Absent or Tyr
  MISC_FEATURE (242)..(242): Absent or Tyr
  MISC_FEATURE (243)..(243): Absent or Tyr
XXXXXXXXXXXXXXXXXXXXXXXXXXXXXXXXXXXXXXXXXXXXXXXXXXXXXXXXXXXXXXXXXXXXXXXXXXXXXXXXXXXXXXXXXXXXXXXXXXXXXXXXXXXXXXXXXXXXXXXXXXXXXXXXXXXXXXXXXXXXXXXXXMADWGPVXXAXVLFVLLTPGLLFQXPXXXRXVXFGXMXTXSGXXILVHXXXXFXLXXIFLIAIGVHIYXGXXXXXXXXXXXXXXXXXXXXXXXXXXXX

SEQ ID NO: 17385 - protein, 1094 aa, Artificial
  Consensus Sequence of SEQ ID NO 141 and its homologs
  MISC_FEATURE (1)..(1): Absent or Met
  MISC_FEATURE (2)..(2): Absent or Ala
  MISC_FEATURE (3)..(3): Absent or Phe
  MISC_FEATURE (4)..(4): Absent or His
  MISC_FEATURE (5)..(5): Absent or Leu
  MISC_FEATURE (6)..(6): Absent or His
  MISC_FEATURE (7)..(7): Absent or Thr
  MISC_FEATURE (8)..(8): Absent or Tyr
  MISC_FEATURE (9)..(9): Absent or Ser
  MISC_FEATURE (10)..(10): Absent or Gln
  MISC_FEATURE (11)..(11): Absent or Ala
  MISC_FEATURE (12)..(12): Absent or His
  MISC_FEATURE (13)..(13): Absent or Thr
  MISC_FEATURE (14)..(14): Absent or Pro
  MISC_FEATURE (15)..(15): Absent or Val
  MISC_FEATURE (16)..(16): Absent or Thr
  MISC_FEATURE (17)..(17): Absent or Gly
  MISC_FEATURE (18)..(18): Absent or Cys
  MISC_FEATURE (19)..(19): Absent or Gln
  MISC_FEATURE (20)..(20): Absent or Gln
  MISC_FEATURE (21)..(21): Absent or Val
  MISC_FEATURE (22)..(22): Absent or Ala
  MISC_FEATURE (23)..(23): Absent or Asp
  MISC_FEATURE (24)..(24): Absent or Leu
  MISC_FEATURE (25)..(25): Absent or Gln
  MISC_FEATURE (26)..(26): Absent or Ala
  MISC_FEATURE (27)..(27): Absent or Ser
  MISC_FEATURE (28)..(28): Absent or Gln
  MISC_FEATURE (29)..(29): Absent or Ala
  MISC_FEATURE (30)..(30): Absent or Arg
  MISC_FEATURE (31)..(31): Absent or Arg
  MISC_FEATURE (32)..(32): Absent or Gly
  MISC_FEATURE (33)..(33): Absent or Val
  MISC_FEATURE (34)..(34): Absent or Asp
  MISC_FEATURE (35)..(35): Absent or Asp
  MISC_FEATURE (36)..(36): Absent or Val
  MISC_FEATURE (37)..(37): Absent or Pro
  MISC_FEATURE (38)..(38): Absent or Gly
  MISC_FEATURE (39)..(39): Absent or Val
  MISC_FEATURE (40)..(40): Absent or Cys
  MISC_FEATURE (41)..(41): Absent or Val
  MISC_FEATURE (42)..(42): Absent or Arg
  MISC_FEATURE (43)..(43): Absent or Val
  MISC_FEATURE (44)..(44): Absent or Gly
  MISC_FEATURE (45)..(45): Absent or Cys
  MISC_FEATURE (46)..(46): Absent or Gly
  MISC_FEATURE (47)..(47): Absent or Ala
  MISC_FEATURE (48)..(48): Absent or Arg
  MISC_FEATURE (49)..(49): Absent or His
  MISC_FEATURE (50)..(50): Absent or Ala
  MISC_FEATURE (51)..(51): Absent or Lys
  MISC_FEATURE (52)..(52): Absent or Glu
  MISC_FEATURE (53)..(53): Absent or Gly
  MISC_FEATURE (54)..(54): Absent or Glu
  MISC_FEATURE (55)..(55): Absent or Asp
  MISC_FEATURE (56)..(56): Absent or Glu
  MISC_FEATURE (57)..(57): Absent or Pro
  MISC_FEATURE (58)..(58): Absent or Gly
  MISC_FEATURE (59)..(59): Absent or Pro
  MISC_FEATURE (60)..(60): Absent or Leu
  MISC_FEATURE (61)..(61): Absent or Leu
  MISC_FEATURE (62)..(62): Absent or Cys
  MISC_FEATURE (63)..(63): Absent or His
  MISC_FEATURE (64)..(64): Absent or Asp
  MISC_FEATURE (65)..(65): Absent or Asn
  MISC_FEATURE (66)..(66): Absent or Phe
  MISC_FEATURE (67)..(67): Absent or Gly
  MISC_FEATURE (68)..(68): Absent or Gly
  MISC_FEATURE (69)..(69): Absent or Gly
  MISC_FEATURE (70)..(70): Absent or Phe
  MISC_FEATURE (71)..(71): Absent or Val
  MISC_FEATURE (72)..(72): Absent or Asp
  MISC_FEATURE (73)..(73): Absent or Asp
  MISC_FEATURE (74)..(74): Absent or Asp
  MISC_FEATURE (75)..(75): Absent or Asp
  MISC_FEATURE (76)..(76): Absent or Arg
  MISC_FEATURE (77)..(77): Absent or Val
  MISC_FEATURE (78)..(78): Absent or Ala
  MISC_FEATURE (79)..(79): Absent or Leu
  MISC_FEATURE (80)..(80): Absent or Asn
  MISC_FEATURE (81)..(81): Absent or Thr
  MISC_FEATURE (82)..(82): Absent or Leu
  MISC_FEATURE (83)..(83): Absent or Ser
  MISC_FEATURE (84)..(84): Absent or Leu
  MISC_FEATURE (85)..(85): Met or Absent or Ala
  MISC_FEATURE (86)..(86): Asp or Absent or Gly or Leu or Arg
  MISC_FEATURE (87)..(87): Phe or Absent or Leu
  MISC_FEATURE (88)..(88): Glu or Absent or Asp or Gln
  MISC_FEATURE (89)..(89): Phe or Absent or Ser or Arg
  MISC_FEATURE (90)..(90): Gly or Absent or Thr or His
  MISC_FEATURE (91)..(91): Arg or Absent or Gly or Ala
  MISC_FEATURE (92)..(92): Ala or Absent or Pro
  MISC_FEATURE (93)..(93): Leu or Absent or Thr or Gly or Ala
  MISC_FEATURE (94)..(94): Asn or Absent or Asp or Gly
  MISC_FEATURE (95)..(95): Absent or Met or Leu
  MISC_FEATURE (96)..(96): Absent or Cys or Gly
  MISC_FEATURE (97)..(97): Absent or Val or Ala or Met
  MISC_FEATURE (98)..(98): Absent or Asp or Thr or Gly
  MISC_FEATURE (99)..(99): Absent or Leu or Lys
  MISC_FEATURE (100)..(100): Absent or Pro or His or Ser or Asn
  MISC_FEATURE (101)..(101): Absent or Glu or Arg or Met or Leu
  MISC_FEATURE (102)..(102): Absent or Ser or Asp or Glu or Asn
  MISC_FEATURE (103)..(103): Absent or Gly or Thr or Ala or Ser
  MISC_FEATURE (104)..(104): Lys or Absent or Ile or Leu or Ala or Val or Phe
  MISC_FEATURE (105)..(105): Thr or Met or Leu or Phe or Absent or Gly or Ala
  MISC_FEATURE (106)..(106): Thr or Arg or Absent or Ala or Val
  MISC_FEATURE (107)..(107): Thr or Val or Ser or Lys or Absent or Arg or Ala or Pro
  MISC_FEATURE (108)..(108): Thr or Ala or Val or Absent or Leu or Pro or Ser
  MISC_FEATURE (109)..(109): Thr or Arg or Asp or Pro or Absent or Ala or Ile
  MISC_FEATURE (110)..(110): Ala or Ser or Absent or Cys or Pro
  MISC_FEATURE (111)..(111): Arg or Pro or Glu or Absent or Gln or Ile or Ala or Val
  MISC_FEATURE (112)..(112): Ala or Val or Glu or Gln or Absent or Ser or Pro or Gly
  MISC_FEATURE (113)..(113): Ser or Thr or Ala or Cys or Absent or Val or Leu
  MISC_FEATURE (114)..(114): Ala or Arg or Lys or Absent or Pro
  MISC_FEATURE (115)..(115): Glu or Pro or Gly or Absent or Asp or Ser
  MISC_FEATURE (116)..(116): Ser or Pro or Ala or Absent or Arg or Cys
  MISC_FEATURE (117)..(117): Ala or Absent or Asn
  MISC_FEATURE (118)..(118): Ile or Phe or Ala or Absent or Val or Glu or Leu
  MISC_FEATURE (119)..(119): Asp or Gly or Ala or Absent or Leu or Lys or Thr
  MISC_FEATURE (120)..(120): Ala or Ser or Absent or Gln or Glu or Lys
  MISC_FEATURE (121)..(121): Arg or Ala or Val or Absent or Leu or Gln or Lys
  MISC_FEATURE (122)..(122): Leu or Ala or Pro or Absent or Gln or Lys or Ser
  MISC_FEATURE (123)..(123): Glu or Tyr or Ala or Ile or Absent or Cys or Lys or Met or Leu or Asn
  MISC_FEATURE (124)..(124): Gly or Ala or Absent or Val or Lys or Glu or Asp or Phe
  MISC_FEATURE (125)..(125): Asp or Ser or Gly or Arg or Absent or Ala or Leu or Val or Pro
  MISC_FEATURE (126)..(126): Asp or Arg or Ser or Gln or Absent or Thr or Leu or Lys or Asn
  MISC_FEATURE (127)..(127): Absent or Arg or Asp or Glu or Tyr
  MISC_FEATURE (128)..(128): Absent or Gly or Leu or Pro or Ser
  MISC_FEATURE (129)..(129): Absent or Gln or Glu or Arg or Phe
  MISC_FEATURE (130)..(130): Absent or Lys or Leu
  MISC_FEATURE (131)..(131): Asp or Absent or Gln or Pro or Glu or Ser
  MISC_FEATURE (132)..(132): Glu or Absent or Gln or Pro or Lys or Arg
  MISC_FEATURE (133)..(133): Ser or Absent or Gln or Phe or Leu or Ala or Asn
  MISC_FEATURE (134)..(134): Glu or Absent or Arg or Pro or Ala or Phe
  MISC_FEATURE (135)..(135): Asp or Ala or Ser or Pro or Absent
  MISC_FEATURE (136)..(136): Asp or Arg or Gly or Absent or His or Pro or Ala or Asn or Leu
  MISC_FEATURE (137)..(137): Ala or Ser or Absent or Gly or Thr
  MISC_FEATURE (138)..(138): Phe or Lys or Ser or Absent or Ala or Pro or Gly
  MISC_FEATURE (139)..(139): Tyr or Thr or Val or Absent or Asp or Lys or Ala or Ser or Leu
  MISC_FEATURE (140)..(140): Ser or Ala or Cys or Absent or Thr or Lys or Ile
  MISC_FEATURE (141)..(141): Trp or Ser or Gly or Ala or Absent or Gln or any naturally occurring amino acid
  MISC_FEATURE (142)..(142): Arg or Asn or Ser or Absent or Lys or Ala
  MISC_FEATURE (143)..(143): Val or Ala or Ser or Absent or Gly or Lys or Met or Pro or Gln
  MISC_FEATURE (144)..(144): Gly or Thr or Absent or Ala or Val or Pro or Asn
  MISC_FEATURE (145)..(145): Gly or Pro or Ser or Absent or Val or Cys or Ala or Arg
  MISC_FEATURE (146)..(146): Ala or Arg or Gly or Absent or Lys
  MISC_FEATURE (147)..(147): Asn or Pro or Ser or Ala or Absent or Trp or Ile
  MISC_FEATURE (148)..(148): Asp or Gly or Absent or Thr or Ala or Arg
  MISC_FEATURE (149)..(149): Leu or Tyr or Ile or Absent or Ala or Pro or Met or Thr
  MISC_FEATURE (150)..(150): Lys or Asp or Ser or Thr or Absent or Glu or Gln or Gly
  MISC_FEATURE (151)..(151): Ile or Ala or Gly or Thr or Absent or Pro or Lys or Tyr
  MISC_FEATURE (152)..(152): Thr or Ser or Asn or Absent or Lys
  MISC_FEATURE (153)..(153): His or Thr or Ser or Absent or Gly or Leu or Ile or Cys or Val
  MISC_FEATURE (154)..(154): Leu or Ser or Absent or Gln or Ala or Val or Asn or Tyr
  MISC_FEATURE (155)..(155): Arg or Phe or Ser or Tyr or Absent or Gly or Thr
  MISC_FEATURE (156)..(156): Asp or Ser or Gly or Val or Absent
  MISC_FEATURE (157)..(157): Val or Pro or Ser or Ile or Absent or Ala or Asp or Glu
  MISC_FEATURE (158)..(158): Tyr or Ser or Glu or Absent or Gly or Ala
  MISC_FEATURE (159)..(159): Arg or Val or Ser or Pro or Absent or Gly
  MISC_FEATURE (160)..(160): Gly or Arg or Ser or Absent
  MISC_FEATURE (161)..(161): Absent or Gly
  MISC_FEATURE (162)..(162): Absent or Ser
  MISC_FEATURE (163)..(163): Absent or Gly
  MISC_FEATURE (164)..(164): Absent or Gly
  MISC_FEATURE (165)..(165): Absent or Ala
  MISC_FEATURE (166)..(166): Absent or Arg
  MISC_FEATURE (167)..(167): Absent or His
  MISC_FEATURE (168)..(168): Absent or Trp
  MISC_FEATURE (169)..(169): Absent or Trp
  MISC_FEATURE (170)..(170): Absent or Arg
  MISC_FEATURE (171)..(171): Absent or Asp
  MISC_FEATURE (172)..(172): Absent or Asp
  MISC_FEATURE (173)..(173): Absent or Val
  MISC_FEATURE (174)..(174): Absent or Thr
  MISC_FEATURE (175)..(175): Absent or Pro
  MISC_FEATURE (176)..(176): Absent or Pro
  MISC_FEATURE (177)..(177): Absent or Ser
  MISC_FEATURE (178)..(178): Absent or Pro
  MISC_FEATURE (179)..(179): Absent or Gln
  MISC_FEATURE (180)..(180): Absent or Ala or Val or Tyr
  MISC_FEATURE (181)..(181): Absent or Ala or Ser or Gly
  MISC_FEATURE (182)..(182): Absent or Ala or Phe
  MISC_FEATURE (183)..(183): Absent or Gly
  MISC_FEATURE (184)..(184): Absent or Ala or Arg
  MISC_FEATURE (185)..(185): Absent or Ala or Val
  MISC_FEATURE (186)..(186): Absent or Tyr or Leu
  MISC_FEATURE (187)..(187): Absent or Gly or Thr
  MISC_FEATURE (188)..(188): Absent or Ser or Pro
  MISC_FEATURE (189)..(189): Absent or Tyr or Ser
  MISC_FEATURE (190)..(190): Absent or Gly or Pro
  MISC_FEATURE (191)..(191): Absent or Ser or Pro or Gly
  MISC_FEATURE (192)..(192): Absent or Gly
  MISC_FEATURE (193)..(193): Absent or Ser or Asp
  MISC_FEATURE (194)..(194): Absent or Asp or Ile
  MISC_FEATURE (195)..(195): Asp or Absent or Met
  MISC_FEATURE (196)..(196): Val or Glu or Thr or Absent or Asp or Tyr or Gly
  MISC_FEATURE (197)..(197): Pro or Ile or Asp or Absent or Val or Tyr or Phe or Ala
  MISC_FEATURE (198)..(198): Leu or Phe or Pro or Ala or Absent or Asp or Val or Ile
  MISC_FEATURE (199)..(199): Val or Leu or Ala or Absent or Glu
  MISC_FEATURE (200)..(200): Ala or Pro or Leu or Absent or any naturally occurring amino acid or Asp or Glu
  MISC_FEATURE (201)..(201): Gln or Glu or Pro or Absent or Asp
  MISC_FEATURE (202)..(202): Pro or His or Cys or Absent or Leu or Val
  MISC_FEATURE (203)..(203): Ser or Ile or Asn or Pro or Absent or Lys
  MISC_FEATURE (204)..(204): Pro or Gly or Glu or Absent or Asn or His
  MISC_FEATURE (205)..(205): Phe or Glu or Ile or Met or Absent or Leu
  MISC_FEATURE (206)..(206): Cys or Met or Thr or Arg or Absent or Ser
  MISC_FEATURE (207)..(207): Thr or Tyr or Arg or Ser or Absent or Asn or Asp
  MISC_FEATURE (208)..(208): Thr or Asn or Met or Lys or Absent or Tyr or Phe or Trp
  MISC_FEATURE (209)..(209): Thr or Leu or Pro or Absent or Met
  MISC_FEATURE (210)..(210): Ala or Pro or Val or Met or Absent or Thr or Ser
  MISC_FEATURE (211)..(211): Cys or Lys or Arg or Val or Pro or Absent or Asn or Glu or Gln or Asp or Gly
  MISC_FEATURE (212)..(212): Pro or Arg or Absent or Leu
  MISC_FEATURE (213)..(213): Leu or Pro or Absent or Asp
  MISC_FEATURE (214)..(214): Ser or Ala or Absent
  MISC_FEATURE (215)..(215): Gly or Pro or Asn or Absent
  MISC_FEATURE (216)..(216): Pro or Phe or Absent or Ile
  MISC_FEATURE (217)..(217): Arg or Ala or Pro or Val or Absent or Ile or Leu
  MISC_FEATURE (218)..(218): Thr or Arg or Gln or Absent or Val or Leu
  MISC_FEATURE (219)..(219): Ser or Gly or Gln or His or Absent or Asp or Val
  MISC_FEATURE (220)..(220): Val or Gly or Pro or Asn or Absent or Cys
  MISC_FEATURE (221)..(221): Glu or Ala or Gln or Asn or Absent or His
  MISC_FEATURE (222)..(222): Phe or Leu or Pro or Absent or Gln or Val
  MISC_FEATURE (223)..(223): Asn or Trp or Gly or Absent
  MISC_FEATURE (224)..(224): Ser or Gln or Gly or Absent or Phe
  MISC_FEATURE (225)..(225): Asn or Phe or Gly or Absent or Leu
  MISC_FEATURE (226)..(226): Phe or Gly or Ser or Absent or Thr
  MISC_FEATURE (227)..(227): Val or Leu or Ser or Absent or Thr
  MISC_FEATURE (228)..(228): Ser or Gly or Absent or Phe or Tyr
  MISC_FEATURE (229)..(229): Asn or Gln or Ser or Asp or Absent or Pro
  MISC_FEATURE (230)..(230): Ser or Arg or Gln or Absent or Asn
  MISC_FEATURE (231)..(231): Asp or Phe or Ser or Absent or Pro
  MISC_FEATURE (232)..(232): Arg or Ile or Gly or Absent or Leu
  MISC_FEATURE (233)..(233): Val or Asp or Ser or Absent or Ile or Gln or Lys
  MISC_FEATURE (234)..(234): Leu or Asn or Ser or Ala or Absent or Arg or Asp or Thr or Gln or Tyr
  MISC_FEATURE (235)..(235): Leu or Gly or Ser or Absent or His or Asn
  MISC_FEATURE (236)..(236): Asn or Asp or Thr or Absent or His or Pro or Leu
  MISC_FEATURE (237)..(237): Ser or Pro or Absent or Thr or Ala
  MISC_FEATURE (238)..(238): Val or Phe or Met or Absent or Tyr
  MISC_FEATURE (239)..(239): Ala or Ser or Lys or Arg or Absent or Glu or Thr
  MISC_FEATURE (240)..(240): Phe or Leu or Val or Absent or Ile or Ala
  MISC_FEATURE (241)..(241): Gly or Asn or Tyr or Ala or Absent or Glu or Val or Thr
  MISC_FEATURE (242)..(242): Ser or Pro or Absent or Lys or Arg
  MISC_FEATURE (243)..(243): Ser or Leu or Pro or Absent or Thr or Gln or Lys
  MISC_FEATURE (244)..(244): Ala or Arg or Ser or Asp or Absent or Glu or Tyr or Asn
  MISC_FEATURE (245)..(245): Asp or Thr or Ser or Absent or Phe
  MISC_FEATURE (246)..(246): Pro or Thr or Ala or Absent or Val
  MISC_FEATURE (247)..(247): Thr or Gly or Ser or Absent or Asn or Asp or Glu
  MISC_FEATURE (248)..(248): Gln or Ser or His or Ala or Absent or Thr or Pro or Phe or Glu
  MISC_FEATURE (249)..(249): Thr or Absent or Gly or Ser or Asp or Glu
  MISC_FEATURE (250)..(250): Cys or Absent or Arg or Asp
  MISC_FEATURE (251)..(251): Ser or Absent or Gln or Thr or Val
  MISC_FEATURE (252)..(252): Absent or Pro
  MISC_FEATURE (253)..(253): Absent or Pro
  MISC_FEATURE (254)..(254): Absent or Ser
  MISC_FEATURE (255)..(255): Absent or Arg
  MISC_FEATURE (256)..(256): Absent or Pro
  MISC_FEATURE (257)..(257): Absent or Ala
  MISC_FEATURE (258)..(258): Absent or Ala
  MISC_FEATURE (259)..(259): Absent or Ala
  MISC_FEATURE (260)..(260): Absent or Ala
  MISC_FEATURE (261)..(261): Absent or Ala
  MISC_FEATURE (262)..(262): Absent or Ala
  MISC_FEATURE (263)..(263): Absent or Ala
  MISC_FEATURE (264)..(264): Absent or Ser
  MISC_FEATURE (265)..(265): Absent or Arg
  MISC_FEATURE (266)..(266): Absent or Thr
  MISC_FEATURE (267)..(267): Absent or Tyr
  MISC_FEATURE (268)..(268): Absent or Ala
  MISC_FEATURE (269)..(269): Absent or Glu
  MISC_FEATURE (270)..(270): Absent or Phe
  MISC_FEATURE (271)..(271): Absent or Gln
  MISC_FEATURE (272)..(272): Absent or Ser
  MISC_FEATURE (273)..(273): Absent or Ala
  MISC_FEATURE (274)..(274): Absent or Pro
  MISC_FEATURE (275)..(275): Absent or Pro
  MISC_FEATURE (276)..(276): Absent or Pro
  MISC_FEATURE (277)..(277): Absent or Pro or Ser
  MISC_FEATURE (278)..(278): Absent or Pro or Asn
  MISC_FEATURE (279)..(279): Absent or Met or Phe
  MISC_FEATURE (280)..(280): Absent or Pro or Phe or Cys
  MISC_FEATURE (281)..(281): Absent or Glu or Pro or Ala
  MISC_FEATURE (282)..(282): Absent or Ser or Ala or His or Asp
  MISC_FEATURE (283)..(283): Absent or Gly
  MISC_FEATURE (284)..(284): Absent or Ala or Gly
  MISC_FEATURE (285)..(285): Absent or Ala or Lys
  MISC_FEATURE (286)..(286): Absent or Ala or Gly
  MISC_FEATURE (287)..(287): Absent or Leu or Gly
  MISC_FEATURE (288)..(288): Absent or His or Ile
  MISC_FEATURE (289)..(289): Absent or Asn
  MISC_FEATURE (290)..(290): Leu or Absent or Val
  MISC_FEATURE (291)..(291): Trp or Absent or Arg or Leu
  MISC_FEATURE (292)..(292): Ala or Glu or Gly or Thr or Absent
  MISC_FEATURE (293)..(293): Glu or Ala or Arg or Asn or Absent or Val
  MISC_FEATURE (294)..(294): Thr or Ala or Gly or Ser or Absent or Val
  MISC_FEATURE (295)..(295): Phe or Ser or Val or Met or Asp or Absent or Lys or Gln
  MISC_FEATURE (296)..(296): Asp or Absent or Ser or Lys
  MISC_FEATURE (297)..(297): Absent or Thr or Ile or Ala or Val
  MISC_FEATURE (298)..(298): Absent or Leu or Val
  MISC_FEATURE (299)..(299): Absent or Gly or Val or Gln
  MISC_FEATURE (300)..(300): Pro or Glu or Asp or Absent or His or Arg or Gln or Asn
  MISC_FEATURE (301)..(301): Asn or Glu or Arg or Gln or Asp or Absent or Lys or Ile
  MISC_FEATURE (302)..(302): Gly or Asp or Leu or Ser or Absent or Asn or Thr
  MISC_FEATURE (303)..(303): Cys or Val or Asn or Absent or Ser or Gly or Asp
  MISC_FEATURE (304)..(304): Asp or Ala or Val or Met or Ile or Absent or Pro
  MISC_FEATURE (305)..(305): Tyr or Phe or Ala or Thr or Leu or Absent or Gly
  MISC_FEATURE (306)..(306): Val or Ser or Leu or Absent or Arg or His
  MISC_FEATURE (307)..(307): Pro or Asp or Absent or Gly
  MISC_FEATURE (308)..(308): Gln or Glu or Ala or Pro or Absent or Thr or Ile or Val
  MISC_FEATURE (309)..(309): Trp or Arg or Absent or His
  MISC_FEATURE (310)..(310): Val or Ala or Absent or Phe
  MISC_FEATURE (311)..(311): Val or Ile or Absent or Arg
  MISC_FEATURE (313)..(313): Ala or Cys or Absent or Gln
  MISC_FEATURE (315)..(315): Pro or Ala or Absent
  MISC_FEATURE (317)..(317): Ser or Glu or Ala or Arg or Lys or Absent or Gln or Asp
  MISC_FEATURE (318)..(318): Glu or Val or Ala or Thr or Absent or Arg or Lys or Gln
  MISC_FEATURE (319)..(319): Val or Ile or Absent
  MISC_FEATURE (320)..(320): Tyr or Trp or Absent or Phe
  MISC_FEATURE (321)..(321): Phe or Tyr or Trp or Absent
  MISC_FEATURE (322)..(322): Asp or Absent or Gln or Lys
  MISC_FEATURE (323)..(323): Ser or Pro or Absent
  MISC_FEATURE (324)..(324): Asp or Lys or Ala or Ser or Gln or Absent or Glu
  MISC_FEATURE (325)..(325): Glu or Lys or Ala or Gln or Absent or Asp
  MISC_FEATURE (327)..(327): His or Arg or Asn or Thr or Ser or Absent
  MISC_FEATURE (329)..(329): Ala or Absent or Cys
  MISC_FEATURE (330)..(330): Ile or Val or Absent
  MISC_FEATURE (340)..(340): Ile or Leu or Val or Absent
  MISC_FEATURE (342)..(342): Asp or Absent or Thr
  MISC_FEATURE (344)..(344): Ile or Val or Absent
  MISC_FEATURE (345)..(345): Arg or Gln or Absent
  MISC_FEATURE (346)..(346): Ser or Gly or Asn or Absent or Glu
  MISC_FEATURE (347)..(347): Leu or Ile or Absent
  MISC_FEATURE (349)..(349): Asn or Leu or His or Tyr or Absent or Cys
  MISC_FEATURE (350)..(350): Thr or Arg or Lys or Absent or Gly
  MISC_FEATURE (352)..(352): Glu or Thr or Absent or His or Tyr or Asp or Asn or Trp
  MISC_FEATURE (353)..(353): Val or Asp or Absent or Tyr or Thr
  MISC_FEATURE (354)..(354): Gly or Absent or Met or Gln
  MISC_FEATURE (358)..(358): Lys or Glu or Pro or Absent or Thr or Ser or His or Arg
  MISC_FEATURE (359)..(359): Lys or Asp or Glu or Absent or Ser or Arg or Asn
  MISC_FEATURE (360)..(360): Absent or Gly or Asp
  MISC_FEATURE (361)..(361): Absent or Gln or Lys or Asn
  MISC_FEATURE (362)..(362): Ile or Absent or Val
  MISC_FEATURE (363)..(363): Ser or Val or Leu or Absent
  MISC_FEATURE (366)..(366): Arg or Lys or Cys or Absent or Glu or Asp
  MISC_FEATURE (367)..(367): Tyr or Asp or Absent or Gly or Cys
  MISC_FEATURE (369)..(369): Phe or Leu or Absent or Tyr
  MISC_FEATURE (370)..(370): Lys or Arg or Ala or Absent
  MISC_FEATURE (373)..(373): Phe or Asp or Tyr or Absent
  MISC_FEATURE (374)..(374): Ser or Ala or Pro or Asp or Glu or Absent
  MISC_FEATURE (375)..(375): Gly or Asp or Arg or Pro or Absent or Lys
  MISC_FEATURE (376)..(376): Val or Pro or His or Gln or Asp or Absent or Asn
  MISC_FEATURE (377)..(377): Absent or Glu or Pro
  MISC_FEATURE (378)..(378): Absent or Asn
  MISC_FEATURE (379)..(379): Absent or Ala
  MISC_FEATURE (380)..(380): Absent or Leu
  MISC_FEATURE (381)..(381): Absent or Glu or Ala or Val
  MISC_FEATURE (382)..(382): Glu or Ala or Lys or Absent
  MISC_FEATURE (383)..(383): Phe or Pro or Absent or Thr
  MISC_FEATURE (384)..(384): Met or Arg or Ile or Absent or Val or Leu
  MISC_FEATURE (385)..(385): Lys or Val or Thr or Absent or Glu or Ala or Pro or Gln or Asp
  MISC_FEATURE (388)..(388): Lys or Ser or Arg or Absent or Pro
  MISC_FEATURE (389)..(389): Lys or Ala or Arg or Absent or Phe
  MISC_FEATURE (390)..(390): Thr or Ile or Ala or Val or Tyr or Absent or Met or Ser
  MISC_FEATURE (392)..(392): Arg or Asp or Glu or Absent or Asn
  MISC_FEATURE (393)..(393): Asn or Asp or Gly or Ser or Absent
  MISC_FEATURE (396)..(396): Thr or Ile or Leu or Asp or Asn or Lys or Absent
  MISC_FEATURE (400)..(400): Ser or Thr or Ile or Phe or Absent
  MISC_FEATURE (401)..(401): Met or Leu or Ile or Ser or Val or Absent or Phe
  MISC_FEATURE (409)..(409): Gly or Ala or Absent or His or Gln or Tyr
  MISC_FEATURE (411)..(411): Val or Met or Leu or Ile or Absent or Thr
  MISC_FEATURE (412)..(412): Gln or Pro or Gly or Arg or Lys or Absent or Ala or Ser or Asp
  MISC_FEATURE (413)..(413): Lys or Ala or Val or Glu or Absent
  MISC_FEATURE (416)..(416): Glu or Gln or Ser or Lys or Arg or Absent or Asp
  MISC_FEATURE (417)..(417): Ser or Lys or Arg or Absent or Cys or Asn
  MISC_FEATURE (418)..(418): Ile or Leu or Absent
  MISC_FEATURE (419)..(419): Ile or Glu or Asp or Absent or Gln or Lys
  MISC_FEATURE (420)..(420): His or Glu or Met or Leu or Absent or Asp
  MISC_FEATURE (421)..(421): His or Met or Trp or Absent or Arg
  MISC_FEATURE (423)..(423): Ile or Leu or Absent or Thr
  MISC_FEATURE (425)..(425): Met or Phe or Absent or Gln
  MISC_FEATURE (427)..(427): Phe or Absent or Tyr
  MISC_FEATURE (428)..(428): Val or Absent or Ile
  MISC_FEATURE (432)..(432): Asn or Asp or Absent or Met
  MISC_FEATURE (434)..(434): Thr or Ser or Gly or Absent or Phe or any naturally occurring amino acid
  MISC_FEATURE (435)..(435): His or Leu or Asn or Absent or Arg or Gln
  MISC_FEATURE (436)..(436): Ala or Arg or Absent or Lys or Gln
  MISC_FEATURE (437)..(437): Gly or Ala or Absent
  MISC_FEATURE (439)..(439): Asn or Leu or Absent or Ala or Ser
  MISC_FEATURE (440)..(440): Ala or Absent or Thr or Val or Leu
  MISC_FEATURE (442)..(442): Ser or Asp or Absent or Asn or His or Tyr
  MISC_FEATURE (443)..(443): Asp or Lys or Absent or Ala or Glu or Gln
  MISC_FEATURE (444)..(444): Glu or Leu or Absent or Met
  MISC_FEATURE (445)..(445): Cys or Absent or Val
  MISC_FEATURE (446)..(446): Ala or Arg or Absent or Glu or Gln or Lys
  MISC_FEATURE (447)..(447): Lys or Glu or Absent or Gln or Ala or Arg
  MISC_FEATURE (448)..(448): Arg or Lys or Absent or His or Gln
  MISC_FEATURE (449)..(449): Gly or Asn or Absent or Asp
  MISC_FEATURE (450)..(450): Val or Leu or Absent
  MISC_FEATURE (451)..(451): Lys or Thr or Absent or Pro or Cys or Gln
  MISC_FEATURE (452)..(452): Val or Thr or Absent or Cys
  MISC_FEATURE (453)..(453): Ser or Absent or Ala
  MISC_FEATURE (455)..(455): Val or Ile or Absent or Ala
  MISC_FEATURE (457)..(457): Val or Absent or Ile
  MISC_FEATURE (460)..(460): Thr or Absent or Ser
  MISC_FEATURE (466)..(466): Leu or Absent or Ala or Pro or Asp
  MISC_FEATURE (467)..(467): Leu or Gln or Ile or Absent or Val
  MISC_FEATURE (485)..(485): Ile or Leu or Gly
  MISC_FEATURE (495)..(495): Ala or Ile or Val
  MISC_FEATURE (496)..(496): Tyr or Asp or Arg or Glu or Gln
  MISC_FEATURE (499)..(499): Val or Ile or Leu
  MISC_FEATURE (508)..(508): Gln or Asn or Asp or Tyr
  MISC_FEATURE (511)..(511): Absent or Ile
  MISC_FEATURE (512)..(512): Absent or Phe
  MISC_FEATURE (513)..(513): Absent or Ile
  MISC_FEATURE (514)..(514): Absent or Ser
  MISC_FEATURE (515)..(515): Absent or Leu
  MISC_FEATURE (516)..(516): Absent or Phe
  MISC_FEATURE (517)..(517): Absent or Lys
  MISC_FEATURE (522)..(522): Phe or His or Gln or Ser or Absent or Tyr
  MISC_FEATURE (523)..(523): Absent or Thr
  MISC_FEATURE (524)..(524): Absent or Val
  MISC_FEATURE (525)..(525): Absent or Asn
  MISC_FEATURE (526)..(526): Absent or Ser
  MISC_FEATURE (527)..(527): Absent or Cys
  MISC_FEATURE (528)..(528): Absent or Ile
  MISC_FEATURE (529)..(529): Absent or Phe
  MISC_FEATURE (530)..(530): Absent or Cys
  MISC_FEATURE (531)..(531): Absent or Ser
  MISC_FEATURE (532)..(532): Absent or Thr
  MISC_FEATURE (533)..(533): Absent or Met
  MISC_FEATURE (534)..(534): Absent or Ile
  MISC_FEATURE (535)..(535): Absent or Ile
  MISC_FEATURE (536)..(536): Absent or Thr
  MISC_FEATURE (537)..(537): Absent or any naturally occurring amino acid
  MISC_FEATURE (538)..(538): Absent or Leu
  MISC_FEATURE (539)..(539): Absent or Thr
  MISC_FEATURE (540)..(540): Absent or Lys
  MISC_FEATURE (541)..(541): Absent or Leu
  MISC_FEATURE (542)..(542): Absent or Phe
  MISC_FEATURE (543)..(543): Absent or any naturally occurring amino acid
  MISC_FEATURE (544)..(544): Absent or Asn
  MISC_FEATURE (545)..(545): Absent or Pro
  MISC_FEATURE (546)..(546): Absent or Phe
  MISC_FEATURE (547)..(547): Absent or Gln
  MISC_FEATURE (548)..(548): Absent or Leu
  MISC_FEATURE (549)..(549): Absent or Met
  MISC_FEATURE (550)..(550): Absent or Gln
  MISC_FEATURE (551)..(551): Absent or Val
  MISC_FEATURE (552)..(552): Absent or Leu
  MISC_FEATURE (553)..(553): Absent or Leu
  MISC_FEATURE (554)..(554): Absent or Gln
  MISC_FEATURE (555)..(555): Absent or Cys
  MISC_FEATURE (557)..(557): Thr or Ala or Ser
  MISC_FEATURE (562)..(562): Gln or Asn or Val or Tyr or Asp
  MISC_FEATURE (578)..(578): Pro or Ser or Asp or Absent or Lys or Glu or Arg or Gln
  MISC_FEATURE (579)..(579): Asn or Gly or His or Absent or Arg
  MISC_FEATURE (585)..(585): Val or Ile or Leu or Ala
  MISC_FEATURE (586)..(586): Arg or Val or Ala or Asp or Glu or any naturally occurring amino acid or Gly
  MISC_FEATURE (587)..(587): Asn or Arg or Gly or Ser or Lys or Gln
  MISC_FEATURE (589)..(589): Leu or Ile or Phe or Arg
  MISC_FEATURE (590)..(590): Asp or Glu or Ala or Lys or Arg
  MISC_FEATURE (591)..(591): Thr or Arg or Ala or Lys or Asp or Glu
  MISC_FEATURE (592)..(592): Gln or Lys or Asn or Ser
  MISC_FEATURE (595)..(595): Ala or Cys or Val or Met
  MISC_FEATURE (597)..(597): Absent or any naturally occurring amino acid
  MISC_FEATURE (600)..(600): Leu or Val or Ile
  MISC_FEATURE (609)..(609): Val or Leu or Met or Ile or Absent
  MISC_FEATURE (610)..(610): Thr or Gly or Glu or Val or Ala or Absent or Ser
  MISC_FEATURE (611)..(611): Absent or Arg or Gln or Lys or Glu
  MISC_FEATURE (613)..(613): Absent or Thr
  MISC_FEATURE (614)..(614): Ser or Met or Gln or Asp or Ala or Absent or Leu or Val
  MISC_FEATURE (615)..(615): Thr or Ile or Gln or Gly or Asn or Arg or Glu or His
  MISC_FEATURE (616)..(616): Gly or Pro or Phe or Leu or Lys or Ser or Ala or Asn
  MISC_FEATURE (617)..(617): Absent or Val or Gln or Thr or Met or Ala or Asn
  MISC_FEATURE (618)..(618): Absent or Thr or Ile or Gly or Asp or Glu or Asn or Ser
  MISC_FEATURE (619)..(619): Absent or Glu or Pro or Gly or Thr or Ala or Gln or Leu
  MISC_FEATURE (620)..(620): Val or Thr or any naturally occurring amino acid or His or Gln or Arg or Lys
  MISC_FEATURE (627)..(627): Lys or Val or Ala or Ile or Leu
  MISC_FEATURE (629)..(629): Gly or Gln or Ala or Lys or Leu
  MISC_FEATURE (631)..(631): Ile or Phe or Gly or Val
  MISC_FEATURE (633)..(633): Gln or Lys or Gly or Ala or Ile or Pro or Leu or Tyr
  MISC_FEATURE (636)..(636): Cys or Gln or Gly or Lys or Arg or Ile or Phe or Ser
  MISC_FEATURE (637)..(637): Lys or Gln or Gly or Asp or Asn or Leu or Absent or Ala or Phe or Thr
  MISC_FEATURE (638)..(638): Gln or Lys or Gly or Glu or Absent or Met or Ile
  MISC_FEATURE (639)..(639): Leu or Gly or Phe or Asp or Absent or Ile
  MISC_FEATURE (641)..(641): Ser or Glu or Gly or Ala or Lys or Absent or Asp or Asn
  MISC_FEATURE (642)..(642): Glu or Ala or Lys or Tyr or His or Absent
  MISC_FEATURE (644)..(644): Lys or Pro or Absent or Ala or Gly or Thr or Gln
  MISC_FEATURE (645)..(645): Absent or Val or Lys or Arg or Ala
  MISC_FEATURE (646)..(646): Absent or Gly or Lys or Thr or Gln or Val or Glu
  MISC_FEATURE (647)..(647): Absent or Asp or Ala or Thr or Arg or Pro or Gln or Phe
  MISC_FEATURE (648)..(648): Absent or Ala
  MISC_FEATURE (649)..(649): Absent or Ser or His or Asn or Lys or Arg
  MISC_FEATURE (650)..(650): Absent or Gly or Phe or Leu or Ile or Met or Glu
  MISC_FEATURE (651)..(651): Absent or Asn or Asp or Glu or Pro or Ser or Ala or Thr
  MISC_FEATURE (652)..(652): Cys or Val or Pro or Ala or Absent or Ile or Leu
  MISC_FEATURE (653)..(653): Asp or Val or Absent or Thr or Asn
  MISC_FEATURE (654)..(654): Ile or Leu or Absent or Met
  MISC_FEATURE (660)..(660): Thr or Val or Ser or Absent or Lys
  MISC_FEATURE (665)..(665): Gly or Ala or Arg or Ser or Absent
  MISC_FEATURE (666)..(666): Cys or Ile or Val or Absent
  MISC_FEATURE (667)..(667): Gln or Arg or Lys or Ser or Pro or Absent
  MISC_FEATURE (668)..(668): Ala or Thr or Met or Absent or Ser
  MISC_FEATURE (669)..(669): Asn or His or Thr or Absent
  MISC_FEATURE (670)..(670): Ala or Phe or Thr or Ser or Absent
  MISC_FEATURE (671)..(671): His or Ser or Arg or Asn or Absent or Ala
  MISC_FEATURE (673)..(673): Ser or Ala or Arg or Absent or Asn
  MISC_FEATURE (674)..(674): Ile or Val or Absent
  MISC_FEATURE (677)..(677): Thr or Ser or Arg or Lys or Absent
  MISC_FEATURE (678)..(678): Val or Ile or Ala or Absent or Leu
  MISC_FEATURE (680)..(680): Gly or Ala or Absent
  MISC_FEATURE (681)..(681): Gln or Arg or His or Absent
  MISC_FEATURE (682)..(682): Asn or Absent or Gly or Ser
  MISC_FEATURE (684)..(684): Val or Absent or Ile or Leu
  MISC_FEATURE (688)..(688): Phe or Absent or Met
  MISC_FEATURE (691)..(691): Phe or Leu or Tyr or Absent
  MISC_FEATURE (694)..(694): Ile or Val or Absent or Phe or Cys
  MISC_FEATURE (697)..(697): Gly or Absent or Ala
  MISC_FEATURE (698)..(698): Thr or Met or Leu or Absent or Pro
  MISC_FEATURE (699)..(699): Val or Cys or Absent or Ile
  MISC_FEATURE (700)..(700): Ser or Asn or Absent
  MISC_FEATURE (701)..(701): Ala or Gly or Ser or Thr or Absent or Asn
  MISC_FEATURE (702)..(702): His or Absent or Arg
  MISC_FEATURE (703)..(703): Thr or Tyr or Absent or His or Gln
  MISC_FEATURE (704)..(704): Ala or Val or Absent or Cys or Ser
  MISC_FEATURE (706)..(706): Leu or Absent or Ile
  MISC_FEATURE (708)..(708): Ile or Absent or Phe
  MISC_FEATURE (709)..(709): Pro or Absent or Tyr or Phe or Asn or Asp or Lys
  MISC_FEATURE (710)..(710): Arg or Pro or Leu or Val or Thr or Absent or Tyr or His
  MISC_FEATURE (711)..(711): Met or Val or Ile or Absent
  MISC_FEATURE (712)..(712): Ile or Thr or Absent or Ser or Val
  MISC_FEATURE (713)..(713): Glu or Ser or Gln or Absent or Arg or Ala
  MISC_FEATURE (714)..(714): His or Ala or Absent or Lys or Arg or Thr
  MISC_FEATURE (715)..(715): Glu or Pro or Ala or Absent or Gln or Thr or Ser
  MISC_FEATURE (716)..(716): Arg or Absent or Asn or Lys
  MISC_FEATURE (717)..(717): Leu or Thr or Arg or Lys or Absent or Ala or Asn
  MISC_FEATURE (719)..(719): Asp or Asn or Absent or Val or Glu or Lys
  MISC_FEATURE (720)..(720): Pro or Absent or Ile or His or Leu or Val
  MISC_FEATURE (721)..(721): Asp or Glu or Trp or Arg or Lys or Absent or Thr or Ala
  MISC_FEATURE (722)..(722): Gly or Absent or Asp or Ala
  MISC_FEATURE (724)..(724): Met or Ala or Arg or Absent
  MISC_FEATURE (726)..(726): Absent or any naturally occurring amino acid
  MISC_FEATURE (727)..(727): His or Glu or Asn or Absent or Ala
  MISC_FEATURE (729)..(729): Thr or Leu or Absent or Val
  MISC_FEATURE (730)..(730): Leu or Arg or Ile or Absent or Met
  MISC_FEATURE (731)..(731): Glu or Phe or Ala or Thr or Absent or Cys or Ser
  MISC_FEATURE (732)..(732): Ser or Ala or Asp or Absent
  MISC_FEATURE (733)..(733): Thr or Ile or Asn or Absent
  MISC_FEATURE (734)..(734): Gly or Arg or Absent or Asn
  MISC_FEATURE (737)..(737): Asp or Thr or Ser or Absent or Cys or Asn
  MISC_FEATURE (739)..(739): Phe or Ser or His or Gln or Ala or Absent or Leu or Met
  MISC_FEATURE (740)..(740): Absent or Lys or Pro or Ser or His or Asn or Arg
  MISC_FEATURE (741)..(741): Absent or Ser or Pro or Thr or His or Gly or Tyr
  MISC_FEATURE (742)..(742): Absent or Pro or Glu or Lys or Ser
  MISC_FEATURE (743)..(743): Absent or Pro or Asp or Lys or Glu
  MISC_FEATURE (744)..(744): Absent or Gln or Gly
  MISC_FEATURE (745)..(745): Absent or Glu or Ala
  MISC_FEATURE (746)..(746): Absent or Gln or Val or Ile
  MISC_FEATURE (747)..(747): Absent or Leu or Glu or Ile or Met or Val
  MISC_FEATURE (748)..(748): Absent or Ala or Lys or Asn or His or Glu or Gln
  MISC_FEATURE (749)..(749): Absent or Ala or Met or Leu or Gly or Val or Glu or Arg
  MISC_FEATURE (750)..(750): Absent or Ala or Gly or Lys or Gln or Arg
  MISC_FEATURE (751)..(751): Absent or Ala or Gln or His or Arg
  MISC_FEATURE (752)..(752): Absent or Ala or Asp
  MISC_FEATURE (753)..(753): Absent or Val or Asp or Glu
  MISC_FEATURE (754)..(754): Absent or Ala or Glu or Asp or Val
  MISC_FEATURE (755)..(755): Absent or Ala or Glu or Val
  MISC_FEATURE (756)..(756): Absent or Glu or Arg or His or Leu or Lys
  MISC_FEATURE (757)..(757): Absent or Arg or His or Ser or Gly or Val or Leu
  MISC_FEATURE (758)..(758): Absent or Glu or His or Asp or Asn
  MISC_FEATURE (759)..(759): Absent or Ala or Leu or Met or Ser or Glu or Lys
  MISC_FEATURE (760)..(760): Absent or Ala or Pro or His or Glu or Gln
  MISC_FEATURE (761)..(761): Absent or Ala or Ile or Asn or Pro or Thr or Lys
  MISC_FEATURE (762)..(762): Absent or Gln or Val or Thr or Glu or Ile
  MISC_FEATURE (763)..(763): Absent or Ala or Pro or Gln or Glu
  MISC_FEATURE (764)..(764): Absent or Ala or Leu or Ser or Met or Glu
  MISC_FEATURE (765)..(765): Absent or Ala or Val or Leu or Asn or Ile
  MISC_FEATURE (766)..(766): Absent or Ala or Glu or Asp
  MISC_FEATURE (767)..(767): Absent or Ala or Gly or Asn
  MISC_FEATURE (768)..(768): Absent or Ala or Glu or Ser or Gly or Met
  MISC_FEATURE (769)..(769): Absent or Ala or Asn or Pro or Ser or Lys
  MISC_FEATURE (770)..(770): Absent or Val or Ser or Ala or Cys or Ile
  MISC_FEATURE (771)..(771): Absent or Ala or Leu or Lys or Pro or Thr
  MISC_FEATURE (772)..(772): Absent or Ala or Val or Cys or Gly or Pro or Asp or Ser or Leu
  MISC_FEATURE (773)..(773): Absent or Ala or Lys or Ser or Thr or Ile
  MISC_FEATURE (774)..(774): Absent or Ala or His or Asp or Ser or Lys
  MISC_FEATURE (775)..(775): Absent or Ser or Pro or Thr
  MISC_FEATURE (776)..(776): Absent or Asp or Gly or Ser
  MISC_FEATURE (777)..(777): Absent or Pro or Phe or Leu
  MISC_FEATURE (778)..(778): Absent or Val or Pro or Leu or Ser
  MISC_FEATURE (779)..(779): Absent or Met or Leu or Tyr or Ile
  MISC_FEATURE (780)..(780): Absent or Val or Leu or Ile or His
  MISC_FEATURE (781)..(781): Absent or Ser or Ala or Pro or Asp
  MISC_FEATURE (782)..(782): Absent or Gly or Asn or Lys or Phe
  MISC_FEATURE (783)..(783): Absent or Tyr or Ala or Cys or Ile or His or Gly
  MISC_FEATURE (784)..(784): Absent or Gly or Asn or Arg or Val or Thr or Ala
  MISC_FEATURE (785)..(785): Absent or Arg or Asp or Gly or Phe or Lys or Ser
  MISC_FEATURE (786)..(786): Absent or His or Gly or Ser or Thr or Asp or Lys
  MISC_FEATURE (787)..(787): Absent or Leu or Ala or Ile or Gln or Pro
  MISC_FEATURE (788)..(788): Absent or Asn or Ala or Gly or Pro or Tyr or Val
  MISC_FEATURE (789)..(789): Absent or Gly or Leu or Ala or Ile or Pro or Ser
  MISC_FEATURE (790)..(790): Absent or Thr or Cys or Glu or Val or Met or Leu
  MISC_FEATURE (791)..(791): Absent or Leu or Asn or Ser or Thr or Gln
  MISC_FEATURE (792)..(792): Absent or Ala or Gly or Arg or Asn
  MISC_FEATURE (793)..(793): Absent or Asp or Ala or Gly or Val
  MISC_FEATURE (794)..(794): Absent or Gly or Ala or Ser
  MISC_FEATURE (795)..(795): Absent or Ser or Arg
  MISC_FEATURE (796)..(796): Absent or Ser or Glu or Gln
  MISC_FEATURE (797)..(797): Absent or Ile or Leu or Ser
  MISC_FEATURE (798)..(798): Absent or Ala or Leu
  MISC_FEATURE (799)..(799): Absent or Gly or Leu
  MISC_FEATURE (800)..(800): Absent or Gly or Lys
  MISC_FEATURE (801)..(801): Absent or Gly
  MISC_FEATURE (802)..(802): Absent or Ser
  MISC_FEATURE (803)..(803): Absent or Gly
  MISC_FEATURE (804)..(804): Absent or Gly
  MISC_FEATURE (805)..(805): Absent or Gly
  MISC_FEATURE (806)..(806): Absent or Ser
  MISC_FEATURE (807)..(807): Absent or Ser
  MISC_FEATURE (808)..(808): Absent or Pro
  MISC_FEATURE (809)..(809): Absent or Ala
  MISC_FEATURE (810)..(810): Absent or Val
  MISC_FEATURE (811)..(811): Absent or Asp
  MISC_FEATURE (812)..(812): Absent or Ser
  MISC_FEATURE (813)..(813): Absent or Gly
  MISC_FEATURE (814)..(814): Absent or Gly
  MISC_FEATURE (815)..(815): Absent or Asp
  MISC_FEATURE (816)..(816): Absent or Ala
  MISC_FEATURE (817)..(817): Absent or Ala
  MISC_FEATURE (818)..(818): Absent or Ser
  MISC_FEATURE (819)..(819): Absent or Pro
  MISC_FEATURE (820)..(820): Absent or Thr
  MISC_FEATURE (821)..(821): Absent or Ala
  MISC_FEATURE (822)..(822): Absent or Ala
  MISC_FEATURE (823)..(823): Absent or Ala
  MISC_FEATURE (824)..(824): Absent or Ala
  MISC_FEATURE (825)..(825): Absent or Gly
  MISC_FEATURE (826)..(826): Absent or Ser
  MISC_FEATURE (827)..(827): Absent or Ala
  MISC_FEATURE (828)..(828): Absent or Ala
  MISC_FEATURE (829)..(829): Absent or Ala
  MISC_FEATURE (830)..(830): Absent or Ala
  MISC_FEATURE (831)..(831): Absent or Asp
  MISC_FEATURE (832)..(832): Absent or Pro
  MISC_FEATURE (833)..(833): Absent or Thr
  MISC_FEATURE (834)..(834): Absent or Ala
  MISC_FEATURE (835)..(835): Absent or Lys
  MISC_FEATURE (836)..(836): Absent or Pro
  MISC_FEATURE (837)..(837): Absent or Ala
  MISC_FEATURE (838)..(838): Absent or Ala
  MISC_FEATURE (839)..(839): Absent or Ala
  MISC_FEATURE (840)..(840): Absent or Ala
  MISC_FEATURE (841)..(841): Absent or Val
  MISC_FEATURE (842)..(842): Absent or Ser
  MISC_FEATURE (843)..(843): Absent or Asp
  MISC_FEATURE (844)..(844): Absent or Asp
  MISC_FEATURE (845)..(845): Absent or Val
  MISC_FEATURE (846)..(846): Absent or Asp
  MISC_FEATURE (847)..(847): Absent or Glu
  MISC_FEATURE (848)..(848): Absent or Asp
  MISC_FEATURE (849)..(849): Absent or Val
  MISC_FEATURE (850)..(850): Absent or Asp
  MISC_FEATURE (851)..(851): Absent or Ala
  MISC_FEATURE (852)..(852): Absent or Gly
  MISC_FEATURE (853)..(853): Absent or Val
  MISC_FEATURE (854)..(854): Absent or Asp
  MISC_FEATURE (855)..(855): Absent or Ala
  MISC_FEATURE (856)..(856): Absent or Pro
  MISC_FEATURE (857)..(857): Absent or Ala
  MISC_FEATURE (858)..(858): Absent or Ala
  MISC_FEATURE (859)..(859): Absent or Ser
  MISC_FEATURE (860)..(860): Absent or Glu
  MISC_FEATURE (861)..(861): Absent or Gly
  MISC_FEATURE (862)..(862): Absent or Asp
  MISC_FEATURE (863)..(863): Absent or Val
  MISC_FEATURE (864)..(864): Absent or His
  MISC_FEATURE (865)..(865): Absent or Phe
  MISC_FEATURE (866)..(866): Absent or Met
  MISC_FEATURE (867)..(867): Absent or Thr
  MISC_FEATURE (868)..(868): Absent or Arg
  MISC_FEATURE (869)..(869): Absent or Ala
  MISC_FEATURE (870)..(870): Absent or Gly
  MISC_FEATURE (871)..(871): Absent or Ala
  MISC_FEATURE (872)..(872): Absent or Glu
  MISC_FEATURE (873)..(873): Absent or Pro
  MISC_FEATURE (874)..(874): Absent or Gln
  MISC_FEATURE (875)..(875): Absent or Gln
  MISC_FEATURE (876)..(876): Absent or Gly
  MISC_FEATURE (877)..(877): Absent or Pro
  MISC_FEATURE (878)..(878): Absent or Lys
  MISC_FEATURE (879)..(879): Absent or Leu
  MISC_FEATURE (880)..(880): Absent or Ser
  MISC_FEATURE (881)..(881): Absent or Ala
  MISC_FEATURE (882)..(882): Absent or Gly
  MISC_FEATURE (883)..(883): Absent or Ala
  MISC_FEATURE (884)..(884): Absent or Gly
  MISC_FEATURE (885)..(885): Absent or Gly
  MISC_FEATURE (886)..(886): Absent or Ala
  MISC_FEATURE (887)..(887): Absent or Gly
  MISC_FEATURE (888)..(888): Absent or Gly
  MISC_FEATURE (889)..(889): Absent or Ala
  MISC_FEATURE (890)..(890): Absent or Ser
  MISC_FEATURE (891)..(891): Absent or Gly
  MISC_FEATURE (892)..(892): Absent or Leu
  MISC_FEATURE (893)..(893): Absent or Gly
  MISC_FEATURE (894)..(894): Absent or Leu
  MISC_FEATURE (895)..(895): Absent or Ile
  MISC_FEATURE (896)..(896): Absent or Val
  MISC_FEATURE (897)..(897): Absent or Gly
  MISC_FEATURE (898)..(898): Absent or Asp
  MISC_FEATURE (899)..(899): Absent or Pro
  MISC_FEATURE (900)..(900): Absent or Gln
  MISC_FEATURE (901)..(901): Absent or Ala
  MISC_FEATURE (902)..(902): Absent or Ala
  MISC_FEATURE (903)..(903): Absent or Thr
  MISC_FEATURE (904)..(904): Absent or Arg
  MISC_FEATURE (905)..(905): Absent or Ala
  MISC_FEATURE (906)..(906): Absent or Ala
  MISC_FEATURE (907)..(907): Absent or Ala
  MISC_FEATURE (908)..(908): Absent or Glu
  MISC_FEATURE (909)..(909): Absent or Ala
  MISC_FEATURE (910)..(910): Absent or Ala
  MISC_FEATURE (911)..(911): Absent or Ala
  MISC_FEATURE (912)..(912): Absent or Glu
  MISC_FEATURE (913)..(913): Absent or Ala
  MISC_FEATURE (914)..(914): Absent or Ala
  MISC_FEATURE (915)..(915): Absent or Asp
  MISC_FEATURE (916)..(916): Absent or Ala
  MISC_FEATURE (917)..(917): Absent or Gly
  MISC_FEATURE (918)..(918): Absent or His
  MISC_FEATURE (919)..(919): Absent or Leu
  MISC_FEATURE (920)..(920): Absent or Ala
  MISC_FEATURE (921)..(921): Absent or Ala
  MISC_FEATURE (922)..(922): Absent or Ala
  MISC_FEATURE (923)..(923): Absent or Ala
  MISC_FEATURE (924)..(924): Absent or Leu
  MISC_FEATURE (925)..(925): Absent or Gly
  MISC_FEATURE (926)..(926): Absent or Pro
  MISC_FEATURE (927)..(927): Absent or Ala
  MISC_FEATURE (928)..(928): Absent or Ala
  MISC_FEATURE (929)..(929): Absent or Ala
  MISC_FEATURE (930)..(930): Absent or Pro
  MISC_FEATURE (931)..(931): Absent or Glu
  MISC_FEATURE (932)..(932): Absent or Pro
  MISC_FEATURE (933)..(933): Absent or Pro
  MISC_FEATURE (934)..(934): Absent or Ala
  MISC_FEATURE (935)..(935): Absent or Ala
  MISC_FEATURE (936)..(936): Absent or Thr
  MISC_FEATURE (937)..(937): Absent or Glu
  MISC_FEATURE (938)..(938): Absent or Leu
  MISC_FEATURE (939)..(939): Absent or Pro
  MISC_FEATURE (940)..(940): Absent or Trp
  MISC_FEATURE (941)..(941): Absent or Pro
  MISC_FEATURE (942)..(942): Absent or Ser
  MISC_FEATURE (943)..(943): Absent or Val
  MISC_FEATURE (944)..(944): Absent or Gly
  MISC_FEATURE (945)..(945): Absent or Pro
  MISC_FEATURE (946)..(946): Absent or Thr
  MISC_FEATURE (947)..(947): Absent or Ala
  MISC_FEATURE (948)..(948): Absent or Ser
  MISC_FEATURE (949)..(949): Absent or Val
  MISC_FEATURE (950)..(950): Absent or Pro
  MISC_FEATURE (951)..(951): Absent or Leu
  MISC_FEATURE (952)..(952): Absent or Pro
  MISC_FEATURE (953)..(953): Absent or Ala
  MISC_FEATURE (954)..(954): Absent or Ala
  MISC_FEATURE (955)..(955): Absent or Ala
  MISC_FEATURE (956)..(956): Absent or Ala
  MISC_FEATURE (957)..(957): Absent or Ala
  MISC_FEATURE (958)..(958): Absent or Ala
  MISC_FEATURE (959)..(959): Absent or Ala
  MISC_FEATURE (960)..(960): Absent or Ala
  MISC_FEATURE (961)..(961): Absent or Ala
  MISC_FEATURE (962)..(962): Absent or Ala
  MISC_FEATURE (963)..(963): Absent or Ala
  MISC_FEATURE (964)..(964): Absent or Ala
  MISC_FEATURE (965)..(965): Absent or Asp
  MISC_FEATURE (966)..(966): Absent or Lys
  MISC_FEATURE (967)..(967): Absent or Gly
  MISC_FEATURE (968)..(968): Absent or Gly
  MISC_FEATURE (969)..(969): Absent or Gly
  MISC_FEATURE (970)..(970): Absent or Glu
  MISC_FEATURE (971)..(971): Absent or Arg
  MISC_FEATURE (972)..(972): Absent or Pro
  MISC_FEATURE (973)..(973): Absent or Gly
  MISC_FEATURE (974)..(974): Absent or Thr
  MISC_FEATURE (975)..(975): Absent or Val
  MISC_FEATURE (976)..(976): Absent or Ala
  MISC_FEATURE (977)..(977): Absent or Ala
  MISC_FEATURE (978)..(978): Absent or Ala
  MISC_FEATURE (979)..(979): Absent or Glu
  MISC_FEATURE (980)..(980): Absent or Ala
  MISC_FEATURE (981)..(981): Absent or Glu
  MISC_FEATURE (982)..(982): Absent or Pro
  MISC_FEATURE (983)..(983): Absent or Ile
  MISC_FEATURE (984)..(984): Absent or Thr
  MISC_FEATURE (985)..(985): Absent or Pro
  MISC_FEATURE (986)..(986): Absent or Ala
  MISC_FEATURE (987)..(987): Absent or Ala
  MISC_FEATURE (988)..(988): Absent or Ala
  MISC_FEATURE (989)..(989): Absent or Asn
  MISC_FEATURE (990)..(990): Absent or Gly
  MISC_FEATURE (991)..(991): Absent or Pro
  MISC_FEATURE (992)..(992): Absent or Ala
  MISC_FEATURE (993)..(993): Absent or Thr
  MISC_FEATURE (994)..(994): Absent or Ala
  MISC_FEATURE (995)..(995): Absent or Pro
  MISC_FEATURE (996)..(996): Absent or Pro
  MISC_FEATURE (997)..(997): Absent or Pro
  MISC_FEATURE (998)..(998): Absent or Thr
  MISC_FEATURE (999)..(999): Absent or Ala
  MISC_FEATURE (1000)..(1000): Absent or Thr
  MISC_FEATURE (1001)..(1001): Absent or Ala
  MISC_FEATURE (1002)..(1002): Absent or Asn
  MISC_FEATURE (1003)..(1003): Absent or Asn
  MISC_FEATURE (1004)..(1004): Absent or Val
  MISC_FEATURE (1005)..(1005): Absent or Val
  MISC_FEATURE (1006)..(1006): Absent or Pro
  MISC_FEATURE (1007)..(1007): Absent or Met
  MISC_FEATURE (1008)..(1008): Absent or Ser
  MISC_FEATURE (1009)..(1009): Absent or Gly
  MISC_FEATURE (1010)..(1010): Absent or Ala
  MISC_FEATURE (1011)..(1011): Absent or Gly
  MISC_FEATURE (1012)..(1012): Absent or Ser
  MISC_FEATURE (1013)..(1013): Absent or Ser
  MISC_FEATURE (1014)..(1014): Absent or Ser
  MISC_FEATURE (1015)..(1015): Absent or Thr
  MISC_FEATURE (1016)..(1016): Absent or Asp
  MISC_FEATURE (1017)..(1017): Absent or Gly
  MISC_FEATURE (1018)..(1018): Absent or Arg
  MISC_FEATURE (1019)..(1019): Absent or Gly
  MISC_FEATURE (1020)..(1020): Absent or Gln
  MISC_FEATURE (1021)..(1021): Absent or Gln
  MISC_FEATURE (1022)..(1022): Absent or Gln
  MISC_FEATURE (1023)..(1023): Absent or Asp
  MISC_FEATURE (1024)..(1024): Absent or Gly
  MISC_FEATURE (1025)..(1025): Absent or Gly
  MISC_FEATURE (1026)..(1026): Absent or Ala
  MISC_FEATURE (1027)..(1027): Absent or Ala
  MISC_FEATURE (1028)..(1028): Absent or Val
  MISC_FEATURE (1029)..(1029): Absent or Thr
  MISC_FEATURE (1030)..(1030): Absent or Gly
  MISC_FEATURE (1031)..(1031): Absent or Ala
  MISC_FEATURE (1032)..(1032): Absent or Lys
  MISC_FEATURE (1033)..(1033): Absent or Ala
  MISC_FEATURE (1034)..(1034): Absent or Ala
  MISC_FEATURE (1035)..(1035): Absent or Ala
  MISC_FEATURE (1036)..(1036): Absent or Ala
  MISC_FEATURE (1037)..(1037): Absent or Ala
  MISC_FEATURE (1038)..(1038): Absent or Ser
  MISC_FEATURE (1039)..(1039): Absent or Gly
  MISC_FEATURE (1040)..(1040): Absent or Gly
  MISC_FEATURE (1041)..(1041): Absent or Gln
  MISC_FEATURE (1042)..(1042): Absent or Gln
  MISC_FEATURE (1043)..(1043): Absent or Gln
  MISC_FEATURE (1044)..(1044): Absent or Gln
  MISC_FEATURE (1045)..(1045): Absent or Gln
  MISC_FEATURE (1046)..(1046): Absent or Gln
  MISC_FEATURE (1047)..(1047): Absent or Gln
  MISC_FEATURE (1048)..(1048): Absent or Gln
  MISC_FEATURE (1049)..(1049): Absent or Gln
  MISC_FEATURE (1050)..(1050): Absent or Gln
  MISC_FEATURE (1051)..(1051): Absent or Gln
  MISC_FEATURE (1052)..(1052): Absent or Gln
  MISC_FEATURE (1053)..(1053): Absent or Gln
  MISC_FEATURE (1054)..(1054): Absent or Gln
  MISC_FEATURE (1055)..(1055): Absent or Gln
  MISC_FEATURE (1056)..(1056): Absent or Gln
  MISC_FEATURE (1057)..(1057): Absent or Gln
  MISC_FEATURE (1058)..(1058): Absent or Gln
  MISC_FEATURE (1059)..(1059): Absent or Gln
  MISC_FEATURE (1060)..(1060): Absent or Gln
  MISC_FEATURE (1061)..(1061): Absent or Gly
  MISC_FEATURE (1062)..(1062): Absent or Arg
  MISC_FEATURE (1063)..(1063): Absent or Arg
  MISC_FEATURE (1064)..(1064): Absent or Arg
  MISC_FEATURE (1065)..(1065): Absent or Gln
  MISC_FEATURE (1066)..(1066): Absent or Gly
  MISC_FEATURE (1067)..(1067): Absent or Gly
  MISC_FEATURE (1068)..(1068): Absent or Lys
  MISC_FEATURE (1069)..(1069): Absent or Gly
  MISC_FEATURE (1070)..(1070): Absent or Gly
  MISC_FEATURE (1071)..(1071): Absent or Gly
  MISC_FEATURE (1072)..(1072): Absent or Gly
  MISC_FEATURE (1073)..(1073): Absent or Gly
  MISC_FEATURE (1074)..(1074): Absent or Gly
  MISC_FEATURE (1075)..(1075): Absent or Gly
  MISC_FEATURE (1076)..(1076): Absent or Ala
  MISC_FEATURE (1077)..(1077): Absent or Ser
  MISC_FEATURE (1078)..(1078): Absent or Ser
  MISC_FEATURE (1079)..(1079): Absent or His
  MISC_FEATURE (1080)..(1080): Absent or His
  MISC_FEATURE (1081)..(1081): Absent or His
  MISC_FEATURE (1082)..(1082): Absent or His
  MISC_FEATURE (1083)..(1083): Absent or His
  MISC_FEATURE (1084)..(1084): Absent or Ser
  MISC_FEATURE (1085)..(1085): Absent or Lys
  MISC_FEATURE (1086)..(1086): Absent or Pro
  MISC_FEATURE (1087)..(1087): Absent or Arg
  MISC_FEATURE (1088)..(1088): Absent or Pro
  MISC_FEATURE (1089)..(1089): Absent or Gly
  MISC_FEATURE (1090)..(1090): Absent or Glu
  MISC_FEATURE (1091)..(1091): Absent or Gly
  MISC_FEATURE (1092)..(1092): Absent or Asp
  MISC_FEATURE (1093)..(1093): Absent or Ser
  MISC_FEATURE (1094)..(1094): Absent or Glu
XXXXXXXXXXXXXXXXXXXXXXXXXXXXXXXXXXXXXXXXXXXXXXXXXXXXXXXXXXXXXXXXXXXXXXXXXXXXXXXXXXXXXXXXXXXXXXXXXXXXXXXXXXXXXXXXXXXXXXXXXXXXXXXXXXXXXXXXXXXXXXXXXXXXXXXXXXXXXXXXXXXXXXXXXXXXXXXXXXXXXXXXXXXXXXXXXXXXXXXXXXXXXXXXXXXXXXXXXXXXXXXXXXXXXXXXXXXXXXXXXXXXXXXXXXXXXXXXXXXXXXXXXXXXXXXXXXXXXXXXXXXXXXXXXXXXXXXXXXXXXXXXXXXXXXXRXGXRXXXXXXXXXVXAXXVTCGGLCPGXNXVXXXXVXXLXXXYGVXXXXXXGIXXGXXGFXXXXXXXXXXXXXLTXXXVXXIHXRGGXXLGTSRGGXDXXXIVXXXXXXGXNXVXXIGGXGXXXXAXXIXXXXXXXXXXXXVXGXPKXIDNDIXXIDKSFGFDTAVEEAQRAXNAAHVEAESXXNGXGVVKLMGRXSGXXXXXXXFIAMXXXXXXXXXXXXXXXXXXXXXXXXXXXXXXXXXXAXLASRXVDCCLIPESPFYLEGXXGLLEFXXXRXXXXGHXVXIVXAEGAGQDLXXXSXXXXXXXXDASGNKXLXDXGXWLXXXXKXXFXXXXXXXXXXXKYIDPXYMIRXXXXXXXDXXYCXXLXXXAXHGAXAGXTGXTVXXXXXXXXYXPXXXXXXXXXXVXXXXRXWXXRXXXXXXQPXFXXXXXXXXXXXXXXXXXXXXXXXXXXXXXXXXXXXXXXXXXXXXXXXXXXXXXXXXXXXXXXXXXXXXXXXXXXXXXXXXXXXXXXXXXXXXXXXXXXXXXXXXXXXXXXXXXXXXXXXXXXXXXXXXXXXXXXXXXXXXXXXXXXXXXXXXXXXXXXXXXXXXXXXXXXXXXXXXXXXXXXXXXXXXXXXXXXXXXXXXXXXXXXXXXXXXXXXXXXXXXXXXXXXXXXXXXXXXXXXXXXXXXXXXXXXXXXXXXXXXXXXXXXXXXXXXXXXXXXXXXXXXXXXXXXXXXXXXXXXXXXXXXXXXXXXXXXXXXXXXXXXXXXXXXXXXXXXXXXXXXXXXXXXXXXXXXXXX

SEQ ID NO: 17386 - protein, 1055 aa, Artificial
  Consensus sequence of seq id no 143 and its homologs
  MISC_FEATURE (1)..(1): Absent or Met
  MISC_FEATURE (2)..(2): Absent or Ala
  MISC_FEATURE (3)..(3): Absent or Phe
  MISC_FEATURE (4)..(4): Absent or His
  MISC_FEATURE (5)..(5): Absent or Leu
  MISC_FEATURE (6)..(6): Absent or His
  MISC_FEATURE (7)..(7): Absent or Thr
  MISC_FEATURE (8)..(8): Absent or Tyr
  MISC_FEATURE (9)..(9): Absent or Ser
  MISC_FEATURE (10)..(10): Absent or Gln
  MISC_FEATURE (11)..(11): Absent or Ala
  MISC_FEATURE (12)..(12): Absent or His
  MISC_FEATURE (13)..(13): Absent or Thr
  MISC_FEATURE (14)..(14): Absent or Pro
  MISC_FEATURE (15)..(15): Absent or Val
  MISC_FEATURE (16)..(16): Absent or Thr
  MISC_FEATURE (17)..(17): Absent or Gly
  MISC_FEATURE (18)..(18): Absent or Cys
  MISC_FEATURE (19)..(19): Absent or Gln
  MISC_FEATURE (20)..(20): Absent or Gln
  MISC_FEATURE (21)..(21): Absent or Val
  MISC_FEATURE (22)..(22): Absent or Ala
  MISC_FEATURE (23)..(23): Absent or Asp
  MISC_FEATURE (24)..(24): Absent or Leu
  MISC_FEATURE (25)..(25): Absent or Gln
  MISC_FEATURE (26)..(26): Absent or Ala
  MISC_FEATURE (27)..(27): Absent or Ser
  MISC_FEATURE (28)..(28): Absent or Gln
  MISC_FEATURE (29)..(29): Absent or Ala
  MISC_FEATURE (30)..(30): Absent or Arg
  MISC_FEATURE (31)..(31): Absent or Arg
  MISC_FEATURE (32)..(32): Absent or Gly
  MISC_FEATURE (33)..(33): Absent or Val
  MISC_FEATURE (34)..(34): Absent or Asp
  MISC_FEATURE (35)..(35): Absent or Asp
  MISC_FEATURE (36)..(36): Absent or Val
  MISC_FEATURE (37)..(37): Absent or Pro
  MISC_FEATURE (38)..(38): Absent or Gly
  MISC_FEATURE (39)..(39): Absent or Val
  MISC_FEATURE (40)..(40): Absent or Cys
  MISC_FEATURE (41)..(41): Absent or Val
  MISC_FEATURE (42)..(42): Absent or Arg
  MISC_FEATURE (43)..(43): Absent or Val
  MISC_FEATURE (44)..(44): Absent or Gly
  MISC_FEATURE (45)..(45): Absent or Cys
  MISC_FEATURE (46)..(46): Absent or Gly
  MISC_FEATURE (47)..(47): Absent or Ala
  MISC_FEATURE (48)..(48): Absent or Arg
  MISC_FEATURE (49)..(49): Absent or His
  MISC_FEATURE (50)..(50): Absent or Ala
  MISC_FEATURE (51)..(51): Absent or Lys
  MISC_FEATURE (52)..(52): Absent or Glu
  MISC_FEATURE (53)..(53): Absent or Gly
  MISC_FEATURE (54)..(54): Absent or Glu
  MISC_FEATURE (55)..(55): Absent or Asp
  MISC_FEATURE (56)..(56): Absent or Glu
  MISC_FEATURE (57)..(57): Absent or Pro
  MISC_FEATURE (58)..(58): Absent or Gly
  MISC_FEATURE (59)..(59): Absent or Pro
  MISC_FEATURE (60)..(60): Absent or Leu
  MISC_FEATURE (61)..(61): Absent or Leu
  MISC_FEATURE (62)..(62): Absent or Cys
  MISC_FEATURE (63)..(63): Absent or His
  MISC_FEATURE (64)..(64): Absent or Asp
  MISC_FEATURE (65)..(65): Absent or Asn
  MISC_FEATURE (66)..(66): Absent or Phe
  MISC_FEATURE (67)..(67): Absent or Gly
  MISC_FEATURE (68)..(68): Absent or Gly
  MISC_FEATURE (69)..(69): Absent or Gly
  MISC_FEATURE (70)..(70): Absent or Phe
  MISC_FEATURE (71)..(71): Absent or Val
  MISC_FEATURE (72)..(72): Absent or Asp
  MISC_FEATURE (73)..(73): Absent or Asp
  MISC_FEATURE (74)..(74): Absent or Asp
  MISC_FEATURE (75)..(75): Absent or Asp
  MISC_FEATURE (76)..(76): Absent or Arg
  MISC_FEATURE (77)..(77): Absent or Val
  MISC_FEATURE (78)..(78): Absent or Ala
  MISC_FEATURE (79)..(79): Absent or Leu
  MISC_FEATURE (80)..(80): Absent or Asn
  MISC_FEATURE (81)..(81): Absent or Thr
  MISC_FEATURE (82)..(82): Absent or Leu or Met
  MISC_FEATURE (83)..(83): Absent or Ser or Glu
  MISC_FEATURE (84)..(84): Absent or Leu or Ala or Ser
  MISC_FEATURE (85)..(85): Met or Absent or Ala or Phe or Val
  MISC_FEATURE (86)..(86): Asp or Absent or Gly or Leu or Arg or Thr
  MISC_FEATURE (87)..(87): Phe or Absent or Leu or Val
  MISC_FEATURE (88)..(88): Glu or Absent or Asp or Gln or Val or Pro or Ala or Thr
  MISC_FEATURE (89)..(89): Phe or Absent or Ser or Arg or Ala or Pro
  MISC_FEATURE (90)..(90): Gly or Absent or Thr or His or Ala
  MISC_FEATURE (91)..(91): Arg or Absent or Gly or Ala or Pro
  MISC_FEATURE (92)..(92): Ala or Absent or Pro or Ile or Val
  MISC_FEATURE (93)..(93): Leu or Absent or Thr or Gly or Ala or Pro
  MISC_FEATURE (94)..(94): Asn or Absent or Asp or Gly or Ala or Val
  MISC_FEATURE (95)..(95): Absent or Met or Leu or Ala or Pro
  MISC_FEATURE (96)..(96): Absent or Cys or Gly or Asp or Glu or Val
  MISC_FEATURE (97)..(97): Absent or Val or Ala or Lys
  MISC_FEATURE (98)..(98): Absent or Asp or Thr or Ala or Arg
  MISC_FEATURE (99)..(99): Absent or Leu or Lys or Ala or Glu
  MISC_FEATURE (100)..(100): Absent or Pro or His or Lys or Gln
  MISC_FEATURE (101)..(101): Absent or Glu or Arg or Ala or Pro or Lys or Leu
  MISC_FEATURE (102)..(102): Absent or Ser or Asp or Leu or Met
  MISC_FEATURE (103)..(103): Absent or Gly or Thr or Gln or Asp or Lys or Glu
  MISC_FEATURE (104)..(104): Lys or Absent or Ile or Leu or Val
  MISC_FEATURE (105)..(105): Thr or Met or Leu or Phe or Absent or Lys
  MISC_FEATURE (106)..(106): Thr or Arg or Absent or Ala or Leu or Asp or Glu
  MISC_FEATURE (107)..(107): Thr or Val or Ser or Lys or Absent or Arg or Leu or Pro
  MISC_FEATURE (108)..(108): Thr or Ala or Val or Absent or Leu or Asp or Arg or Phe
  MISC_FEATURE (109)..(109): Thr or Arg or Asp or Pro or Absent or Leu or Lys
  MISC_FEATURE (110)..(110): Ala or Ser or Absent or Cys or Glu or Met
  MISC_FEATURE (111)..(111): Arg or Pro or Glu or Absent or Gln or Leu or Ala or His
  MISC_FEATURE (112)..(112): Ala or Val or Glu or Gln or Absent or Ser or Pro or Leu or Asp
  MISC_FEATURE (113)..(113): Ser or Thr or Ala or Cys or Absent or Pro or Val
  MISC_FEATURE (114)..(114): Ala or Arg or Lys or Absent or Phe or Ser or Pro
  MISC_FEATURE (115)..(115): Glu or Pro or Gly or Absent or Ala or Asn
  MISC_FEATURE (116)..(116): Ser or Pro or Ala or Absent or Arg or Gly or Ile
  MISC_FEATURE (117)..(117): Ala or Absent or Pro or Asn or Gln
  MISC_FEATURE (118)..(118): Ile or Phe or Ala or Absent or Gly or Leu
  MISC_FEATURE (119)..(119): Asp or Gly or Ala or Absent or Leu or Arg
  MISC_FEATURE (120)..(120): Ala or Ser or Absent or Gln or Gly
  MISC_FEATURE (121)..(121): Arg or Ala or Val or Absent or Lys or Pro or Gly
  MISC_FEATURE (122)..(122): Leu or Ala or Pro or Absent or Lys or Thr or Ser or Gly
  MISC_FEATURE (123)..(123): Glu or Tyr or Ala or Ile or Absent or Cys or Lys or Thr
  MISC_FEATURE (124)..(124): Gly or Ala or Absent or Val or any naturally occurring amino acid or Trp
  MISC_FEATURE (125)..(125): Asp or Ser or Gly or Arg or Absent or Ala or Lys
  MISC_FEATURE (126)..(126): Asp or Arg or Ser or Gln or Absent or Thr or Lys or Pro or Ala or Met or Val
  MISC_FEATURE (127)..(127): Absent or Arg or Val or Ala or Pro or Met
  MISC_FEATURE (128)..(128): Absent or Gly or Val or Ala or Cys or Ser or Arg
  MISC_FEATURE (129)..(129): Absent or Gln or Ala or Lys or Ser or Leu
  MISC_FEATURE (130)..(130): Absent or Lys or Ala or Trp or Asp or Glu or Asn
  MISC_FEATURE (131)..(131): Asp or Absent or Gln or Ala or Leu
  MISC_FEATURE (132)..(132): Glu or Absent or Gln or Met or Pro or Thr or Leu or Asn
  MISC_FEATURE (133)..(133): Ser or Absent or Gln or Glu or Lys or Asn or Gly or Thr
  MISC_FEATURE (134)..(134): Glu or Absent or Arg or Pro or Lys or Thr or Met or Ser
  MISC_FEATURE (135)..(135): Asp or Ala or Ser or Pro or Absent or Lys
  MISC_FEATURE (136)..(136): Asp or Arg or Gly or Absent or His or Ile or Leu or Thr or Ser or Val
  MISC_FEATURE (137)..(137): Ala or Ser or Absent or Val or Glu or Tyr
  MISC_FEATURE (138)..(138): Phe or Lys or Ser or Absent or Ala or Thr or Gly or Val
  MISC_FEATURE (139)..(139): Tyr or Thr or Val or Absent or Asp or Gly
  MISC_FEATURE (140)..(140): Ser or Ala or Cys or Absent or Glu or Asp or Gly or Asn
  MISC_FEATURE (141)..(141): Trp or Ser or Gly or Ala or Absent or Gln or Cys
  MISC_FEATURE (142)..(142): Arg or Asn or Ser or Absent or Lys or Gly
  MISC_FEATURE (143)..(143): Val or Ala or Ser or Absent or Gly or Tyr
  MISC_FEATURE (144)..(144): Gly or Thr or Absent or Ala or Val or Ile
  MISC_FEATURE (145)..(145): Gly or Pro or Ser or Absent or Leu or Phe
  MISC_FEATURE (146)..(146): Ala or Arg or Gly or Absent or Lys or Asp or Glu
  MISC_FEATURE (147)..(147): Asn or Pro or Ser or Ala or Absent or any naturally occurring amino acid
  MISC_FEATURE (149)..(149): Leu or Tyr or Ile or Absent or Ala or Val
  MISC_FEATURE (150)..(150): Lys or Asp or Ser or Thr or Absent or Pro
  MISC_FEATURE (151)..(151): Ile or Ala or Gly or Thr or Absent or Pro or His
  MISC_FEATURE (152)..(152): Thr or Ser or Asn or Absent or Phe or Leu or Ile
  MISC_FEATURE (153)..(153): His or Thr or Ser or Absent or Gly
  MISC_FEATURE (154)..(154): Leu or Ser or Absent or Gln or Asp or Lys
  MISC_FEATURE (155)..(155): Arg or Phe or Ser or Tyr or Absent or Trp
  MISC_FEATURE (156)..(156): Asp or Ser or Gly or Val or Absent or Leu or Met
  MISC_FEATURE (157)..(157): Val or Pro or Ser or Ile or Absent or Thr
  MISC_FEATURE (158)..(158): Tyr or Ser or Glu or Absent or Asn or Gln or Asp or Gly
  MISC_FEATURE (159)..(159): Arg or Val or Ser or Pro or Absent or Leu
  MISC_FEATURE (160)..(160): Gly or Arg or Ser or Absent or Pro or Glu
  MISC_FEATURE (161)..(161): Absent or Gly or Ser
  MISC_FEATURE (162)..(162): Absent or Ser
  MISC_FEATURE (163)..(163): Absent or Gly
  MISC_FEATURE (164)..(164): Absent or Gly
  MISC_FEATURE (165)..(165): Absent or Ala
  MISC_FEATURE (166)..(166): Absent or Arg
  MISC_FEATURE (167)..(167): Absent or His
  MISC_FEATURE (168)..(168): Absent or Trp
  MISC_FEATURE (169)..(169): Absent or Trp
  MISC_FEATURE (170)..(170): Absent or Arg
  MISC_FEATURE (171)..(171): Absent or Asp
  MISC_FEATURE (172)..(172): Absent or Asp
  MISC_FEATURE (173)..(173): Absent or Val
  MISC_FEATURE (174)..(174): Absent or Thr
  MISC_FEATURE (175)..(175): Absent or Pro
  MISC_FEATURE (176)..(176): Absent or Pro
  MISC_FEATURE (177)..(177): Absent or Ser
  MISC_FEATURE (178)..(178): Absent or Pro
  MISC_FEATURE (179)..(179): Absent or Gln
  MISC_FEATURE (180)..(180): Absent or Ala or Val or Tyr
  MISC_FEATURE (181)..(181): Absent or Ala or Ser or Gly
  MISC_FEATURE (182)..(182): Absent or Ala or Phe
  MISC_FEATURE (183)..(183): Absent or Gly
  MISC_FEATURE (184)..(184): Absent or Ala or Arg
  MISC_FEATURE (185)..(185): Absent or Ala or Val
  MISC_FEATURE (186)..(186): Absent or Tyr or Leu
  MISC_FEATURE (187)..(187): Absent or Gly or Thr
  MISC_FEATURE (188)..(188): Absent or Ser or Pro
  MISC_FEATURE (189)..(189): Absent or Tyr or Ser
  MISC_FEATURE (190)..(190): Absent or Gly or Pro
  MISC_FEATURE (191)..(191): Absent or Ser or Pro
  MISC_FEATURE (192)..(192): Absent or Gly
  MISC_FEATURE (193)..(193): Absent or Ser
  MISC_FEATURE (194)..(194): Absent or Asp or Ile
  MISC_FEATURE (195)..(195): Asp or Absent or Met
  MISC_FEATURE (196)..(196): Val or Glu or Thr or Absent or Asp or Pro
  MISC_FEATURE (197)..(197): Pro or Ile or Asp or Absent
  MISC_FEATURE (198)..(198): Leu or Phe or Pro or Ala or Absent or Asp
  MISC_FEATURE (199)..(199): Val or Leu or Ala or Absent
  MISC_FEATURE (200)..(200): Ala or Pro or Leu or Absent or Val
  MISC_FEATURE (201)..(201): Gln or Glu or Pro or Absent or Cys
  MISC_FEATURE (202)..(202): Pro or His or Cys or Absent or Leu
  MISC_FEATURE (203)..(203): Ser or Ile or Asn or Pro or Absent or Lys or Val
  MISC_FEATURE (204)..(204): Pro or Gly or Glu or Absent or Asn
  MISC_FEATURE (205)..(205): Phe or Glu or Ile or Met or Absent or Leu
  MISC_FEATURE (206)..(206): Cys or Met or Thr or Arg or Absent or Leu
  MISC_FEATURE (207)..(207): Thr or Tyr or Arg or Ser or Absent or Asn
  MISC_FEATURE (208)..(208): Thr or Asn or Met or Lys or Absent or Tyr or Ser or Ile
  MISC_FEATURE (209)..(209): Thr or Leu or Pro or Absent or Tyr or Phe
  MISC_FEATURE (210)..(210): Ala or Pro or Val or Met or Absent or Gly or Glu
  MISC_FEATURE (211)..(211): Cys or Lys or Arg or Val or Pro or Absent or Asn
  MISC_FEATURE (212)..(212): Pro or Arg or Absent
  MISC_FEATURE (213)..(213): Leu or Pro or Absent or Asp
  MISC_FEATURE (214)..(214): Ser or Ala or Absent or Gln or Lys
  MISC_FEATURE (215)..(215): Gly or Pro or Asn or Absent or Thr or Asp or Phe or Tyr or His
  MISC_FEATURE (216)..(216): Pro or Phe or Absent or Asn or His
  MISC_FEATURE (217)..(217): Arg or Ala or Pro or Val or Absent or Ile
  MISC_FEATURE (218)..(218): Thr or Arg or Gln or Absent or Val or Ser or Ala
  MISC_FEATURE (219)..(219): Ser or Gly or Gln or His or Absent or Asp or Tyr
  MISC_FEATURE (220)..(220): Val or Gly or Pro or Asn or Absent or Ser or Ala
  MISC_FEATURE (221)..(221): Glu or Ala or Gln or Asn or Absent or Val
  MISC_FEATURE (222)..(222): Phe or Leu or Pro or Absent or Gln or Thr or Val or Ala
  MISC_FEATURE (223)..(223): Asn or Trp or Gly or Absent or Lys or Arg
  MISC_FEATURE (224)..(224): Ser or Gln or Gly or Absent or Lys
  MISC_FEATURE (225)..(225): Asn or Phe or Gly or Absent or Tyr
  MISC_FEATURE (226)..(226): Phe or Gly or Ser or Absent or Val
  MISC_FEATURE (227)..(227): Val or Leu or Ser or Absent or Ile
  MISC_FEATURE (228)..(228): Ser or Gly or Absent or Asp or Asn or Glu
  MISC_FEATURE (229)..(229): Asn or Gln or Ser or Asp or Absent or Phe or Ala or Pro or Thr or Glu
  MISC_FEATURE (230)..(230): Ser or Arg or Gln or Absent or Asp or Thr
  MISC_FEATURE (232)..(232): Arg or Ile or Gly or Absent or Thr or Val or Phe
  MISC_FEATURE (233)..(233): Val or Asp or Ser or Absent or Ile
  MISC_FEATURE (234)..(234): Leu or Asn or Ser or Ala or Absent or Arg or Val or Thr
  MISC_FEATURE (235)..(235): Leu or Gly or Ser or Absent or Gln or Lys or Arg
  MISC_FEATURE (236)..(236): Asn or Asp or Thr or Absent or His or Lys
  MISC_FEATURE (237)..(237): Ser or Pro or Absent or Thr or Ala or Ile or Val
  MISC_FEATURE (239)..(239): Ala or Ser or Lys or Arg or Absent or Glu or Gln or Val
  MISC_FEATURE (240)..(240): Phe or Leu or Val or Absent or His or Arg or Thr or Asn
  MISC_FEATURE (241)..(241): Gly or Asn or Tyr or Ala or Absent or Glu or Lys or Met or Ile or Val
  MISC_FEATURE (242)..(242): Ser or Pro or Absent or Asp or Gly or Thr or Asn or Glu
  MISC_FEATURE (243)..(243): Ser or Leu or Pro or Absent or Thr or Gly or Asn or Asp
  MISC_FEATURE (244)..(244): Ala or Arg or Ser or Asp or Absent or Glu or Pro or Val or Thr
  MISC_FEATURE (245)..(245): Asp or Thr or Ser or Absent or Gly
  MISC_FEATURE (246)..(246): Pro or Thr or Ala or Absent or Arg or Ser or His or Glu or Asp
  MISC_FEATURE (248)..(248): Gln or Ser or His or Ala or Absent or Ile or Thr or Leu or Val
  MISC_FEATURE (249)..(249): Thr or Absent or Gly or Ser or His
  MISC_FEATURE (250)..(250): Cys or Absent or Arg or Phe
  MISC_FEATURE (251)..(251): Ser or Absent or Gln or Arg
  MISC_FEATURE (252)..(252): Absent or Pro
  MISC_FEATURE (253)..(253): Absent or Pro
  MISC_FEATURE (254)..(254): Absent or Ser
  MISC_FEATURE (255)..(255): Absent or Arg
  MISC_FEATURE (256)..(256): Absent or Pro
  MISC_FEATURE (257)..(257): Absent or Ala
  MISC_FEATURE (258)..(258): Absent or Ala
  MISC_FEATURE (259)..(259): Absent or Ala
  MISC_FEATURE (260)..(260): Absent or Ala
  MISC_FEATURE (261)..(261): Absent or Ala
  MISC_FEATURE (262)..(262): Absent or Ala
  MISC_FEATURE (263)..(263): Absent or Ala
  MISC_FEATURE (264)..(264): Absent or Ser
  MISC_FEATURE (265)..(265): Absent or Arg
  MISC_FEATURE (266)..(266): Absent or Thr
  MISC_FEATURE (267)..(267): Absent or Tyr
  MISC_FEATURE (268)..(268): Absent or Ala
  MISC_FEATURE (269)..(269): Absent or Glu
  MISC_FEATURE (270)..(270): Absent or Phe
  MISC_FEATURE (271)..(271): Absent or Gln
  MISC_FEATURE (272)..(272): Absent or Ser
  MISC_FEATURE (273)..(273): Absent or Ala
  MISC_FEATURE (274)..(274): Absent or Pro
  MISC_FEATURE (275)..(275): Absent or Pro
  MISC_FEATURE (276)..(276): Absent or Pro
  MISC_FEATURE (277)..(277): Absent or Pro or Ser
  MISC_FEATURE (278)..(278): Absent or Pro or Asn
  MISC_FEATURE (279)..(279): Absent or Met or Phe
  MISC_FEATURE (280)..(280): Absent or Pro or Phe or Cys
  MISC_FEATURE (281)..(281): Absent or Glu or Pro or Ala
  MISC_FEATURE (282)..(282): Absent or Ser or Ala or His or Asp
  MISC_FEATURE (283)..(283): Absent or Gly
  MISC_FEATURE (284)..(284): Absent or Ala or Gly
  MISC_FEATURE (285)..(285): Absent or Ala or Lys
  MISC_FEATURE (286)..(286): Absent or Ala or Gly
  MISC_FEATURE (287)..(287): Absent or Leu or Gly
  MISC_FEATURE (288)..(288): Absent or His or Ile
  MISC_FEATURE (289)..(289): Absent or Asn
  MISC_FEATURE (290)..(290): Leu or Absent or Val
  MISC_FEATURE (291)..(291): Trp or Absent or Arg or Leu
  MISC_FEATURE (292)..(292): Ala or Glu or Gly or Thr or Absent
  MISC_FEATURE (293)..(293): Glu or Ala or Arg or Asn or Absent
  MISC_FEATURE (294)..(294): Thr or Ala or Gly or Ser or Absent
  MISC_FEATURE (295)..(295): Phe or Ser or Val or Met or Asp or Absent
  MISC_FEATURE (296)..(296): Asp or Absent or Ser
  MISC_FEATURE (297)..(297): Absent or Thr
  MISC_FEATURE (298)..(298): Absent or Leu
  MISC_FEATURE (299)..(299): Absent or Gly
  MISC_FEATURE (300)..(300): Pro or Glu or Asp or Absent
  MISC_FEATURE (301)..(301): Asn or Glu or Arg or Gln or Asp or Absent
  MISC_FEATURE (302)..(302): Gly or Asp or Leu or Ser or Absent
  MISC_FEATURE (303)..(303): Cys or Val or Asn or Absent
  MISC_FEATURE (304)..(304): Asp or Ala or Val or Met or Ile or Absent
  MISC_FEATURE (305)..(305): Tyr or Phe or Ala or Thr or Leu or Absent
  MISC_FEATURE (306)..(306): Val or Ser or Leu or Absent
  MISC_FEATURE (307)..(307): Pro or Asp or Absent
  MISC_FEATURE (308)..(308): Gln or Glu or Ala or Pro or Absent
  MISC_FEATURE (309)..(309): Trp or Arg or Absent
  MISC_FEATURE (310)..(310): Val or Ala or Absent
  MISC_FEATURE (311)..(311): Val or Ile or Absent
  MISC_FEATURE (317)..(317): Ser or Glu or Ala or Arg or Lys or Absent or Gln or Asp
  MISC_FEATURE (318)..(318): Glu or Val or Ala or Thr or Absent or Lys or Arg or Gln
  MISC_FEATURE (319)..(319): Val or Ile or Absent
  MISC_FEATURE (322)..(322): Asp or Absent or Lys or Gln or Arg
  MISC_FEATURE (323)..(323): Ser or Pro or Absent or Ala
  MISC_FEATURE (324)..(324): Asp or Lys or Ala or Ser or Gln or Absent or Glu
  MISC_FEATURE (325)..(325): Glu or Lys or Ala or Gln or Absent or Asp
  MISC_FEATURE (327)..(327): His or Arg or Asn or Thr or Ser or Absent or Lys
  MISC_FEATURE (329)..(329): Ala or Absent or Cys
  MISC_FEATURE (340)..(340): Ile or Leu or Val or Absent
  MISC_FEATURE (342)..(342): Asp or Absent or Thr
  MISC_FEATURE (344)..(344): Ile or Val or Absent
  MISC_FEATURE (345)..(345): Arg or Gln or Absent
  MISC_FEATURE (346)..(346): Ser or Gly or Asn or Absent or Glu
  MISC_FEATURE (347)..(347): Leu or Ile or Absent
  MISC_FEATURE (349)..(349): Asn or Leu or His or Tyr or Absent or Cys or Ser
  MISC_FEATURE (350)..(350): Thr or Arg or Lys or Absent or Gly or Ala
  MISC_FEATURE (352)..(352): Glu or Thr or Absent or Asp or His or Tyr or Trp
  MISC_FEATURE (353)..(353): Val or Asp or Absent or Tyr or Thr
  MISC_FEATURE (354)..(354): Gly or Absent or Met or Gln
  MISC_FEATURE (358)..(358): Lys or Glu or Pro or Absent or Thr or Ser or Arg
  MISC_FEATURE (359)..(359): Lys or Asp or Glu or Absent or Asn or Ser or Arg
  MISC_FEATURE (360)..(360): Absent or Gly or Asp
  MISC_FEATURE (361)..(361): Absent or Gln or Lys or Asn
  MISC_FEATURE (362)..(362): Ile or Absent or Val
  MISC_FEATURE (363)..(363): Ser or Val or Leu or Absent or Tyr or Phe
  MISC_FEATURE (366)..(366): Arg or Lys or Cys or Absent or Glu or Asp
  MISC_FEATURE (367)..(367): Tyr or Asp or Absent or Cys or Gly
  MISC_FEATURE (369)..(369): Phe or Leu or Absent or Tyr
  MISC_FEATURE (370)..(370): Lys or Arg or Ala or Absent
  MISC_FEATURE (374)..(374): Ser or Ala or Pro or Asp or Glu or Absent
  MISC_FEATURE (375)..(375): Gly or Asp or Arg or Pro or Absent or Lys
  MISC_FEATURE (376)..(376): Val or Pro or His or Gln or Asp or Absent or Asn
  MISC_FEATURE (377)..(377): Absent or Glu or Pro
  MISC_FEATURE (378)..(378): Absent or Asn
  MISC_FEATURE (379)..(379): Absent or Ala
  MISC_FEATURE (380)..(380): Absent or Leu
  MISC_FEATURE (381)..(381): Absent or Glu or Ala or Val
  MISC_FEATURE (382)..(382): Glu or Ala or Lys or Absent
  MISC_FEATURE (383)..(383): Phe or Pro or Absent or Thr
  MISC_FEATURE (384)..(384): Met or Arg or Ile or Absent or Leu or Val
  MISC_FEATURE (385)..(385): Lys or Val or Thr or Absent or Pro or Glu or Ala or Asp or Ser
  MISC_FEATURE (387)..(387): Asn or Thr or Ser or Absent or Gln
  MISC_FEATURE (388)..(388): Lys or Ser or Arg or Absent or Pro
  MISC_FEATURE (389)..(389): Lys or Ala or Arg or Absent or Phe
  MISC_FEATURE (390)..(390): Thr or Ile or Ala or Val or Tyr or Absent or Ser or Met
  MISC_FEATURE (392)..(392): Arg or Asp or Glu or Absent or Asn or Ser
  MISC_FEATURE (393)..(393): Asn or Asp or Gly or Absent or Ser
  MISC_FEATURE (396)..(396): Thr or Ile or Leu or Absent or Lys or Asn
  MISC_FEATURE (400)..(400): Absent or any naturally occurring amino acid
  MISC_FEATURE (402)..(402): Met or Leu or Ile or Absent or Val or Tyr or Phe
  MISC_FEATURE (410)..(410): Gly or Ala or Absent or Tyr or Gln or His
  MISC_FEATURE (412)..(412): Val or Met or Leu or Ile or Absent or Thr
  MISC_FEATURE (413)..(413): Gln or Pro or Gly or Arg or Lys or Absent or Ser or Ala or Met or His
  MISC_FEATURE (414)..(414): Lys or Ala or Val or Glu or Absent or Arg
  MISC_FEATURE (417)..(417): Glu or Gln or Ser or Lys or Arg or Absent or Asp
  MISC_FEATURE (418)..(418): Ser or Lys or Arg or Absent or Cys
  MISC_FEATURE (419)..(419): Ile or Leu or Absent
  MISC_FEATURE (420)..(420): Ile or Glu or Asp or Absent or Gln or Lys
  MISC_FEATURE (421)..(421): His or Glu or Met or Leu or Absent or Asp or Asn
  MISC_FEATURE (422)..(422): His or Met or Trp or Absent or Arg
  MISC_FEATURE (424)..(424): Ile or Leu or Absent or Thr or Phe
  MISC_FEATURE (435)..(435): Thr or Ser or Gly or Absent or any naturally occurring amino acid or Phe
  MISC_FEATURE (436)..(436): His or Leu or Asn or Absent or Gln or Arg
  MISC_FEATURE (440)..(440): Asn or Leu or Absent or Ser or Ala or Lys or Glu
  MISC_FEATURE (441)..(441): Ala or Absent or Val or Thr
  MISC_FEATURE (443)..(443): Ser or Asp or Absent or Asn or Tyr or His
  MISC_FEATURE (444)..(444): Asp or Lys or Absent or Ala or Glu or Gln
  MISC_FEATURE (446)..(446): Cys or Absent or Val or Ile
  MISC_FEATURE (447)..(447): Ala or Arg or Absent or Glu or Gln or Ile or Lys
  MISC_FEATURE (448)..(448): Lys or Glu or Absent or Gln or Ala or Arg
  MISC_FEATURE (449)..(449): Arg or Lys or Absent or His or Gln
  MISC_FEATURE (451)..(451): Val or Leu or Absent
  MISC_FEATURE (452)..(452): Lys or Thr or Absent or Pro or Cys
  MISC_FEATURE (453)..(453): Val or Thr or Absent or Cys
  MISC_FEATURE (454)..(454): Ser or Absent or Ala or Val
  MISC_FEATURE (456)..(456): Val or Ile or Absent or Ala
  MISC_FEATURE (458)..(458): Val or Absent or Ile
  MISC_FEATURE (467)..(467): Leu or Absent or Pro or Ala or Asp
  MISC_FEATURE (468)..(468): Leu or Gln or Ile or Val
  MISC_FEATURE (496)..(496): Ala or Ile or Val or Thr
  MISC_FEATURE (497)..(497): Tyr or Asp or Arg or Glu or His or Gln
  MISC_FEATURE (500)..(500): Val or Ile or Leu
  MISC_FEATURE (509)..(509): Gln or Tyr or Asp or Asn
  MISC_FEATURE (516)..(516): Phe or His or Gln or Tyr or Absent
  MISC_FEATURE (523)..(523): Gln or Asn or Val or Asp or Tyr
  MISC_FEATURE (532)..(532): Thr or Ile or Val or Ser
  MISC_FEATURE (539)..(539): Pro or Ser or Asp or Absent or Arg or Glu or Lys
  MISC_FEATURE (540)..(540): Asn or Gly or His or Absent or Arg or Asp
  MISC_FEATURE (543)..(543): Ile or Leu or Cys or Phe or Tyr
  MISC_FEATURE (546)..(546): Val or Ile or Leu or Ala
  MISC_FEATURE (547)..(547): Arg or Val or Ala or Asp or Glu or Gly or any naturally occurring amino acid or Tyr or His
  MISC_FEATURE (548)..(548): Asn or Arg or Gly or Ser or Lys or His
  MISC_FEATURE (551)..(551): Asp or Glu or Ala or Lys or Arg
  MISC_FEATURE (552)..(552): Thr or Arg or Ala or Lys or Glu or Asp
  MISC_FEATURE (553)..(553): Gln or Lys or Asn or Ser
  MISC_FEATURE (556)..(556): Ala or Cys or Met or Val
  MISC_FEATURE (558)..(558): Absent or any naturally occurring amino acid
  MISC_FEATURE (570)..(570): Val or Leu or Met or Glu or Ile
  MISC_FEATURE (571)..(571): Thr or Gly or Glu or Ser or Ala or Val
  MISC_FEATURE (572)..(572): Ser or Met or Gln or Asp or Ala or Glu or Arg or Lys
  MISC_FEATURE (574)..(574): Gly or Pro or Leu or Absent or Met or Thr
  MISC_FEATURE (575)..(575): Absent or Val or Gln or Thr or Arg or Asn or Gly or Ser
  MISC_FEATURE (576)..(576): Absent or Thr or Ile or Gly or Ser or Leu or Phe or Pro or Asn
  MISC_FEATURE (577)..(577): Absent or Met or Ala or Val or Leu or Asn or Phe
  MISC_FEATURE (578)..(578): Absent or Asn or Asp or Lys
  MISC_FEATURE (579)..(579): Absent or Lys or Asp or Asn
  MISC_FEATURE (580)..(580): Absent or Glu or Pro or Gly or Gln or Ala or Thr or Leu or Met
  MISC_FEATURE (581)..(581): Val or Thr or Gln or Absent or His or any naturally occurring amino acid or Ser or Lys or Asn
  MISC_FEATURE (592)..(592): Ile or Phe or Gly or Val
  MISC_FEATURE (597)..(597): Cys or Gln or Gly or Lys or Arg or Ser or Phe
  MISC_FEATURE (598)..(598): Lys or Gln or Gly or Asp or Asn or Phe or Ala or Absent or Thr
  MISC_FEATURE (599)..(599): Gln or Lys or Gly or Glu or Met or Absent or Arg or Ile or His or Asn
  MISC_FEATURE (600)..(600): Leu or Gly or Phe or Ile or Absent
  MISC_FEATURE (602)..(602): Ser or Glu or Gly or Ala or Lys or Asn or Asp or Absent or Val
  MISC_FEATURE (605)..(605): Lys or Pro or Gly or Ala or Absent or Leu or Gln
  MISC_FEATURE (606)..(606): Absent or Val or Arg or Lys or Ala
  MISC_FEATURE (607)..(607): Absent or Gly or Gln or Thr or Lys or Val or Glu or Ala
  MISC_FEATURE (608)..(608): Absent or Asp or Gln or Ala or Pro or Thr or Arg or Tyr or His or Phe
  MISC_FEATURE (609)..(609): Absent or Ala
  MISC_FEATURE (610)..(610): Absent or Ser or His or Lys or Asn or Arg
  MISC_FEATURE (611)..(611): Absent or Gly or Ile or Leu or Phe or Asp or Glu
  MISC_FEATURE (612)..(612): Absent or Asn or Asp or Glu or Ser or Pro or Thr
  MISC_FEATURE (613)..(613): Cys or Val or Pro or Ala or Ile or Absent or Leu
  MISC_FEATURE (614)..(614): Asp or Val or Asn or Thr or Absent
  MISC_FEATURE (615)..(615): Ile or Leu or Absent
  MISC_FEATURE (621)..(621): Thr or Val or Ser or Absent or Phe or Lys
  MISC_FEATURE (626)..(626): Gly or Ala or Arg or Ser or Absent or Asn
  MISC_FEATURE (627)..(627): Cys or Ile or Val or Absent
  MISC_FEATURE (628)..(628): Gln or Arg or Lys or Ser or Pro or Absent or Gly
  MISC_FEATURE (629)..(629): Ala or Thr or Met or Ser or Absent
  MISC_FEATURE (630)..(630): Asn or His or Thr or Absent or Glu or Ile
  MISC_FEATURE (632)..(632): His or Ser or Arg or Asn or Ala or Absent
  MISC_FEATURE (634)..(634): Ser or Ala or Arg or Asn or Absent or Pro
  MISC_FEATURE (638)..(638): Thr or Ser or Arg or Lys or Absent or Ala
  MISC_FEATURE (639)..(639): Val or Ile or Ala or Leu or Absent or Met
  MISC_FEATURE (641)..(641): Gly or Ala or Absent
  MISC_FEATURE (642)..(642): Gln or Arg or His or Absent
  MISC_FEATURE (643)..(643): Asn or Absent or Gly or Ser
  MISC_FEATURE (645)..(645): Val or Absent or Ile or Leu
  MISC_FEATURE (649)..(649): Phe or Absent or Met
  MISC_FEATURE (652)..(652): Phe or Leu or Tyr or Absent
  MISC_FEATURE (653)..(653): Thr or Ser or Absent or Cys
  MISC_FEATURE (655)..(655): Ile or Val or Phe or Cys or Absent
  MISC_FEATURE (658)..(658): Gly or Ala or Absent
  MISC_FEATURE (659)..(659): Thr or Met or Leu or Pro or Absent
  MISC_FEATURE (662)..(662): Ala or Gly or Ser or Thr or Absent or Asn or Val
  MISC_FEATURE (663)..(663): His or Arg or Absent
  MISC_FEATURE (664)..(664): Thr or Tyr or His or Gln or Absent
  MISC_FEATURE (665)..(665): Ala or Val or Ser or Cys or Absent
  MISC_FEATURE (667)..(667): Leu or Ile or Absent
  MISC_FEATURE (669)..(669): Ile or Phe or Absent
  MISC_FEATURE (670)..(670): Pro or Asn or Tyr or Absent or Ser or Lys or Ala
  MISC_FEATURE (671)..(671): Arg or Pro or Leu or Val or Thr or His or Absent
  MISC_FEATURE (672)..(672): Met or Val or Ile or Absent or Ala
  MISC_FEATURE (673)..(673): Ile or Thr or Absent or Ser or Val
  MISC_FEATURE (674)..(674): Glu or Ser or Gln or Absent or Arg or Ala
  MISC_FEATURE (675)..(675): His or Ala or Lys or Absent or Arg or Thr
  MISC_FEATURE (676)..(676): Glu or Pro or Ala or Gln or Absent or Ser
  MISC_FEATURE (677)..(677): Arg or Asn or Absent
  MISC_FEATURE (678)..(678): Leu or Thr or Arg or Lys or Absent or Ala or His or Asn
  MISC_FEATURE (680)..(680): Asp or Asn or Val or Absent or Glu
  MISC_FEATURE (681)..(681): Pro or Ile or Absent or His or Thr or Val
  MISC_FEATURE (682)..(682): Asp or Glu or Trp or Arg or Lys or Thr or Absent or Ser or Ala
  MISC_FEATURE (683)..(683): Gly or Asp or Absent or Ala
  MISC_FEATURE (685)..(685): Met or Ala or Arg or Absent
  MISC_FEATURE (687)..(687): Absent or any naturally occurring amino acid
  MISC_FEATURE (688)..(688): His or Glu or Asn or Ala or Absent
  MISC_FEATURE (690)..(690): Thr or Leu or Val or Absent
  MISC_FEATURE (691)..(691): Leu or Arg or Ile or Absent or Met
  MISC_FEATURE (692)..(692): Glu or Phe or Ala or Thr or Ser or Cys or Absent
  MISC_FEATURE (693)..(693): Ser or Ala or Asp or Absent
  MISC_FEATURE (694)..(694): Thr or Ile or Asn or Absent
  MISC_FEATURE (695)..(695): Gly or Arg or Asn or Absent or His
  MISC_FEATURE (698)..(698): Asp or Thr or Ser or Cys or Absent or Asn
  MISC_FEATURE (700)..(700): Phe or Ser or His or Gln or Ala or Leu or Met or Absent
  MISC_FEATURE (701)..(701): Absent or Lys or Pro or Asn or His or Ser or Arg or Gln
  MISC_FEATURE (702)..(702): Absent or Ser or Pro
  MISC_FEATURE (703)..(703): Absent or Pro
  MISC_FEATURE (704)..(704): Absent or Pro or Lys
  MISC_FEATURE (705)..(705): Absent or Gln or Gly
  MISC_FEATURE (706)..(706): Absent or Glu or Ala
  MISC_FEATURE (707)..(707): Absent or Gln or Ile
  MISC_FEATURE (708)..(708): Absent or Leu or Ile
  MISC_FEATURE (709)..(709): Absent or Ala or Glu
  MISC_FEATURE (710)..(710): Absent or Ala or Gly
  MISC_FEATURE (711)..(711): Absent or Ala or Lys
  MISC_FEATURE (712)..(712): Absent or Ala or Pro or Gln or Thr or His or Tyr
  MISC_FEATURE (713)..(713): Absent or Ala or Lys or Asp or Glu or Ser or Asn
  MISC_FEATURE (714)..(714): Absent or Val or Asp or Glu or Thr or Lys or His
  MISC_FEATURE (715)..(715): Absent or Ala or Val or Ile
  MISC_FEATURE (716)..(716): Absent or Ala or Ile or Val or Glu or Leu
  MISC_FEATURE (717)..(717): Absent or Glu or Leu or Lys or Asn or His or Gln or Ile
  MISC_FEATURE (718)..(718): Absent or Arg or Val or Ser or Ala or Met or Leu or Glu or Gln
  MISC_FEATURE (719)..(719): Absent or Glu or Gln or Gly or Lys or Ser
  MISC_FEATURE (720)..(720): Absent or Ala or Glu or Ser or Gln or His or Arg
  MISC_FEATURE (721)..(721): Absent or Ala or Gly or Asp or Val
  MISC_FEATURE (722)..(722): Absent or Ala or Glu or Asp or His or Gln
  MISC_FEATURE (723)..(723): Absent or Gln or Glu or Asp or Arg or Lys
  MISC_FEATURE (724)..(724): Absent or Ala or Pro or Glu or Leu or Gln
  MISC_FEATURE (725)..(725): Absent or Ala or Pro or Ser or His or Arg or Lys or Asn or Glu
  MISC_FEATURE (726)..(726): Absent or Ala or Thr or Asn or Ile or His or Asp
  MISC_FEATURE (727)..(727): Absent or Ala or Gln or Glu or Val or Leu or His or Ser or Thr
  MISC_FEATURE (728)..(728): Absent or Ala or Leu or Asn or Pro or His or Met or Lys or Arg
  MISC_FEATURE (729)..(729): Absent or Ala or Leu or Glu or Asn or His or Val or Ser or Gln or Arg or Gly
  MISC_FEATURE (730)..(730): Absent or Ala or Glu or Lys or Val or Thr or Asn or Asp or His or Arg or Gly
  MISC_FEATURE (731)..(731): Absent or Val or Gly or Cys or Glu or Leu or Thr or Asp
  MISC_FEATURE (732)..(732): Absent or Ala or Glu or Thr or Gly or Leu or Gln or Val
  MISC_FEATURE (733)..(733): Absent or Ala or Asn or Pro or Glu or Leu or Lys or Asp
  MISC_FEATURE (734)..(734): Absent or Ala or Cys or Thr or Asn or Asp or Leu
  MISC_FEATURE (735)..(735): Absent or Ala or Lys or Ser or Asp or Glu
  MISC_FEATURE (736)..(736): Absent or Ser or Asp or Thr or Leu or Pro or Gly or Lys
  MISC_FEATURE (737)..(737): Absent or Asp or Ser or Val or Glu or Gly or Gln
  MISC_FEATURE (738)..(738): Absent or Pro or Lys or Leu or Asn or Ser or Gln or Thr or Ala
  MISC_FEATURE (739)..(739): Absent or Val or Phe or Ser or Ala or Leu
  MISC_FEATURE (740)..(740): Absent or Met or Ala or Ile or Pro or Ser
  MISC_FEATURE (741)..(741): Absent or Val or Thr or His or Pro or Lys or Ala or Gly or Ser or Asn
  MISC_FEATURE (742)..(742): Absent or Ser or Lys or Asp or Leu or Asn or Gly
  MISC_FEATURE (743)..(743): Absent or Gly or Asp or Asn or Leu or Cys or His or Thr or Ser
  MISC_FEATURE (744)..(744): Absent or Tyr or Ile or His or Ala or Ser or Thr
  MISC_FEATURE (745)..(745): Absent or Gly or Pro or Val or Asn or Ser or Thr
  MISC_FEATURE (746)..(746): Absent or Arg or Ser or Asp or Ala or Phe or His or Lys or Met
  MISC_FEATURE (747)..(747): Absent or His or Met or Asp or Gly or Leu or Ser or Pro or Val
  MISC_FEATURE (748)..(748): Absent or Leu or Thr or Gln or Asp or Tyr or Val or Ile
  MISC_FEATURE (749)..(749): Absent or Asn or Tyr or Gly or Ile or Val or Pro or Ser or Cys
  MISC_FEATURE (750)..(750): Absent or Gly or Ser or Ala or Pro or Asp or Ile or Leu or His
  MISC_FEATURE (751)..(751): Absent or Thr or Met or Ala or Asn or Lys or Asp or Gln or Ser
  MISC_FEATURE (752)..(752): Absent or Leu or Ser or Cys or Ile or Pro or Asn or Gln
  MISC_FEATURE (753)..(753): Absent or Ala or Asn or Cys or Arg or Gln or Val
  MISC_FEATURE (754)..(754): Absent or Asp or Gly or Asn or Phe or Ser or His
  MISC_FEATURE (755)..(755): Absent or Gly or Ser or Thr or Arg
  MISC_FEATURE (756)..(756): Absent or Ser or Ala or Ile or Leu or Gln
  MISC_FEATURE (757)..(757): Absent or Ser or Glu or Ala or Gly or Pro or Lys
  MISC_FEATURE (758)..(758): Absent or Ile or Leu or Ala or Pro
  MISC_FEATURE (759)..(759): Absent or Ala or Leu or Glu or Val or Ser
  MISC_FEATURE (760)..(760): Absent or Gly or Leu or Asn or Thr
  MISC_FEATURE (761)..(761): Absent or Gly or Lys or Arg or Ser
  MISC_FEATURE (762)..(762): Absent or Gly or Asn
  MISC_FEATURE (763)..(763): Absent or Ser
  MISC_FEATURE (764)..(764): Absent or Gly or Ser
  MISC_FEATURE (765)..(765): Absent or Gly or Ala
  MISC_FEATURE (766)..(766): Absent or Gly or Asn
  MISC_FEATURE (767)..(767): Absent or Ser or Val
  MISC_FEATURE (768)..(768): Absent or Ser or Arg
  MISC_FEATURE (769)..(769): Absent or Pro or Ile
  MISC_FEATURE (770)..(770): Absent or Ala
  MISC_FEATURE (771)..(771): Absent or Val
  MISC_FEATURE (772)..(772): Absent or Asp
  MISC_FEATURE (773)..(773): Absent or Ser
  MISC_FEATURE (774)..(774): Absent or Gly
  MISC_FEATURE (775)..(775): Absent or Gly
  MISC_FEATURE (776)..(776): Absent or Asp
  MISC_FEATURE (777)..(777): Absent or Ala
  MISC_FEATURE (778)..(778): Absent or Ala
  MISC_FEATURE (779)..(779): Absent or Ser
  MISC_FEATURE (780)..(780): Absent or Pro
  MISC_FEATURE (781)..(781): Absent or Thr
  MISC_FEATURE (782)..(782): Absent or Ala
  MISC_FEATURE (783)..(783): Absent or Ala
  MISC_FEATURE (784)..(784): Absent or Ala
  MISC_FEATURE (785)..(785): Absent or Ala
  MISC_FEATURE (786)..(786): Absent or Gly
  MISC_FEATURE (787)..(787): Absent or Ser
  MISC_FEATURE (788)..(788): Absent or Ala
  MISC_FEATURE (789)..(789): Absent or Ala
  MISC_FEATURE (790)..(790): Absent or Ala
  MISC_FEATURE (791)..(791): Absent or Ala
  MISC_FEATURE (792)..(792): Absent or Asp
  MISC_FEATURE (793)..(793): Absent or Pro
  MISC_FEATURE (794)..(794): Absent or Thr
  MISC_FEATURE (795)..(795): Absent or Ala
  MISC_FEATURE (796)..(796): Absent or Lys
  MISC_FEATURE (797)..(797): Absent or Pro
  MISC_FEATURE (798)..(798): Absent or Ala
  MISC_FEATURE (799)..(799): Absent or Ala
  MISC_FEATURE (800)..(800): Absent or Ala
  MISC_FEATURE (801)..(801): Absent or Ala
  MISC_FEATURE (802)..(802): Absent or Val
  MISC_FEATURE (803)..(803): Absent or Ser
  MISC_FEATURE (804)..(804): Absent or Asp
  MISC_FEATURE (805)..(805): Absent or Asp
  MISC_FEATURE (806)..(806): Absent or Val
  MISC_FEATURE (807)..(807): Absent or Asp
  MISC_FEATURE (808)..(808): Absent or Glu
  MISC_FEATURE (809)..(809): Absent or Asp
  MISC_FEATURE (810)..(810): Absent or Val
  MISC_FEATURE (811)..(811): Absent or Asp
  MISC_FEATURE (812)..(812): Absent or Ala
  MISC_FEATURE (813)..(813): Absent or Gly
  MISC_FEATURE (814)..(814): Absent or Val
  MISC_FEATURE (815)..(815): Absent or Asp
  MISC_FEATURE (816)..(816): Absent or Ala
  MISC_FEATURE (817)..(817): Absent or Pro
  MISC_FEATURE (818)..(818): Absent or Ala
  MISC_FEATURE (819)..(819): Absent or Ala
  MISC_FEATURE (820)..(820): Absent or Ser
  MISC_FEATURE (821)..(821): Absent or Glu
  MISC_FEATURE (822)..(822): Absent or Gly
  MISC_FEATURE (823)..(823): Absent or Asp
  MISC_FEATURE (824)..(824): Absent or Val
  MISC_FEATURE (825)..(825): Absent or His
  MISC_FEATURE (826)..(826): Absent or Phe
  MISC_FEATURE (827)..(827): Absent or Met
  MISC_FEATURE (828)..(828): Absent or Thr
  MISC_FEATURE (829)..(829): Absent or Arg
  MISC_FEATURE (830)..(830): Absent or Ala
  MISC_FEATURE (831)..(831): Absent or Gly
  MISC_FEATURE (832)..(832): Absent or Ala
  MISC_FEATURE (833)..(833): Absent or Glu
  MISC_FEATURE (834)..(834): Absent or Pro
  MISC_FEATURE (835)..(835): Absent or Gln
  MISC_FEATURE (836)..(836): Absent or Gln
  MISC_FEATURE (837)..(837): Absent or Gly
  MISC_FEATURE (838)..(838): Absent or Pro
  MISC_FEATURE (839)..(839): Absent or Lys
  MISC_FEATURE (840)..(840): Absent or Leu
  MISC_FEATURE (841)..(841): Absent or Ser
  MISC_FEATURE (842)..(842): Absent or Ala
  MISC_FEATURE (843)..(843): Absent or Gly
  MISC_FEATURE (844)..(844): Absent or Ala
  MISC_FEATURE (845)..(845): Absent or Gly
  MISC_FEATURE (846)..(846): Absent or Gly
  MISC_FEATURE (847)..(847): Absent or Ala
  MISC_FEATURE (848)..(848): Absent or Gly
  MISC_FEATURE (849)..(849): Absent or Gly
  MISC_FEATURE (850)..(850): Absent or Ala
  MISC_FEATURE (851)..(851): Absent or Ser
  MISC_FEATURE (852)..(852): Absent or Gly
  MISC_FEATURE (853)..(853): Absent or Leu
  MISC_FEATURE (854)..(854): Absent or Gly
  MISC_FEATURE (855)..(855): Absent or Leu
  MISC_FEATURE (856)..(856): Absent or Ile
  MISC_FEATURE (857)..(857): Absent or Val
  MISC_FEATURE (858)..(858): Absent or Gly
  MISC_FEATURE (859)..(859): Absent or Asp
  MISC_FEATURE (860)..(860): Absent or Pro
  MISC_FEATURE (861)..(861): Absent or Gln
  MISC_FEATURE (862)..(862): Absent or Ala
  MISC_FEATURE (863)..(863): Absent or Ala
  MISC_FEATURE (864)..(864): Absent or Thr
  MISC_FEATURE (865)..(865): Absent or Arg
  MISC_FEATURE (866)..(866): Absent or Ala
  MISC_FEATURE (867)..(867): Absent or Ala
  MISC_FEATURE (868)..(868): Absent or Ala
  MISC_FEATURE (869)..(869): Absent or Glu
  MISC_FEATURE (870)..(870): Absent or Ala
  MISC_FEATURE (871)..(871): Absent or Ala
  MISC_FEATURE (872)..(872): Absent or Ala
  MISC_FEATURE (873)..(873): Absent or Glu
  MISC_FEATURE (874)..(874): Absent or Ala
  MISC_FEATURE (875)..(875): Absent or Ala
  MISC_FEATURE (876)..(876): Absent or Asp
  MISC_FEATURE (877)..(877): Absent or Ala
  MISC_FEATURE (878)..(878): Absent or Gly
  MISC_FEATURE (879)..(879): Absent or His
  MISC_FEATURE (880)..(880): Absent or Leu
  MISC_FEATURE (881)..(881): Absent or Ala
  MISC_FEATURE (882)..(882): Absent or Ala
  MISC_FEATURE (883)..(883): Absent or Ala
  MISC_FEATURE (884)..(884): Absent or Ala
  MISC_FEATURE (885)..(885): Absent or Leu
  MISC_FEATURE (886)..(886): Absent or Gly
  MISC_FEATURE (887)..(887): Absent or Pro
  MISC_FEATURE (888)..(888): Absent or Ala
  MISC_FEATURE (889)..(889): Absent or Ala
  MISC_FEATURE (890)..(890): Absent or Ala
  MISC_FEATURE (891)..(891): Absent or Pro
  MISC_FEATURE (892)..(892): Absent or Glu
  MISC_FEATURE (893)..(893): Absent or Pro
  MISC_FEATURE (894)..(894): Absent or Pro
  MISC_FEATURE (895)..(895): Absent or Ala
  MISC_FEATURE (896)..(896): Absent or Ala
  MISC_FEATURE (897)..(897): Absent or Thr
  MISC_FEATURE (898)..(898): Absent or Glu
  MISC_FEATURE (899)..(899): Absent or Leu
  MISC_FEATURE (900)..(900): Absent or Pro
  MISC_FEATURE (901)..(901): Absent or Trp
  MISC_FEATURE (902)..(902): Absent or Pro
  MISC_FEATURE (903)..(903): Absent or Ser
  MISC_FEATURE (904)..(904): Absent or Val
  MISC_FEATURE (905)..(905): Absent or Gly
  MISC_FEATURE (906)..(906): Absent or Pro
  MISC_FEATURE (907)..(907): Absent or Thr
  MISC_FEATURE (908)..(908): Absent or Ala
  MISC_FEATURE (909)..(909): Absent or Ser
  MISC_FEATURE (910)..(910): Absent or Val
  MISC_FEATURE (911)..(911): Absent or Pro
  MISC_FEATURE (912)..(912): Absent or Leu
  MISC_FEATURE (913)..(913): Absent or Pro
  MISC_FEATURE (914)..(914): Absent or Ala
  MISC_FEATURE (915)..(915): Absent or Ala
  MISC_FEATURE (916)..(916): Absent or Ala
  MISC_FEATURE (917)..(917): Absent or Ala
  MISC_FEATURE (918)..(918): Absent or Ala
  MISC_FEATURE (919)..(919): Absent or Ala
  MISC_FEATURE (920)..(920): Absent or Ala
  MISC_FEATURE (921)..(921): Absent or Ala
  MISC_FEATURE (922)..(922): Absent or Ala
  MISC_FEATURE (923)..(923): Absent or Ala
  MISC_FEATURE (924)..(924): Absent or Ala
  MISC_FEATURE (925)..(925): Absent or Ala
  MISC_FEATURE (926)..(926): Absent or Asp
  MISC_FEATURE (927)..(927): Absent or Lys
  MISC_FEATURE (928)..(928): Absent or Gly
  MISC_FEATURE (929)..(929): Absent or Gly
  MISC_FEATURE (930)..(930): Absent or Gly
  MISC_FEATURE (931)..(931): Absent or Glu
  MISC_FEATURE (932)..(932): Absent or Arg
  MISC_FEATURE (933)..(933): Absent or Pro
  MISC_FEATURE (934)..(934): Absent or Gly
  MISC_FEATURE (935)..(935): Absent or Thr
  MISC_FEATURE (936)..(936): Absent or Val
  MISC_FEATURE (937)..(937): Absent or Ala
  MISC_FEATURE (938)..(938): Absent or Ala
  MISC_FEATURE (939)..(939): Absent or Ala
  MISC_FEATURE (940)..(940): Absent or Glu
  MISC_FEATURE (941)..(941): Absent or Ala
  MISC_FEATURE (942)..(942): Absent or Glu
  MISC_FEATURE (943)..(943): Absent or Pro
  MISC_FEATURE (944)..(944): Absent or Ile
  MISC_FEATURE (945)..(945): Absent or Thr
  MISC_FEATURE (946)..(946): Absent or Pro
  MISC_FEATURE (947)..(947): Absent or Ala
  MISC_FEATURE (948)..(948): Absent or Ala
  MISC_FEATURE (949)..(949): Absent or Ala
  MISC_FEATURE (950)..(950): Absent or Asn
  MISC_FEATURE (951)..(951): Absent or Gly
  MISC_FEATURE (952)..(952): Absent or Pro
  MISC_FEATURE (953)..(953): Absent or Ala
  MISC_FEATURE (954)..(954): Absent or Thr
  MISC_FEATURE (955)..(955): Absent or Ala
  MISC_FEATURE (956)..(956): Absent or Pro
  MISC_FEATURE (957)..(957): Absent or Pro
  MISC_FEATURE (958)..(958): Absent or Pro
  MISC_FEATURE (959)..(959): Absent or Thr
  MISC_FEATURE (960)..(960): Absent or Ala
  MISC_FEATURE (961)..(961): Absent or Thr
  MISC_FEATURE (962)..(962): Absent or Ala
  MISC_FEATURE (963)..(963): Absent or Asn
  MISC_FEATURE (964)..(964): Absent or Asn
  MISC_FEATURE (965)..(965): Absent or Val
  MISC_FEATURE (966)..(966): Absent or Val
  MISC_FEATURE (967)..(967): Absent or Pro
  MISC_FEATURE (968)..(968): Absent or Met
  MISC_FEATURE (969)..(969): Absent or Ser
  MISC_FEATURE (970)..(970): Absent or Gly
  MISC_FEATURE (971)..(971): Absent or Ala
  MISC_FEATURE (972)..(972): Absent or Gly
  MISC_FEATURE (973)..(973): Absent or Ser
  MISC_FEATURE (974)..(974): Absent or Ser
  MISC_FEATURE (975)..(975): Absent or Ser
  MISC_FEATURE (976)..(976): Absent or Thr
  MISC_FEATURE (977)..(977): Absent or Asp
  MISC_FEATURE (978)..(978): Absent or Gly
  MISC_FEATURE (979)..(979): Absent or Arg
  MISC_FEATURE (980)..(980): Absent or Gly
  MISC_FEATURE (981)..(981): Absent or Gln
  MISC_FEATURE (982)..(982): Absent or Gln
  MISC_FEATURE (983)..(983): Absent or Gln
  MISC_FEATURE (984)..(984): Absent or Asp
  MISC_FEATURE (985)..(985): Absent or Gly
  MISC_FEATURE (986)..(986): Absent or Gly
  MISC_FEATURE (987)..(987): Absent or Ala
  MISC_FEATURE (988)..(988): Absent or Ala
  MISC_FEATURE (989)..(989): Absent or Val
  MISC_FEATURE (990)..(990): Absent or Thr
  MISC_FEATURE (991)..(991): Absent or Gly
  MISC_FEATURE (992)..(992): Absent or Ala
  MISC_FEATURE (993)..(993): Absent or Lys
  MISC_FEATURE (994)..(994): Absent or Ala
  MISC_FEATURE (995)..(995): Absent or Ala
  MISC_FEATURE (996)..(996): Absent or Ala
  MISC_FEATURE (997)..(997): Absent or Ala
  MISC_FEATURE (998)..(998): Absent or Ala
  MISC_FEATURE (999)..(999): Absent or Ser
  MISC_FEATURE (1000)..(1000): Absent or Gly
  MISC_FEATURE (1001)..(1001): Absent or Gly
  MISC_FEATURE (1002)..(1002): Absent or Gln
  MISC_FEATURE (1003)..(1003): Absent or Gln
  MISC_FEATURE (1004)..(1004): Absent or Gln
  MISC_FEATURE (1005)..(1005): Absent or Gln
  MISC_FEATURE (1006)..(1006): Absent or Gln
  MISC_FEATURE (1007)..(1007): Absent or Gln
  MISC_FEATURE (1008)..(1008): Absent or Gln
  MISC_FEATURE (1009)..(1009): Absent or Gln
  MISC_FEATURE (1010)..(1010): Absent or Gln
  MISC_FEATURE (1011)..(1011): Absent or Gln
  MISC_FEATURE (1012)..(1012): Absent or Gln
  MISC_FEATURE (1013)..(1013): Absent or Gln
  MISC_FEATURE (1014)..(1014): Absent or Gln
  MISC_FEATURE (1015)..(1015): Absent or Gln
  MISC_FEATURE (1016)..(1016): Absent or Gln
  MISC_FEATURE (1017)..(1017): Absent or Gln
  MISC_FEATURE (1018)..(1018): Absent or Gln
  MISC_FEATURE (1019)..(1019): Absent or Gln
  MISC_FEATURE (1020)..(1020): Absent or Gln
  MISC_FEATURE (1021)..(1021): Absent or Gln
  MISC_FEATURE (1022)..(1022): Absent or Gly
  MISC_FEATURE (1023)..(1023): Absent or Arg
  MISC_FEATURE (1024)..(1024): Absent or Arg
  MISC_FEATURE (1025)..(1025): Absent or Arg
  MISC_FEATURE (1026)..(1026): Absent or Gln
  MISC_FEATURE (1027)..(1027): Absent or Gly
  MISC_FEATURE (1028)..(1028): Absent or Gly
  MISC_FEATURE (1029)..(1029): Absent or Lys
  MISC_FEATURE (1030)..(1030): Absent or Gly
  MISC_FEATURE (1031)..(1031): Absent or Gly
  MISC_FEATURE (1032)..(1032): Absent or Gly
  MISC_FEATURE (1033)..(1033): Absent or Gly
  MISC_FEATURE (1034)..(1034): Absent or Gly
  MISC_FEATURE (1035)..(1035): Absent or Gly
  MISC_FEATURE (1036)..(1036): Absent or Gly
  MISC_FEATURE (1037)..(1037): Absent or Ala
  MISC_FEATURE (1038)..(1038): Absent or Ser
  MISC_FEATURE (1039)..(1039): Absent or Ser
  MISC_FEATURE (1040)..(1040): Absent or His
  MISC_FEATURE (1041)..(1041): Absent or His
  MISC_FEATURE (1042)..(1042): Absent or His
  MISC_FEATURE (1043)..(1043): Absent or His
  MISC_FEATURE (1044)..(1044): Absent or His
  MISC_FEATURE (1045)..(1045): Absent or Ser
  MISC_FEATURE (1046)..(1046): Absent or Lys
  MISC_FEATURE (1047)..(1047): Absent or Pro
  MISC_FEATURE (1048)..(1048): Absent or Arg
  MISC_FEATURE (1049)..(1049): Absent or Pro
  MISC_FEATURE (1050)..(1050): Absent or Gly
  MISC_FEATURE (1051)..(1051): Absent or Glu
  MISC_FEATURE (1052)..(1052): Absent or Gly
  MISC_FEATURE (1053)..(1053): Absent or Asp
  MISC_FEATURE (1054)..(1054): Absent or Ser
  MISC_FEATURE (1055)..(1055): Absent or Glu
XXXXXXXXXXXXXXXXXXXXXXXXXXXXXXXXXXXXXXXXXXXXXXXXXXXXXXXXXXXXXXXXXXXXXXXXXXXXXXXXXXXXXXXXXXXXXXXXXXXXXXXXXXXXXXXXXXXXXXXXXXXXXXXXXXXXXXXXXXXXXXXXXXXDXXXXXXXXXXXXXXXXXXXXXXXXXXXXXXXXXXXXXXXXXXXXXXXXXXXXXXXXXXXXXXXXXXXXXXXXXXXXXXXXXXDXXXXXXVXXXXXXXXGXXXXXXXXXXXXXXXXXXXXXXXXXXXXXXXXXXXXXXXXXXXXXXXXXXXXXXXXXXXXXXXXRAGPRXXXYFXXXXVXAXIVTCGGLCPGXNXVXXXXVXXLXXXYGVXXXXXXGIXXGXXGFYXXXXXXXXXXXXLXXXXVXXIHXRGGXTXLGTSRGGXDXXXIVXXXXXXGXNQVYIIGGDGXXKGAXXIXXEXXXXGXXXXVXGXPKTIDNDIXXIDKSFGFDTAVEEAQRAINAAHVEAESXXNGXGVVKLMGRXSGFIAMXATLASRXVDCCLIPEXPFYLEGXXGLXEFXXXRLXXXGHXVXIVVAEGAGQDLXXXSXXXXXXXXDASGNKLLLDXGLWLXXXXKXHFXXXXXXXXXXXKYIDPXYMIRXXXXXAXDXVYCXXLXXXAXHGAXAGXXGXTVXXVNXXXXYXPXXXXXXXXXXVXXXXRXWXXRXXXXXXQPXFXXXXXXXXXXXXXXXXXXXXXXXXXXXXXXXXXXXXXXXXXXXXXXXXXXXXXXXXXXXXXXXXXXXXXXXXXXXXXXXXXXXXXXXXXXXXXXXXXXXXXXXXXXXXXXXXXXXXXXXXXXXXXXXXXXXXXXXXXXXXXXXXXXXXXXXXXXXXXXXXXXXXXXXXXXXXXXXXXXXXXXXXXXXXXXXXXXXXXXXXXXXXXXXXXXXXXXXXXXXXXXXXXXXXXXXXXXXXXXXXXXXXXXXXXXXXXXXXXXXXXXXXXXXXXXXXXXXXXXXXXXXXXXXXXXXXXXXXXXXXXXXXXXXXXXXXXXXXXXXXXXXXXXXXXXXXXXXXXXXXXXXXXXXXXXXXXXXX

SEQ ID NO: 17387 - protein, 1777 aa, Artificial
  Consensus Sequence of SEQ ID NO. 153 and its homologs
  MISC_FEATURE (1)..(1): Absent or Met
  MISC_FEATURE (2)..(2): Absent or Ala
  MISC_FEATURE (3)..(3): Absent or Thr
  MISC_FEATURE (4)..(4): Absent or Thr
  MISC_FEATURE (5)..(5): Absent or Arg
  MISC_FEATURE (6)..(6): Absent or Pro
  MISC_FEATURE (7)..(7): Absent or Pro
  MISC_FEATURE (8)..(8): Absent or Ala
  MISC_FEATURE (9)..(9): Absent or Ser
  MISC_FEATURE (10)..(10): Absent or His
  MISC_FEATURE (11)..(11): Absent or Pro
  MISC_FEATURE (12)..(12): Absent or Ala
  MISC_FEATURE (13)..(13): Absent or Lys
  MISC_FEATURE (14)..(14): Absent or Ser
  MISC_FEATURE (15)..(15): Absent or Thr or Trp
  MISC_FEATURE (16)..(16): Absent or His or Arg
  MISC_FEATURE (17)..(17): Absent or Leu or Asn
  MISC_FEATURE (18)..(18): Absent or Ser
  MISC_FEATURE (19)..(19): Absent or Phe
  MISC_FEATURE (20)..(20): Absent or Ser
  MISC_FEATURE (21)..(21): Absent or Leu
  MISC_FEATURE (22)..(22): Absent or Pro
  MISC_FEATURE (23)..(23): Absent or Leu
  MISC_FEATURE (24)..(24): Absent or Thr
  MISC_FEATURE (25)..(25): Absent or Leu
  MISC_FEATURE (26)..(26): Absent or Ala
  MISC_FEATURE (27)..(27): Absent or Asp
  MISC_FEATURE (28)..(28): Absent or Leu
  MISC_FEATURE (29)..(29): Absent or Asn
  MISC_FEATURE (30)..(30): Absent or Ser
  MISC_FEATURE (31)..(31): Absent or Gln
  MISC_FEATURE (32)..(32): Absent or Lys
  MISC_FEATURE (33)..(33): Absent or Asn
  MISC_FEATURE (34)..(34): Absent or Arg
  MISC_FEATURE (35)..(35): Absent or Asp
  MISC_FEATURE (36)..(36): Absent or Gly
  MISC_FEATURE (37)..(37): Absent or Gln
  MISC_FEATURE (38)..(38): Absent or Ser
  MISC_FEATURE (39)..(39): Absent or Gly
  MISC_FEATURE (40)..(40): Absent or Met or Glu
  MISC_FEATURE (41)..(41): Absent or Asn or Thr
  MISC_FEATURE (42)..(42): Absent or Val or Leu
  MISC_FEATURE (43)..(43): Absent or Asp or Ala or Ser
  MISC_FEATURE (44)..(44): Absent or Gln or Pro
  MISC_FEATURE (45)..(45): Absent or Cys or Pro or Ser
  MISC_FEATURE (46)..(46): Absent or Gln or His or Pro
  MISC_FEATURE (47)..(47): Absent or Met or Trp or Ser or Gln
  MISC_FEATURE (48)..(48): Absent or Thr or Arg or Pro
  MISC_FEATURE (49)..(49): Absent or Gly or Lys or Arg or Pro
  MISC_FEATURE (50)..(50): Absent or Gly or Lys or Glu
  MISC_FEATURE (51)..(51): Absent or Arg or Met or Val or Gly
  MISC_FEATURE (52)..(52): Absent or Cys or Met or Phe
  MISC_FEATURE (53)..(53): Absent or His or Gly or Arg or Pro
  MISC_FEATURE (54)..(54): Absent or Arg or Pro or Thr
  MISC_FEATURE (55)..(55): Absent or Gln or Gly or Arg or Pro
  MISC_FEATURE (56)..(56): Absent or Lys or Val or Pro or Thr
  MISC_FEATURE (57)..(57): Absent or Lys or Asp or Pro or Ala
  MISC_FEATURE (58)..(58): Absent or Met or Gly or Trp or Val
  MISC_FEATURE (59)..(59): Absent or Met or Gly or Arg or Ala
  MISC_FEATURE (60)..(60): Absent or Gly or Cys or Arg or Pro
  MISC_FEATURE (61)..(61): Absent or Arg or Gly or Ala
  MISC_FEATURE (62)..(62): Absent or Gly or Ala or Arg
  MISC_FEATURE (63)..(63): Absent or Ala or Glu or Met or Arg
  MISC_FEATURE (64)..(64): Absent or Glu or Pro or Ala
  MISC_FEATURE (65)..(65): Absent or Arg or Lys or Gly or Pro
  MISC_FEATURE (66)..(66): Absent or Gly or Pro
  MISC_FEATURE (67)..(67): Absent or Cys or Tyr or Glu or Pro
  MISC_FEATURE (68)..(68): Absent or Gly or Arg or Ala or Pro
  MISC_FEATURE (69)..(69): Absent or Thr or Pro or Arg
  MISC_FEATURE (70)..(70): Absent or Glu or Phe or Pro
  MISC_FEATURE (71)..(71): Absent or Glu or Arg or Leu or Pro
  MISC_FEATURE (72)..(72): Absent or Lys or Arg or Pro
  MISC_FEATURE (73)..(73): Absent or Pro or Val or Ala
  MISC_FEATURE (74)..(74): Absent or Cys or Ala or Asp
  MISC_FEATURE (75)..(75): Absent or Pro or Leu or Thr or Ala
  MISC_FEATURE (76)..(76): Absent or Ile or Asp or Glu
  MISC_FEATURE (77)..(77): Absent or Ser or Lys or Glu or Ala
  MISC_FEATURE (78)..(78): Absent or Arg or Glu or Ser or Ala
  MISC_FEATURE (79)..(79): Absent or Ala or Asn or Asp or Ser
  MISC_FEATURE (80)..(80): Absent or Pro or Gly or Val or Ser
  MISC_FEATURE (81)..(81): Absent or Ala or Tyr or Ser
  MISC_FEATURE (82)..(82): Absent or Lys or Glu or Leu or Arg
  MISC_FEATURE (83)..(83): Absent or Ile or Asp or Asn or Gly
  MISC_FEATURE (84)..(84): Absent or Ser or Met or Pro
  MISC_FEATURE (85)..(85): Absent or Ala or Gly
  MISC_FEATURE (86)..(86): Absent or Lys or Ser or Asp
  MISC_FEATURE (87)..(87): Absent or Gln or Leu or Asp
  MISC_FEATURE (88)..(88): Absent or Pro or Glu
  MISC_FEATURE (89)..(89): Absent or Gly or Ile
  MISC_FEATURE (90)..(90): Absent or Asn or Asp or Ser
  MISC_FEATURE (91)..(91): Absent or Pro or Phe or Gly
  MISC_FEATURE (92)..(92): Absent or Gly or Leu or Arg
  MISC_FEATURE (93)..(93): Absent or Lys or Ala
  MISC_FEATURE (94)..(94): Absent or Glu or Gln or Gly
  MISC_FEATURE (95)..(95): Absent or Val or Ala
  MISC_FEATURE (96)..(96): Absent or Ser
  MISC_FEATURE (97)..(97): Absent or Leu or Lys or Gln
  MISC_FEATURE (98)..(98): Absent or Gly or Asn or Glu
  MISC_FEATURE (99)..(99): Absent or Val or Leu or Ala
  MISC_FEATURE (100)..(100): Absent or Asp or Ser or Gly
  MISC_FEATURE (101)..(101): Absent or Leu or Glu or Gly
  MISC_FEATURE (102)..(102): Absent or Tyr or Arg or Gly
  MISC_FEATURE (103)..(103): Absent or Ala or Ser or Gly
  MISC_FEATURE (104)..(104): Absent or Gln or Pro or Cys
  MISC_FEATURE (105)..(105): Absent or Ala or Phe or Gly
  MISC_FEATURE (106)..(106): Absent or Arg or Asp or Val
  MISC_FEATURE (107)..(107): Absent or Lys or Val or Thr
  MISC_FEATURE (108)..(108): Absent or Ala or Pro
  MISC_FEATURE (109)..(109): Absent or Leu or Glu or Tyr
  MISC_FEATURE (110)..(110): Absent or Ser or Asp or Glu
  MISC_FEATURE (111)..(111): Absent or Asp or Gly or Gln
  MISC_FEATURE (112)..(112): Absent or Arg or Ser or Ala
  MISC_FEATURE (113)..(113): Absent or Cys or Thr or Arg
  MISC_FEATURE (114)..(114): Absent or Pro or Ser or Lys
  MISC_FEATURE (115)..(115): Absent or Phe or Val or Ala
  MISC_FEATURE (116)..(116): Absent or Glu or Leu
  MISC_FEATURE (117)..(117): Absent or Thr or Ser or Ala
  MISC_FEATURE (118)..(118): Absent or Glu or Val or Leu
  MISC_FEATURE (119)..(119): Absent or Glu or Pro or Arg
  MISC_FEATURE (120)..(120): Absent or Ala or Thr or Ser
  MISC_FEATURE (121)..(121): Absent or Leu or Pro
  MISC_FEATURE (122)..(122): Absent or Ala or Pro or Phe
  MISC_FEATURE (123)..(123): Absent or Asn or Ile or Asp
  MISC_FEATURE (124)..(124): Absent or Thr or Ala or Gly
  MISC_FEATURE (125)..(125): Absent or Val or Leu or Asp
  MISC_FEATURE (126)..(126): Absent or Ser or Ala or Glu
  MISC_FEATURE (127)..(127): Absent or Thr or Asn or Ala
  MISC_FEATURE (128)..(128): Absent or Leu or Val
  MISC_FEATURE (129)..(129): Absent or Pro or Leu or Gly
  MISC_FEATURE (130)..(130): Absent or Ser or Lys or Arg
  MISC_FEATURE (131)..(131): Absent or Gly or Asn or Asp
  MISC_FEATURE (132)..(132): Absent or Leu or His or Ala
  MISC_FEATURE (133)..(133): Absent or Ala or Ser or Trp or Leu
  MISC_FEATURE (134)..(134): Absent or Cys or Asp or Leu
  MISC_FEATURE (135)..(135): Absent or Leu or Asn or Pro
  MISC_FEATURE (136)..(136): Absent or Leu or Lys or Gly or Ala
  MISC_FEATURE (137)..(137): Absent or Ser or Lys or Ala or Arg
  MISC_FEATURE (138)..(138): Absent or Lys or Arg or Val
  MISC_FEATURE (139)..(139): Absent or His or Asp or Ala
  MISC_FEATURE (140)..(140): Absent or Ser or Lys or Arg
  MISC_FEATURE (141)..(141): Absent or Asp or Lys or Phe or Trp
  MISC_FEATURE (142)..(142): Absent or Ser or Val or Ala
  MISC_FEATURE (143)..(143): Absent or Arg or His or Leu or Ala
  MISC_FEATURE (144)..(144): Absent or Lys or Ser or Thr or Val
  MISC_FEATURE (145)..(145): Absent or Arg or Gly or Ser
  MISC_FEATURE (146)..(146): Absent or His or Ala or Glu or Asp
  MISC_FEATURE (147)..(147): Absent or Lys or Asp or Arg or Val
  MISC_FEATURE (148)..(148): Absent or Lys or Pro or Arg
  MISC_FEATURE (149)..(149): Absent or Ser or Lys or Asn
  MISC_FEATURE (150)..(150): Absent or His or Lys
  MISC_FEATURE (151)..(151): Absent or Ser or Lys or His
  MISC_FEATURE (152)..(152): Absent or Asp or Lys or Arg
  MISC_FEATURE (153)..(153): Absent or Thr or Ser or Lys
  MISC_FEATURE (154)..(154): Absent or Lys or Ser or Leu or Ala
  MISC_FEATURE (155)..(155): Absent or Ser or Arg or Leu or Gln
  MISC_FEATURE (156)..(156): Absent or Ser or Gln or Gly
  MISC_FEATURE (157)..(157): Absent or Ser or Gly or Ala or Pro
  MISC_FEATURE (158)..(158): Absent or Arg or Asp or Glu
  MISC_FEATURE (159)..(159): Absent or Gln or Lys or Ala
  MISC_FEATURE (160)..(160): Absent or Ser or Leu or Gly or Ala
  MISC_FEATURE (161)..(161): Absent or Arg or Ala
  MISC_FEATURE (162)..(162): Absent or Gly or Ser or Ala
  MISC_FEATURE (163)..(163): Absent or Ala or Gly
  MISC_FEATURE (164)..(164): Absent or Asn or Ser or Ala
  MISC_FEATURE (165)..(165): Absent or Ile or Ala
  MISC_FEATURE (166)..(166): Absent or Trp or Ala
  MISC_FEATURE (167)..(167): Absent or Leu or Ala
  MISC_FEATURE (168)..(168): Absent or Glu or Val
  MISC_FEATURE (169)..(169): Absent or Thr or His or Glu
  MISC_FEATURE (170)..(170): Absent or Glu or Gln
  MISC_FEATURE (171)..(171): Absent or Gly or Asp or Gln
  MISC_FEATURE (172)..(172): Absent or Tyr or Pro
  MISC_FEATURE (173)..(173): Absent or Phe or Lys
  MISC_FEATURE (174)..(174): Absent or Arg or Pro
  MISC_FEATURE (175)..(175): Absent or Glu or Arg or Ser
  MISC_FEATURE (176)..(176): Absent or Leu or Ser
  MISC_FEATURE (177)..(177): Absent or Ala or Asp or Gly
  MISC_FEATURE (178)..(178): Absent or Phe or Ser
  MISC_FEATURE (179)..(179): Absent or Pro or Lys
  MISC_FEATURE (180)..(180): Absent or Asp or Glu
  MISC_FEATURE (181)..(181): Absent or Ile or Leu or Phe
  MISC_FEATURE (182)..(182): Absent or Glu or Trp
  MISC_FEATURE (183)..(183): Absent or Thr or Asp
  MISC_FEATURE (184)..(184): Absent or Leu
  MISC_FEATURE (185)..(185): Absent or Val or Ser or Met
  MISC_FEATURE (186)..(186): Absent or Glu or Asp
  MISC_FEATURE (187)..(187): Absent or Val or Leu or Pro
  MISC_FEATURE (188)..(188): Absent or Ser or Ala or Tyr
  MISC_FEATURE (189)..(189): Absent or Ser or Phe
  MISC_FEATURE (190)..(190): Absent or Ser or Leu or Arg
  MISC_FEATURE (191)..(191): Absent or Val or Arg or Glu
  MISC_FEATURE (192)..(192): Absent or Ser or Ile
  MISC_FEATURE (193)..(193): Absent or Leu or Asn
  MISC_FEATURE (194)..(194): Absent or Ala or Ser or Trp
  MISC_FEATURE (195)..(195): Absent or Thr or Ser or Asp
  MISC_FEATURE (196)..(196): Absent or Glu or Arg or Asp
  MISC_FEATURE (197)..(197): Absent or Lys or Asn or Leu or Phe
  MISC_FEATURE (198)..(198): Absent or Asn or Cys or Glu
  MISC_FEATURE (199)..(199): Absent or Phe or Arg or Ala
  MISC_FEATURE (200)..(200): Absent or Leu or Ser
  MISC_FEATURE (201)..(201): Absent or Ile or Val or Met
  MISC_FEATURE (202)..(202): Absent or Pro or Gln
  MISC_FEATURE (203)..(203): Absent or Tyr or Ser or Leu or Ala
  MISC_FEATURE (204)..(204): Absent or Ile or Val or Pro
  MISC_FEATURE (205)..(205): Absent or Gly or Glu or Pro or Leu
  MISC_FEATURE (206)..(206): Absent or Asn or Tyr or Leu
  MISC_FEATURE (207)..(207): Absent or Pro or Asp or Glu or Gly
  MISC_FEATURE (208)..(208): Absent or Ile or Ser or Gly or Phe
  MISC_FEATURE (209)..(209): Absent or Glu or Ile or Asn
  MISC_FEATURE (210)..(210): Absent or Ala or Asp or Gly
  MISC_FEATURE (211)..(211): Absent or Asn or Ile or Pro
  MISC_FEATURE (212)..(212): Absent or Gly or Gln or Leu
  MISC_FEATURE (213)..(213): Absent or Val or Gln or Asp
  MISC_FEATURE (214)..(214): Absent or Ser or Arg or Pro
  MISC_FEATURE (215)..(215): Absent or Ser or Glu or Cys
  MISC_FEATURE (216)..(216): Absent or Glu or Thr or Phe
  MISC_FEATURE (217)..(217): Absent or Leu or Asp
  MISC_FEATURE (218)..(218): Absent or Gln or Ala or Val
  MISC_FEATURE (219)..(219): Absent or Asn or Ser or Pro
  MISC_FEATURE (220)..(220): Absent or Gly or Ala or Phe
  MISC_FEATURE (221)..(221): Absent or Glu or Lys or Val
  MISC_FEATURE (222)..(222): Absent or Asn or Gly
  MISC_FEATURE (223)..(223): Absent or Ala or Glu or Ser
  MISC_FEATURE (224)..(224): Absent or Asn or Asp or Gly
  MISC_FEATURE (225)..(225): Absent or Gly or Val or Lys
  MISC_FEATURE (226)..(226): Absent or Asn or Val or Glu
  MISC_FEATURE (227)..(227): Absent or Gly or Cys or Ala or Phe
  MISC_FEATURE (228)..(228): Absent or Ile or Gly
  MISC_FEATURE (229)..(229): Absent or Val or Asp or Thr or Glu
  MISC_FEATURE (230)..(230): Absent or Val or Gly or Thr or Asn
  MISC_FEATURE (231)..(231): Absent or Lys or Val or Cys or Tyr
  MISC_FEATURE (232)..(232): Absent or Glu or Val or Asp
  MISC_FEATURE (233)..(233): Absent or Glu or Leu or Val or Pro
  MISC_FEATURE (234)..(234): Absent or Asp or Glu or Cys or Ser
  MISC_FEATURE (235)..(235): Absent or Lys or Gln or Cys
  MISC_FEATURE (236)..(236): Absent or Lys or Ile or Leu or Val
  MISC_FEATURE (237)..(237): Absent or Glu or Lys or Gly or Val
  MISC_FEATURE (238)..(238): Absent or Asp or Asn or Glu or Val
  MISC_FEATURE (239)..(239): Absent or Asn or Leu or Cys or Glu
  MISC_FEATURE (240)..(240): Absent or Gln or Leu or Gly or Asp
  MISC_FEATURE (241)..(241): Absent or Leu or Thr or Glu
  MISC_FEATURE (242)..(242): Absent or Met or Lys or Ser
  MISC_FEATURE (243)..(243): Absent or Glu or Asp or Ser
  MISC_FEATURE (244)..(244): Absent or Ile or Asn or His
  MISC_FEATURE (245)..(245): Absent or Asp or Ser or Arg or Leu
  MISC_FEATURE (246)..(246): Absent or Ser or Glu or Met or Asn
  MISC_FEATURE (247)..(247): Absent or Val or Gly or Leu or Ser
  MISC_FEATURE (248)..(248): Absent or Glu or Thr or His or Asn
  MISC_FEATURE (249)..(249): Absent or Thr or Val or Cys or Leu
  MISC_FEATURE (250)..(250): Absent or Glu or Arg or Ser or Gly
  MISC_FEATURE (251)..(251): Absent or Val or Lys
  MISC_FEATURE (252)..(252): Absent or Leu or Glu or Asp
  MISC_FEATURE (253)..(253): Absent or Pro or Glu or Ser
  MISC_FEATURE (254)..(254): Absent or Pro or Asp
  MISC_FEATURE (255)..(255): Absent or Glu or Val
  MISC_FEATURE (256)..(256): Absent or Glu or Val or Leu
  MISC_FEATURE (257)..(257): Absent or Lys or Glu
  MISC_FEATURE (258)..(258): Absent or Ala or Pro or Ser
  MISC_FEATURE (259)..(259): Absent or Cys or Met or Ser
  MISC_FEATURE (260)..(260): Absent or Ser or Gly or Lys or Ile
  MISC_FEATURE (261)..(261): Absent or Gln or Val
  MISC_FEATURE (262)..(262): Absent or Ser or Asp or Arg
  MISC_FEATURE (263)..(263): Absent or Pro or Asn or Val or Ser
  MISC_FEATURE (264)..(264): Absent or Leu or Val or His or Lys
  MISC_FEATURE (265)..(265): Absent or Ser or Gly or Gln
  MISC_FEATURE (266)..(266): Absent or Ser or Asn or Lys or Asp
  MISC_FEATURE (267)..(267): Absent or Gly or Cys or Ser
  MISC_FEATURE (268)..(268): Absent or Leu or Ile or Tyr or His
  MISC_FEATURE (269)..(269): Absent or Glu or Ser or Gly
  MISC_FEATURE (270)..(270): Absent or Trp or Ser
  MISC_FEATURE (271)..(271): Absent or Leu or Gly or Ser
  MISC_FEATURE (272)..(272): Absent or Leu or Ser or Asp
  MISC_FEATURE (273)..(273): Absent or Gly or Asp or Phe
  MISC_FEATURE (274)..(274): Absent or Leu or Tyr or Val
  MISC_FEATURE (275)..(275): Absent or Lys or Ser or Gly
  MISC_FEATURE (276)..(276): Absent or Asn or Gly
  MISC_FEATURE (277)..(277): Absent or Lys or Ser or Asn
  MISC_FEATURE (278)..(278): Absent or Val or Leu or Met
  MISC_FEATURE (279)..(279): Absent or Leu or Glu or Asp
  MISC_FEATURE (280)..(280): Absent or Leu or Trp or Pro
  MISC_FEATURE (281)..(281): Absent or Thr or Val
  MISC_FEATURE (282)..(282): Absent or Ser or Leu or Ile
  MISC_FEATURE (283)..(283): Absent or Glu or Gly or Asn
  MISC_FEATURE (284)..(284): Absent or Arg or Asn
  MISC_FEATURE (285)..(285): Absent or Pro or Arg or Gly
  MISC_FEATURE (286)..(286): Absent or Asn or Ala
  MISC_FEATURE (287)..(287): Absent or Lys or Arg or Asn
  MISC_FEATURE (288)..(288): Absent or Lys or Ile or Asp
  MISC_FEATURE (289)..(289): Absent or Arg or Leu or Glu
  MISC_FEATURE (290)..(290): Absent or Lys or Leu or His
  MISC_FEATURE (291)..(291): Absent or Leu or Thr or Gly
  MISC_FEATURE (292)..(292): Absent or Leu or Ser or Glu
  MISC_FEATURE (293)..(293): Absent or Gly or Glu or Gln
  MISC_FEATURE (294)..(294): Absent or Ser or Arg or Asp
  MISC_FEATURE (295)..(295): Absent or Asp or Pro or Met
  MISC_FEATURE (296)..(296): Absent or Ala or Ser or Gln
  MISC_FEATURE (297)..(297): Absent or Gly or Lys or Glu
  MISC_FEATURE (298)..(298): Absent or Leu or Lys or Val
  MISC_FEATURE (299)..(299): Absent or Glu or Arg or Val
  MISC_FEATURE (300)..(300): Absent or Lys or Leu
  MISC_FEATURE (301)..(301): Absent or Leu or Gln
  MISC_FEATURE (302)..(302): Absent or Ile or Leu or Glu
  MISC_FEATURE (303)..(303): Absent or Ile or Gly or Glu
  MISC_FEATURE (304)..(304): Absent or Ala or Ser or Gln
  MISC_FEATURE (305)..(305): Absent or Arg or Asp or Pro
  MISC_FEATURE (306)..(306): Absent or Pro or Ala or Met
  MISC_FEATURE (307)..(307): Absent or Cys or Gly or Glu
  MISC_FEATURE (308)..(308): Absent or Glu or Leu or Ile
  MISC_FEATURE (309)..(309): Absent or Gly or Glu
  MISC_FEATURE (310)..(310): Absent or Asn or Lys or Gln
  MISC_FEATURE (311)..(311): Absent or Ser or Leu or Asp
  MISC_FEATURE (312)..(312): Absent or Ser or Met or His
  MISC_FEATURE (313)..(313): Absent or Leu or Val or Gly
  MISC_FEATURE (314)..(314): Absent or Cys or Ala or Arg
  MISC_FEATURE (315)..(315): Absent or His or Ala or Ser
  MISC_FEATURE (316)..(316): Absent or Phe or Pro or Asp
  MISC_FEATURE (317)..(317): Absent or Cys or Ala
  MISC_FEATURE (318)..(318): Absent or Cys or Glu or Ile
  MISC_FEATURE (319)..(319): Absent or Thr or Gly or Ala
  MISC_FEATURE (320)..(320): Absent or Gly or Asn or Leu
  MISC_FEATURE (321)..(321): Absent or Asp or Ala or Pro
  MISC_FEATURE (322)..(322): Absent or Met or Leu or Pro
  MISC_FEATURE (323)..(323): Absent or Gly or Leu or Asp
  MISC_FEATURE (324)..(324): Absent or Glu or Cys or Thr
  MISC_FEATURE (325)..(325): Absent or Gln or Asp or Glu
  MISC_FEATURE (326)..(326): Absent or Ser or Phe or Glu
  MISC_FEATURE (327)..(327): Absent or Asn or Cys or Ser
  MISC_FEATURE (328)..(328): Absent or Arg or Cys or Asp
  MISC_FEATURE (329)..(329): Absent or Leu or Thr or Val
  MISC_FEATURE (330)..(330): Absent or Ile or Gly or Ser
  MISC_FEATURE (331)..(331): Absent or Val or His or Leu
  MISC_FEATURE (332)..(332): Absent or Cys or His or Val or Asn
  MISC_FEATURE (333)..(333): Absent or Arg or Gln or His or Trp
  MISC_FEATURE (334)..(334): Absent or Cys or Leu or Val
  MISC_FEATURE (335)..(335): Absent or Cys or Ile or Val or Leu
  MISC_FEATURE (336)..(336): Absent or Asn or Val or Pro or Gly
  MISC_FEATURE (337)..(337): Absent or Val or Cys or Asp or Ala
  MISC_FEATURE (338)..(338): Absent or Ala or Thr or Gln or Arg
  MISC_FEATURE (339)..(339): Absent or Val or Ser or Asp
  MISC_FEATURE (340)..(340): Absent or His or Cys or Trp or Arg
  MISC_FEATURE (341)..(341): Absent or Gln or Lys or Leu or Phe
  MISC_FEATURE (342)..(342): Absent or Lys or Ala or Cys or Val
  MISC_FEATURE (343)..(343): Absent or Cys or Thr or Ala or Leu
  MISC_FEATURE (344)..(344): Absent or Tyr or Val or Trp or Thr
  MISC_FEATURE (345)..(345): Absent or Gly or His or Cys or Ser
  MISC_FEATURE (346)..(346): Absent or Val or Lys or Glu
  MISC_FEATURE (347)..(347): Absent or Gln or Lys or Ser or Arg
  MISC_FEATURE (348)..(348): Absent or Glu or Cys or Ile or Pro
  MISC_FEATURE (349)..(349): Absent or Asp or Tyr or Arg or Asn
  MISC_FEATURE (350)..(350): Absent or Ile or Gly or Ser or Lys
  MISC_FEATURE (351)..(351): Absent or Asp or Leu or Ala or Lys
  MISC_FEATURE (352)..(352): Absent or Glu or Leu or Arg
  MISC_FEATURE (353)..(353): Absent or Glu or Arg or Lys
  MISC_FEATURE (354)..(354): Absent or Ser or Asp or Gln or Leu
  MISC_FEATURE (355)..(355): Absent or Trp or Ser or Thr or Leu
  MISC_FEATURE (356)..(356): Absent or Leu or Gly or Arg
  MISC_FEATURE (357)..(357): Absent or Cys or Lys or Ser or Ala
  MISC_FEATURE (358)..(358): Absent or Thr or Pro or Asp
  MISC_FEATURE (359)..(359): Absent or Trp or Ala
  MISC_FEATURE (360)..(360): Absent or Cys or Leu or Gly
  MISC_FEATURE (361)..(361): Absent or Trp or Cys or Arg or Leu
  MISC_FEATURE (362)..(362): Absent or His or Ser or Thr or Glu
  MISC_FEATURE (363)..(363): Absent or Lys or Trp or Val or Arg
  MISC_FEATURE (364)..(364): Absent or Asn or Cys or Leu
  MISC_FEATURE (365)..(365): Absent or Asp or Glu or Met or Val
  MISC_FEATURE (366)..(366): Absent or Lys or Leu or Pro or Gln
  MISC_FEATURE (367)..(367): Absent or Asn or Glu or Cys or Leu
  MISC_FEATURE (368)..(368): Absent or Asp or Asn or Val or Pro
  MISC_FEATURE (369)..(369): Absent or Ala or Gly or Leu or Pro
  MISC_FEATURE (370)..(370): Absent or Ser or Arg or Cys or Leu
  MISC_FEATURE (371)..(371): Absent or Asn or Ala or Pro or Glu
  MISC_FEATURE (372)..(372): Absent or Gly or Asp
  MISC_FEATURE (373)..(373): Absent or Glu or Ser
  MISC_FEATURE (374)..(374): Absent or Ser or Glu or Ala
  MISC_FEATURE (375)..(375): Absent or Val or Arg or Gly
  MISC_FEATURE (376)..(376): Absent or Lys or Pro or Thr
  MISC_FEATURE (377)..(377): Absent or Pro or Cys or Thr
  MISC_FEATURE (378)..(378): Absent or Cys or Leu
  MISC_FEATURE (379)..(379): Absent or Val or Leu or Lys or Asp
  MISC_FEATURE (380)..(380): Absent or Leu or Cys or Glu
  MISC_FEATURE (381)..(381): Absent or Cys or Pro or Lys
  MISC_FEATURE (382)..(382): Absent or Pro or Lys or Gly
  MISC_FEATURE (383)..(383): Absent or Lys or Ala
  MISC_FEATURE (384)..(384): Absent or Gln or Gly or Leu
  MISC_FEATURE (385)..(385): Absent or Gly or Lys
  MISC_FEATURE (386)..(386): Absent or Gly or Ile or Pro
  MISC_FEATURE (387)..(387): Absent or Ala or Leu or Val
  MISC_FEATURE (388)..(388): Absent or Leu or Lys
  MISC_FEATURE (389)..(389): Absent or Lys or Pro or Arg
  MISC_FEATURE (390)..(390): Absent or Pro or Val or Asp
  MISC_FEATURE (391)..(391): Absent or Leu or Ser
  MISC_FEATURE (392)..(392): Absent or His or Ser or Gly
  MISC_FEATURE (393)..(393): Absent or Lys or Gln
  MISC_FEATURE (394)..(394): Absent or Ser or Thr or Ile
  MISC_FEATURE (395)..(395): Absent or Glu or Ala
  MISC_FEATURE (396)..(396): Absent or Asp or Asn
  MISC_FEATURE (397)..(397): Absent or Glu or Gly
  MISC_FEATURE (398)..(398): Absent or Glu or Gly
  MISC_FEATURE (399)..(399): Absent or Ser or Pro or Asn
  MISC_FEATURE (400)..(400): Absent or Met or Ala or Leu
  MISC_FEATURE (401)..(401): Absent or Glu or Lys
  MISC_FEATURE (402)..(402): Absent or Phe
  MISC_FEATURE (403)..(403): Absent or Ser or Ala or Val
  MISC_FEATURE (404)..(404): Absent or His
  MISC_FEATURE (405)..(405): Absent or Leu
  MISC_FEATURE (406)..(406): Absent or Phe
  MISC_FEATURE (407)..(407): Absent or Cys
  MISC_FEATURE (408)..(408): Absent or Ser
  MISC_FEATURE (409)..(409): Absent or Gln or Leu
  MISC_FEATURE (410)..(410): Absent or Trp
  MISC_FEATURE (411)..(411): Absent or Met or Thr
  MISC_FEATURE (412)..(412): Absent or Pro
  MISC_FEATURE (413)..(413): Absent or Glu
  MISC_FEATURE (414)..(414): Absent or Val
  MISC_FEATURE (415)..(415): Absent or Tyr or Val
  MISC_FEATURE (416)..(416): Absent or Val or Ile
  MISC_FEATURE (417)..(417): Absent or Glu
  MISC_FEATURE (418)..(418): Absent or Asp
  MISC_FEATURE (419)..(419): Absent or Thr or Leu
  MISC_FEATURE (420)..(420): Absent or Arg or Lys or Asn
  MISC_FEATURE (421)..(421): Absent or Lys or Ser
  MISC_FEATURE (422)..(422): Absent or Met
  MISC_FEATURE (423)..(423): Absent or Glu
  MISC_FEATURE (424)..(424): Absent or Pro
  MISC_FEATURE (425)..(425): Absent or Ile or Val
  MISC_FEATURE (426)..(426): Absent or Met or Leu or Thr
  MISC_FEATURE (427)..(427): Absent or Asn
  MISC_FEATURE (428)..(428): Absent or Ile or Phe or Val
  MISC_FEATURE (429)..(429): Absent or Asp or Pro or Gly
  MISC_FEATURE (430)..(430): Absent or Gly or Asp
  MISC_FEATURE (431)..(431): Absent or Ile
  MISC_FEATURE (432)..(432): Absent or Lys or Gln
  MISC_FEATURE (433)..(433): Absent or Glu
  MISC_FEATURE (434)..(434): Absent or Thr or Asn
  MISC_FEATURE (435)..(435): Absent or Arg
  MISC_FEATURE (436)..(436): Absent or Lys or Arg or Thr
  MISC_FEATURE (437)..(437): Absent or Lys
  MISC_FEATURE (438)..(438): Absent or Leu
  MISC_FEATURE (439)..(439): Absent or Val or Leu
  MISC_FEATURE (440)..(440): Absent or Cys
  MISC_FEATURE (441)..(441): Absent or Asn or Ser
  MISC_FEATURE (442)..(442): Absent or Val or Leu
  MISC_FEATURE (443)..(443): Absent or Cys
  MISC_FEATURE (444)..(444): Absent or Lys
  MISC_FEATURE (445)..(445): Absent or Val
  MISC_FEATURE (446)..(446): Absent or Lys or Met
  MISC_FEATURE (447)..(447): Absent or Tyr or Ser or His
  MISC_FEATURE (448)..(448): Absent or Gly
  MISC_FEATURE (449)..(449): Absent or Ala
  MISC_FEATURE (450)..(450): Absent or Cys
  MISC_FEATURE (451)..(451): Absent or Val or Ile
  MISC_FEATURE (452)..(452): Absent or Arg
  MISC_FEATURE (453)..(453): Absent or Cys
  MISC_FEATURE (454)..(454): Absent or Ser or Cys
  MISC_FEATURE (455)..(455): Absent or Asn or His
  MISC_FEATURE (456)..(456): Absent or Gly
  MISC_FEATURE (457)..(457): Absent or Ala or Thr
  MISC_FEATURE (458)..(458): Absent or Cys
  MISC_FEATURE (459)..(459): Absent or Arg
  MISC_FEATURE (460)..(460): Absent or Thr or Ala
  MISC_FEATURE (461)..(461): Absent or Ser or Cys
  MISC_FEATURE (462)..(462): Absent or Phe
  MISC_FEATURE (463)..(463): Absent or His
  MISC_FEATURE (464)..(464): Absent or Pro
  MISC_FEATURE (465)..(465): Absent or Ile
  MISC_FEATURE (466)..(466): Absent or Cys
  MISC_FEATURE (467)..(467): Absent or Ala
  MISC_FEATURE (468)..(468): Absent or Arg
  MISC_FEATURE (469)..(469): Absent or Glu
  MISC_FEATURE (470)..(470): Absent or Ala or Ser
  MISC_FEATURE (471)..(471): Absent or Arg or Gly or Lys
  MISC_FEATURE (472)..(472): Absent or His or Asn
  MISC_FEATURE (473)..(473): Absent or Arg or Gln
  MISC_FEATURE (474)..(474): Absent or Met or Leu
  MISC_FEATURE (475)..(475): Absent or Glu
  MISC_FEATURE (476)..(476): Absent or Ile or Val
  MISC_FEATURE (477)..(477): Absent or Trp
  MISC_FEATURE (478)..(478): Absent or Gly
  MISC_FEATURE (479)..(479): Absent or Lys
  MISC_FEATURE (480)..(480): Absent or Phe or His or Thr
  MISC_FEATURE (481)..(481): Absent or Gly
  MISC_FEATURE (482)..(482): Absent or Cys or Asn
  MISC_FEATURE (483)..(483): Absent or Asp or Thr
  MISC_FEATURE (484)..(484): Absent or Asn or Thr
  MISC_FEATURE (485)..(485): Absent or Leu or Val
  MISC_FEATURE (486)..(486): Absent or Glu
  MISC_FEATURE (487)..(487): Absent or Leu or Met
  MISC_FEATURE (488)..(488): Absent or Arg
  MISC_FEATURE (489)..(489): Absent or Ala
  MISC_FEATURE (490)..(490): Absent or Phe
  MISC_FEATURE (491)..(491): Absent or Cys
  MISC_FEATURE (492)..(492): Absent or Leu or Ser
  MISC_FEATURE (493)..(493): Absent or Lys
  MISC_FEATURE (494)..(494): Absent or His
  MISC_FEATURE (495)..(495): Absent or Ser
  MISC_FEATURE (496)..(496): Absent or Glu or Asp or Thr
  MISC_FEATURE (497)..(497): Absent or Val or Ile
  MISC_FEATURE (498)..(498): Met or Gln or Absent
  MISC_FEATURE (499)..(499): Asp or Absent or Glu
  MISC_FEATURE (500)..(500): Val or Absent or Ser or Thr
  MISC_FEATURE (501)..(501): Ser or Absent or Gly or Ile
  MISC_FEATURE (502)..(502): Lys or Ser or Absent
  MISC_FEATURE (503)..(503): Thr or Absent or Ser or Ile
  MISC_FEATURE (504)..(504): Arg or Gln or Absent or Val
  MISC_FEATURE (505)..(505): Gln or Absent or Glu or Asn
  MISC_FEATURE (506)..(506): Leu or Absent or Gly or Asp
  MISC_FEATURE (507)..(507): Gly or Absent or Arg
  MISC_FEATURE (508)..(508): Asp or Absent or Glu or Ile
  MISC_FEATURE (509)..(509): Phe or Absent or Ser or Cys
  MISC_FEATURE (510)..(510): Ser or Absent or Asn or Ala
  MISC_FEATURE (511)..(511): Ala or Absent or Glu
  MISC_FEATURE (512)..(512): Ala or Absent or Glu
  MISC_FEATURE (513)..(513): Val or Asp or Absent or Glu
  MISC_FEATURE (514)..(514): Gly or Absent or Ser or Thr
  MISC_FEATURE (515)..(515): Ser or Absent or Arg
  MISC_FEATURE (516)..(516): Asn or Absent or Ser or Met or Gln
  MISC_FEATURE (517)..(517): Ile or Thr or Absent or Pro or Asp
  MISC_FEATURE (518)..(518): Ser or Absent or Ile or Asp or Glu
  MISC_FEATURE (519)..(519): Ser or Absent or Cys or Ile or Leu
  MISC_FEATURE (520)..(520): His or Absent or Arg or Asp
  MISC_FEATURE (521)..(521): Pro or Absent or Leu or Asp
  MISC_FEATURE (522)..(522): Leu or Pro or Absent or Gly or Ala
  MISC_FEATURE (523)..(523): Val or Absent or Ser or Arg
  MISC_FEATURE (524)..(524): Ala or Thr or Absent or Glu or Leu
  MISC_FEATURE (525)..(525): Ser or Absent or Val or Ala
  MISC_FEATURE (526)..(526): Ile or Val or Absent or Cys or Thr
  MISC_FEATURE (527)..(527): Asn or Absent or Gly or Leu or Gln
  MISC_FEATURE (528)..(528): Lys or Absent or Glu or Arg
  MISC_FEATURE (529)..(529): Pro or Absent or Gly or Ser or Ile
  MISC_FEATURE (530)..(530): His or Gln or Absent or Val
  MISC_FEATURE (531)..(531): Lys or Absent or Leu or Asp or Gln
  MISC_FEATURE (532)..(532): Leu or Absent or Ser or Gln
  MISC_FEATURE (533)..(533): Lys or Absent or Asn or Ala or Arg
  MISC_FEATURE (534)..(534): Ile or Absent or Asp or Asn or Leu
  MISC_FEATURE (535)..(535): Arg or Gly or Absent or Glu or Thr
  MISC_FEATURE (536)..(536): Leu or Absent or Met or Val or Arg
  MISC_FEATURE (537)..(537): Arg or Absent or Gly or Asn
  MISC_FEATURE (538)..(538): Asn or Absent or Val or Gly
  MISC_FEATURE (539)..(539): Gly or Absent or Asp or Lys
  MISC_FEATURE (540)..(540): Asp or Absent or Val
  MISC_FEATURE (541)..(541): Lys or Absent or Gly or Asp
  MISC_FEATURE (542)..(542): Ile or Absent or Thr or Glu or Phe
  MISC_FEATURE (543)..(543): Val or Ala or Absent or Pro or Thr
  MISC_FEATURE (544)..(544): Val or Absent or Gly or Thr or Ser
  MISC_FEATURE (545)..(545): His or Absent or Thr or Tyr or Ser
  MISC_FEATURE (546)..(546): Leu or Met or Absent or Gly
  MISC_FEATURE (547)..(547): Glu or Absent or Ser or Asp or Ile
  MISC_FEATURE (548)..(548): Thr or Absent or Asp or Val or Ala
  MISC_FEATURE (549)..(549): Pro or Absent or Ile or Gln or Ser
  MISC_FEATURE (550)..(550): Tyr or Asp or Absent or Ser or Thr
  MISC_FEATURE (551)..(551): Asn or Absent or Arg or Lys or Cys
  MISC_FEATURE (552)..(552): Asn or Absent or Arg or Ser
  MISC_FEATURE (553)..(553): Phe or Ser or Absent or Arg
  MISC_FEATURE (554)..(554): Asn or Absent or Asp or Gly or Ser
  MISC_FEATURE (555)..(555): Lys or Absent or Leu or His
  MISC_FEATURE (556)..(556): Leu or Absent or Gln or Ala or Lys
  MISC_FEATURE (557)..(557): Ser or Absent or Glu or Arg or Gln
  MISC_FEATURE (558)..(558): Asp or Absent or Leu or Thr
  MISC_FEATURE (559)..(559): Asp or Gly or Absent or Glu or Ser or Thr
  MISC_FEATURE (560)..(560): Glu or Absent or Ser
  MISC_FEATURE (561)..(561): Phe or Absent or Pro or Tyr or Leu
  MISC_FEATURE (562)..(562): Gln or Absent or His or Ala
  MISC_FEATURE (563)..(563): Gly or Glu or Absent or Ser or Val or Thr
  MISC_FEATURE (564)..(564): Thr or Absent or Lys or Gly or Ser
  MISC_FEATURE (565)..(565): Arg or Gly or Absent or Phe or His or Pro
  MISC_FEATURE (566)..(566): Absent or Asn
  MISC_FEATURE (567)..(567): Absent or Leu
  MISC_FEATURE (568)..(568): Absent or Ser
  MISC_FEATURE (569)..(569): Absent or Ala
  MISC_FEATURE (570)..(570): Absent or Thr
  MISC_FEATURE (571)..(571): Absent or Asp
  MISC_FEATURE (572)..(572): Absent or Asn
  MISC_FEATURE (573)..(573): Absent or Val
  MISC_FEATURE (574)..(574): Absent or Glu
  MISC_FEATURE (575)..(575): Absent or Ser
  MISC_FEATURE (576)..(576): Absent or Gly
  MISC_FEATURE (577)..(577): Absent or Met
  MISC_FEATURE (578)..(578): Absent or Thr
  MISC_FEATURE (579)..(579): Absent or Gly
  MISC_FEATURE (580)..(580): Absent or Arg
  MISC_FEATURE (581)..(581): Absent or Ser
  MISC_FEATURE (582)..(582): Absent or Asn
  MISC_FEATURE (583)..(583): Absent or Glu
  MISC_FEATURE (584)..(584): Absent or Asp
  MISC_FEATURE (585)..(585): Absent or Glu
  MISC_FEATURE (586)..(586): Absent or Arg
  MISC_FEATURE (587)..(587): Absent or Thr
  MISC_FEATURE (588)..(588): Absent or Leu
  MISC_FEATURE (589)..(589): Absent or Ser
  MISC_FEATURE (590)..(590): Absent or Lys
  MISC_FEATURE (591)..(591): Absent or Ser
  MISC_FEATURE (592)..(592): Absent or Leu
  MISC_FEATURE (593)..(593): Absent or Ser
  MISC_FEATURE (594)..(594): Absent or Phe
  MISC_FEATURE (595)..(595): Absent or Gly
  MISC_FEATURE (596)..(596): Absent or Leu
  MISC_FEATURE (597)..(597): Absent or Ile
  MISC_FEATURE (598)..(598): Absent or Leu
  MISC_FEATURE (599)..(599): Absent or Lys
  MISC_FEATURE (600)..(600): Absent or Lys
  MISC_FEATURE (601)..(601): Absent or Leu
  MISC_FEATURE (602)..(602): Absent or Ile
  MISC_FEATURE (603)..(603): Absent or Asp
  MISC_FEATURE (604)..(604): Absent or Leu
  MISC_FEATURE (605)..(605): Absent or Gly
  MISC_FEATURE (606)..(606): Absent or Lys
  MISC_FEATURE (607)..(607): Absent or Val
  MISC_FEATURE (608)..(608): Absent or Asp
  MISC_FEATURE (609)..(609): Absent or Val
  MISC_FEATURE (610)..(610): Absent or Lys
  MISC_FEATURE (611)..(611): Absent or Asp
  MISC_FEATURE (612)..(612): Absent or Val
  MISC_FEATURE (613)..(613): Absent or Ala
  MISC_FEATURE (614)..(614): Absent or Ala
  MISC_FEATURE (615)..(615): Absent or Glu
  MISC_FEATURE (616)..(616): Absent or Ile
  MISC_FEATURE (617)..(617): Absent or Gly
  MISC_FEATURE (618)..(618): Absent or Ile
  MISC_FEATURE (619)..(619): Absent or Asn
  MISC_FEATURE (620)..(620): Absent or Pro
  MISC_FEATURE (621)..(621): Absent or Asp
  MISC_FEATURE (622)..(622): Absent or Ala
  MISC_FEATURE (623)..(623): Absent or Leu
  MISC_FEATURE (624)..(624): Absent or Arg
  MISC_FEATURE (625)..(625): Absent or Ala
  MISC_FEATURE (626)..(626): Absent or Lys
  MISC_FEATURE (627)..(627): Absent or Leu
  MISC_FEATURE (628)..(628): Absent or Thr
  MISC_FEATURE (629)..(629): Absent or Val
  MISC_FEATURE (630)..(630): Absent or Thr
  MISC_FEATURE (631)..(631): Absent or His
  MISC_FEATURE (632)..(632): Absent or Lys
  MISC_FEATURE (633)..(633): Absent or Thr
  MISC_FEATURE (634)..(634): Absent or Ser
  MISC_FEATURE (635)..(635): Absent or His
  MISC_FEATURE (636)..(636): Absent or Leu
  MISC_FEATURE (637)..(637): Absent or Pro
  MISC_FEATURE (638)..(638): Absent or Ala
  MISC_FEATURE (639)..(639): Absent or Ser
  MISC_FEATURE (640)..(640): Absent or Asn
  MISC_FEATURE (641)..(641): Absent or Leu
  MISC_FEATURE (642)..(642): Absent or Tyr
  MISC_FEATURE (643)..(643): Absent or Ala
  MISC_FEATURE (644)..(644): Absent or Leu
  MISC_FEATURE (645)..(645): Absent or Ile
  MISC_FEATURE (646)..(646): Absent or Asp
  MISC_FEATURE (647)..(647): Absent or Gly
  MISC_FEATURE (648)..(648): Absent or Asp
  MISC_FEATURE (649)..(649): Absent or Leu
  MISC_FEATURE (650)..(650): Absent or Leu
  MISC_FEATURE (651)..(651): Absent or Pro
  MISC_FEATURE (652)..(652): Absent or Asp
  MISC_FEATURE (653)..(653): Absent or Leu
  MISC_FEATURE (654)..(654): Absent or Leu
  MISC_FEATURE (655)..(655): Absent or Gly
  MISC_FEATURE (656)..(656): Absent or Lys
  MISC_FEATURE (657)..(657): Absent or Val
  MISC_FEATURE (658)..(658): Absent or Val
  MISC_FEATURE (659)..(659): Absent or Lys
  MISC_FEATURE (660)..(660): Absent or Trp
  MISC_FEATURE (661)..(661): Absent or Leu
  MISC_FEATURE (662)..(662): Absent or Ser
  MISC_FEATURE (663)..(663): Absent or Gln
  MISC_FEATURE (664)..(664): Absent or His
  MISC_FEATURE (665)..(665): Absent or Ala
  MISC_FEATURE (666)..(666): Absent or His
  MISC_FEATURE (667)..(667): Absent or Met
  MISC_FEATURE (668)..(668): Absent or Gly
  MISC_FEATURE (669)..(669): Absent or Ser
  MISC_FEATURE (670)..(670): Absent or Ser
  MISC_FEATURE (671)..(671): Absent or Asp
  MISC_FEATURE (672)..(672): Absent or Lys
  MISC_FEATURE (673)..(673): Absent or Gly
  MISC_FEATURE (674)..(674): Absent or Lys
  MISC_FEATURE (675)..(675): Absent or Asn
  MISC_FEATURE (676)..(676): Absent or Leu
  MISC_FEATURE (677)..(677): Absent or Lys
  MISC_FEATURE (678)..(678): Absent or Arg
  MISC_FEATURE (679)..(679): Absent or Lys
  MISC_FEATURE (680)..(680): Absent or Thr
  MISC_FEATURE (681)..(681): Absent or Thr
  MISC_FEATURE (682)..(682): Absent or Thr
  MISC_FEATURE (683)..(683): Absent or Lys
  MISC_FEATURE (684)..(684): Absent or Ser
  MISC_FEATURE (685)..(685): Absent or Glu
  MISC_FEATURE (686)..(686): Absent or Arg
  MISC_FEATURE (687)..(687): Absent or Arg
  MISC_FEATURE (688)..(688): Absent or Ala
  MISC_FEATURE (689)..(689): Absent or Ala
  MISC_FEATURE (690)..(690): Absent or Ile
  MISC_FEATURE (691)..(691): Absent or Cys
  MISC_FEATURE (692)..(692): Absent or Thr
  MISC_FEATURE (693)..(693): Absent or Glu
  MISC_FEATURE (694)..(694): Absent or Gly
  MISC_FEATURE (695)..(695): Absent or Ile
  MISC_FEATURE (696)..(696): Absent or Val
  MISC_FEATURE (697)..(697): Absent or Met
  MISC_FEATURE (698)..(698): Absent or Leu
  MISC_FEATURE (699)..(699): Absent or Asp
  MISC_FEATURE (700)..(700): Absent or Ser
  MISC_FEATURE (701)..(701): Absent or Asp
  MISC_FEATURE (702)..(702): Absent or Ile
  MISC_FEATURE (703)..(703): Absent or Leu
  MISC_FEATURE (704)..(704): Absent or Asp
  MISC_FEATURE (705)..(705): Absent or Pro
  MISC_FEATURE (706)..(706): Absent or Ala
  MISC_FEATURE (707)..(707): Absent or Val
  MISC_FEATURE (708)..(708): Absent or Ala
  MISC_FEATURE (709)..(709): Absent or Lys or Thr or Ser
  MISC_FEATURE (710)..(710): Absent or Ala or Ser or Thr
  MISC_FEATURE (711)..(711): Absent or Phe or Cys or Gly or Ala
  MISC_FEATURE (712)..(712): Leu or Absent or Ser or Thr or Ile or Arg
  MISC_FEATURE (713)..(713): Val or Pro or Absent or Ile or Arg or Ser
  MISC_FEATURE (714)..(714): Asn or Absent or Glu or His or Val
  MISC_FEATURE (715)..(715): Thr or Absent or Arg or Glu
  MISC_FEATURE (716)..(716): Arg or Absent or Thr or Asp or Ser
  MISC_FEATURE (717)..(717): Ser or Absent or His or Glu or Gln
  MISC_FEATURE (718)..(718): Lys or Absent or Glu
  MISC_FEATURE (719)..(719): Val or Ala or Absent or Ile or Thr
  MISC_FEATURE (720)..(720): Glu or Absent or Asn or Gly or Gln
  MISC_FEATURE (721)..(721): Phe or Leu or Absent or Ile or Val
  MISC_FEATURE (722)..(722): Met or Absent or Cys or Val or Thr
  MISC_FEATURE (723)..(723): Ser or Absent or Asn or Glu or Asp
  MISC_FEATURE (724)..(724): Gly or Absent or Asn or Ala or Met
  MISC_FEATURE (725)..(725): Cys or Absent or Thr or Val or Ala
  MISC_FEATURE (726)..(726): Thr or Ala or Absent or Val
  MISC_FEATURE (727)..(727): Asn or Asp or Absent
  MISC_FEATURE (728)..(728): Absent or Ala or Asn or Asp or Arg
  MISC_FEATURE (729)..(729): Absent or Gln
  MISC_FEATURE (730)..(730): Absent or Gln
  MISC_FEATURE (731)..(731): Absent or Leu
  MISC_FEATURE (732)..(732): Absent or Ile
  MISC_FEATURE (733)..(733): Absent or Gly
  MISC_FEATURE (734)..(734): Absent or Met
  MISC_FEATURE (735)..(735): Absent or Arg
  MISC_FEATURE (736)..(736): Absent or Met
  MISC_FEATURE (737)..(737): Absent or Leu
  MISC_FEATURE (738)..(738): Absent or Glu
  MISC_FEATURE (739)..(739): Absent or Thr
  MISC_FEATURE (740)..(740): Absent or Ile
  MISC_FEATURE (741)..(741): Absent or Asn
  MISC_FEATURE (742)..(742): Absent or Thr
  MISC_FEATURE (743)..(743): Absent or Phe
  MISC_FEATURE (744)..(744): Absent or Leu
  MISC_FEATURE (745)..(745): Absent or Ser
  MISC_FEATURE (746)..(746): Absent or Phe or Thr or Val or Pro
  MISC_FEATURE (747)..(747): Absent or Ile or Arg
  MISC_FEATURE (748)..(748): Absent or Phe or Cys or Val or Gly
  MISC_FEATURE (749)..(749): Absent or Leu or Thr or Asp
  MISC_FEATURE (750)..(750): Absent or Val or Leu or Arg
  MISC_FEATURE (751)..(751): Absent or Leu or Thr or Arg or Cys
  MISC_FEATURE (752)..(752): Absent or Gln or Glu or Met or Leu
  MISC_FEATURE (753)..(753): Absent or Leu or Asn or Asp or Val
  MISC_FEATURE (754)..(754): Absent or Ile or Cys or Gly or Ser
  MISC_FEATURE (755)..(755): Absent or Glu or Thr or Tyr or Asn
  MISC_FEATURE (756)..(756): Absent or Arg or Gly or Cys or Ser
  MISC_FEATURE (757)..(757): Absent or Gly or Asn or Cys
  MISC_FEATURE (758)..(758): Absent or Lys or Gly or Tyr or Asp
  MISC_FEATURE (759)..(759): Absent or Val or Ile
  MISC_FEATURE (760)..(760): Absent or Ser or Val or His
  MISC_FEATURE (761)..(761): Absent or Val or Pro or Thr
  MISC_FEATURE (762)..(762): Absent or Lys or Val or Ile or Ala
  MISC_FEATURE (763)..(763): Absent or Asp or Glu or Ile or Leu
  MISC_FEATURE (764)..(764): Absent or Val or Ala or Glu or Arg
  MISC_FEATURE (765)..(765): Absent or Ala or Lys
  MISC_FEATURE (766)..(766): Absent or Leu or Ala or Arg
  MISC_FEATURE (767)..(767): Absent or Asp or Asn or Leu or Ile
  MISC_FEATURE (768)..(768): Absent or Ile or Gly or Gln or Asp
  MISC_FEATURE (769)..(769): Absent or Gly or Ser or Gln
  MISC_FEATURE (770)..(770): Absent or Val or Gly
  MISC_FEATURE (771)..(771): Absent or Ser or Leu or Met
  MISC_FEATURE (772)..(772): Absent or Pro or Lys or Val
  MISC_FEATURE (773)..(773): Absent or Asp or Lys or Asn
  MISC_FEATURE (774)..(774): Absent or Ser or Glu or Val
  MISC_FEATURE (775)..(775): Absent or Leu or Gly
  MISC_FEATURE (776)..(776): Absent or Ala or Ser or Asp
  MISC_FEATURE (777)..(777): Absent or Ala or Val or Ile
  MISC_FEATURE (778)..(778): Absent or Thr or Ser or Glu
  MISC_FEATURE (779)..(779): Absent or Leu or Ser
  MISC_FEATURE (780)..(780): Absent or Ala or Glu
  MISC_FEATURE (781)..(781): Absent or His or Pro or Leu
  MISC_FEATURE (782)..(782): Absent or Leu or Asp or Gly
  MISC_FEATURE (783)..(783): Absent or Lys or His or Val
  MISC_FEATURE (784)..(784): Absent or Val or Ser
  MISC_FEATURE (785)..(785): Absent or Val or Pro or Ser
  MISC_FEATURE (786)..(786): Absent or Leu or Glu
  MISC_FEATURE (787)..(787): Absent or Pro or Glu or Ser
  MISC_FEATURE (788)..(788): Absent or Ser or Lys or Leu
  MISC_FEATURE (789)..(789): Absent or Arg or Asn or Glu
  MISC_FEATURE (790)..(790): Absent or Leu or Ser or Ala
  MISC_FEATURE (791)..(791): Absent or Leu or Ile or Ala
  MISC_FEATURE (792)..(792): Absent or Phe or Val or Leu
  MISC_FEATURE (793)..(793): Absent or Phe or Leu or Val
  MISC_FEATURE (794)..(794): Absent or Cys or Asp or Pro
  MISC_FEATURE (795)..(795): Absent or His or Gln or Glu
  MISC_FEATURE (796)..(796): Absent or Asp or Lys or Thr
  MISC_FEATURE (797)..(797): Absent or Asp or Val or Ser
  MISC_FEATURE (798)..(798): Absent or His or Thr
  MISC_FEATURE (799)..(799): Absent or Leu or His or Phe
  MISC_FEATURE (800)..(800): Absent or Val or Gly or Ser
  MISC_FEATURE (801)..(801): Absent or Pro or Lys
  MISC_FEATURE (802)..(802): Absent or Asp or Ser or Gly
  MISC_FEATURE (803)..(803): Absent or Leu or Ser
  MISC_FEATURE (804)..(804): Absent or Gln or Val or Lys
  MISC_FEATURE (805)..(805): Absent or Cys or Ile or Leu
  MISC_FEATURE (806)..(806): Absent or Lys or Pro
  MISC_FEATURE (807)..(807): Absent or Ile or Ser
  MISC_FEATURE (808)..(808): Absent or Leu or Val or Ser or Ile
  MISC_FEATURE (809)..(809): Absent or Lys or Asp
  MISC_FEATURE (810)..(810): Absent or Trp or Asp or Leu
  MISC_FEATURE (811)..(811): Leu or Absent or His
  MISC_FEATURE (812)..(812): Cys or Lys or Absent or Gly or Gln
  MISC_FEATURE (813)..(813): Asp or Absent or Glu or Asn
  MISC_FEATURE (814)..(814): Asn or His or Absent or Gln or Thr
  MISC_FEATURE (815)..(815): Ala or Absent or Ser or Ile
  MISC_FEATURE (816)..(816): Tyr or Absent or Asn or Arg
  MISC_FEATURE (817)..(817): Met or Absent or Ser or Val
  MISC_FEATURE (818)..(818): Gly or Absent or Ser or Pro
  MISC_FEATURE (819)..(819): Thr or Absent or Ser
  MISC_FEATURE (820)..(820): Leu or Absent or Ser or Val
  MISC_FEATURE (821)..(821): Gln or Met or Gly or Absent
  MISC_FEATURE (822)..(822): Lys or Thr or Val or Absent or Glu
  MISC_FEATURE (823)..(823): Asn or Tyr or Met or Absent or Lys
  MISC_FEATURE (824)..(824): Leu or Ile or Met or Absent or Cys
  MISC_FEATURE (825)..(825): Lys or Gly or Glu or Absent or Ser
  MISC_FEATURE (826)..(826): Val or Trp or Asn or Absent or Lys
  MISC_FEATURE (827)..(827): Lys or Tyr or Ala or Absent or Glu
  MISC_FEATURE (828)..(828): Ile or Ser or Phe or Absent or Gly
  MISC_FEATURE (829)..(829): Glu or Lys or Pro or Ser or Absent
  MISC_FEATURE (830)..(830): Tyr or Ser or Leu or Absent
  MISC_FEATURE (831)..(831): Ala or Lys or Arg or Absent
  MISC_FEATURE (832)..(832): Ile or Pro or Absent or Leu
  MISC_FEATURE (833)..(833): Ser or Asn or Absent or Gln
  MISC_FEATURE (834)..(834): Ser or Phe or Absent or Gly
  MISC_FEATURE (835)..(835): Asn or Lys or Thr or Ser or Absent
  MISC_FEATURE (836)..(836): Asp or Absent or Gln or Val
  MISC_FEATURE (837)..(837): Glu or Absent or Asn or Phe
  MISC_FEATURE (838)..(838): Ile or Absent or Arg or Thr
  MISC_FEATURE (839)..(839): Glu or Gly or Absent
  MISC_FEATURE (840)..(840): Glu or Tyr or Asn or Absent
  MISC_FEATURE (841)..(841): Val or Leu or Absent or Ser
  MISC_FEATURE (842)..(842): Asp or Lys or Asn or Absent
  MISC_FEATURE (843)..(843): Gly or Cys or Absent or Ser
  MISC_FEATURE (844)..(844): Ser or Arg or Pro or Absent or Leu
  MISC_FEATURE (845)..(845): Asn or Absent or Thr
  MISC_FEATURE (846)..(846): Val or Ala or Absent or Pro or Asp
  MISC_FEATURE (847)..(847): Val or Absent or Ile or Thr
  MISC_FEATURE (848)..(848): Leu or Absent or Ile or Gln
  MISC_FEATURE (849)..(849): Val or Absent or Leu or Ile
  MISC_FEATURE (850)..(850): Ser or Absent or Asp or Cys
  MISC_FEATURE (851)..(851): Glu or Absent or Leu or Ser
  MISC_FEATURE (852)..(852): Thr or Absent or Phe or Glu
  MISC_FEATURE (853)..(853): Asp or Lys or Asn or Absent or Leu
  MISC_FEATURE (854)..(854): Ile or Lys or Gln or Absent or Glu
  MISC_FEATURE (855)..(855): Pro or Asp or Glu or Absent
  MISC_FEATURE (856)..(856): Glu or Ala or Absent or Gly
  MISC_FEATURE (857)..(857): Leu or Pro or Ile or Tyr or Absent
  MISC_FEATURE (858)..(858): Val or Ser or Pro or Absent
  MISC_FEATURE (859)..(859): Pro or Ser or Gly or Absent
  MISC_FEATURE (860)..(860): Val or Tyr or Phe or Absent
  MISC_FEATURE (861)..(861): Lys or Absent or Asn or Asp
  MISC_FEATURE (862)..(862): Leu or Ser or Ile or Pro or Absent or His
  MISC_FEATURE (863)..(863): Val or His or Absent or Cys
  MISC_FEATURE (864)..(864): Pro or Arg or Absent or Cys
  MISC_FEATURE (865)..(865): Pro or Tyr or Absent
  MISC_FEATURE (866)..(866): Trp or Arg or Ile or Absent or Glu
  MISC_FEATURE (867)..(867): Arg or Asn or His or Absent or Gly
  MISC_FEATURE (868)..(868): Arg or Lys or Absent or Asp
  MISC_FEATURE (869)..(869): Thr or Lys or Glu or Absent or Asn
  MISC_FEATURE (870)..(870): Lys or Leu or Absent or Thr
  MISC_FEATURE (871)..(871): Asn or Ser or Leu or Absent
  MISC_FEATURE (872)..(872): Asn or Gln or Glu or Absent or Lys
  MISC_FEATURE (873)..(873): Ile or Leu or Absent or Asp
  MISC_FEATURE (874)..(874): Arg or Gly or Absent or Trp
  MISC_FEATURE (875)..(875): Ile or Asp or Lys or Absent or Ala
  MISC_FEATURE (876)..(876): Leu or Gly or Absent or Asp
  MISC_FEATURE (877)..(877): Lys or Val or Absent or Ser
  MISC_FEATURE (878)..(878): Asp or Pro or Absent or Val
  MISC_FEATURE (879)..(879): Asn or Leu or Glu or Absent
  MISC_FEATURE (880)..(880): Arg or Glu or Gln or Absent or Asn
  MISC_FEATURE (881)..(881): Arg or Leu or Asp or Thr or Absent or Gly
  MISC_FEATURE (882)..(882): Ile or Leu or Absent or Phe
  MISC_FEATURE (883)..(883): Cys or Ile or Lys or Absent or His
  MISC_FEATURE (884)..(884): Ser or Cys or Absent or Asn
  MISC_FEATURE (885)..(885): Ser or Absent or Cys
  MISC_FEATURE (886)..(886): Glu or Ser or Thr or Absent or Gly
  MISC_FEATURE (887)..(887): Val or Glu or Asp or Absent
  MISC_FEATURE (888)..(888): Thr or Glu or Ser or Absent or Asp
  MISC_FEATURE (889)..(889): Phe or Gly or Asp or Absent or Cys
  MISC_FEATURE (890)..(890): Ser or Asn or Val or Absent or Ile
  MISC_FEATURE (891)..(891): Asp or Ser or Ala or Absent
  MISC_FEATURE (892)..(892): Asn or Ser or Arg or Absent or Gly
  MISC_FEATURE (893)..(893): Gly or Leu or Met or Absent or Lys
  MISC_FEATURE (894)..(894): Thr or Val or Absent or Cys
  MISC_FEATURE (895)..(895): Thr or Val or Glu or Absent or Phe
  MISC_FEATURE (896)..(896): Met or Ser or Asn or Absent or Leu
  MISC_FEATURE (897)..(897): Asp or Phe or Absent or Asn
  MISC_FEATURE (898)..(898): Absent or Glu or Gly or Asp or Gln
  MISC_FEATURE (899)..(899): Absent or Val or Gly or Asp
  MISC_FEATURE (900)..(900): Absent or Asn or Ser or His or Gly
  MISC_FEATURE (901)..(901): Absent or Thr or Ala or Leu or Ser
  MISC_FEATURE (902)..(902): Absent or Asp or Cys or Val or Arg
  MISC_FEATURE (903)..(903): Absent or Gln or Ser or Thr or Cys
  MISC_FEATURE (904)..(904): Absent or Leu or Ser or Tyr
  MISC_FEATURE (905)..(905): Absent or Ala or Thr or Val
  MISC_FEATURE (906)..(906): Absent or Gly or Gln or His
  MISC_FEATURE (907)..(907): Absent or Glu or Pro
  MISC_FEATURE (908)..(908): Absent or Leu or Phe
  MISC_FEATURE (909)..(909): Absent or Glu or Ile
  MISC_FEATURE (910)..(910): Absent or Asn or Glu
  MISC_FEATURE (911)..(911): Absent or Ser or Arg
  MISC_FEATURE (912)..(912): Absent or Ser or Lys
  MISC_FEATURE (913)..(913): Absent or Lys or Leu
  MISC_FEATURE (914)..(914): Absent or Gly or Arg
  MISC_FEATURE (915)..(915): Absent or Ser or Ile
  MISC_FEATURE (916)..(916): Absent or Phe or Leu
  MISC_FEATURE (917)..(917): Absent or Pro or Trp
  MISC_FEATURE (918)..(918): Absent or Ser or Asp
  MISC_FEATURE (919)..(919): Absent or Ala or Asn or His
  MISC_FEATURE (920)..(920): Absent or Thr or Ile
  MISC_FEATURE (921)..(921): Absent or Glu or Phe
  MISC_FEATURE (922)..(922): Absent or Lys
  MISC_FEATURE (923)..(923): Absent or His or Gln
  MISC_FEATURE (924)..(924): Absent or Leu or Asn
  MISC_FEATURE (925)..(925): Absent or Ser or Lys
  MISC_FEATURE (926)..(926): Absent or Leu or His
  MISC_FEATURE (927)..(927): Absent or Thr or Pro
  MISC_FEATURE (928)..(928): Absent or Arg or Ile
  MISC_FEATURE (929)..(929): Absent or Phe or His
  MISC_FEATURE (930)..(930): Absent or Pro or Cys
  MISC_FEATURE (931)..(931): Absent or Cys or His
  MISC_FEATURE (932)..(932): Absent or Lys or Glu
  MISC_FEATURE (933)..(933): Absent or Glu or Gln
  MISC_FEATURE (934)..(934): Absent or Ala or Ser
  MISC_FEATURE (935)..(935): Absent or Ser or Thr
  MISC_FEATURE (936)..(936): Absent or Cys
  MISC_FEATURE (937)..(937): Absent or Arg or Asp
  MISC_FEATURE (938)..(938): Absent or Arg or Pro
  MISC_FEATURE (939)..(939): Absent or Asn or His
  MISC_FEATURE (940)..(940): Absent or Ala or Asp
  MISC_FEATURE (941)..(941): Absent or Trp or Arg
  MISC_FEATURE (942)..(942): Absent or Ile
  MISC_FEATURE (943)..(943): Absent or Pro
  MISC_FEATURE (944)..(944): Absent or Asn
  MISC_FEATURE (945)..(945): Absent or Cys
  MISC_FEATURE (946)..(946): Absent or Thr
  MISC_FEATURE (947)..(947): Absent or Cys
  MISC_FEATURE (948)..(948): Absent or Lys
  MISC_FEATURE (949)..(949): Absent or Met
  MISC_FEATURE (950)..(950): Absent or Ile
  MISC_FEATURE (951)..(951): Absent or Arg
  MISC_FEATURE (952)..(952): Absent or Ser
  MISC_FEATURE (953)..(953): Absent or Ser
  MISC_FEATURE (954)..(954): Absent or Ser
  MISC_FEATURE (955)..(955): Absent or Pro
  MISC_FEATURE (956)..(956): Absent or His
  MISC_FEATURE (957)..(957): Absent or Tyr
  MISC_FEATURE (958)..(958): Absent or Leu
  MISC_FEATURE (959)..(959): Absent or Ser
  MISC_FEATURE (960)..(960): Absent or Phe
  MISC_FEATURE (961)..(961): Absent or Lys
  MISC_FEATURE (962)..(962): Absent or Gln
  MISC_FEATURE (963)..(963): Absent or Phe
  MISC_FEATURE (964)..(964): Absent or Thr
  MISC_FEATURE (965)..(965): Absent or Leu
  MISC_FEATURE (966)..(966): Absent or Leu
  MISC_FEATURE (967)..(967): Absent or Pro
  MISC_FEATURE (968)..(968): Absent or Phe
  MISC_FEATURE (969)..(969): Absent or Pro
  MISC_FEATURE (970)..(970): Absent or Met
  MISC_FEATURE (971)..(971): Absent or Ser
  MISC_FEATURE (972)..(972): Absent or Glu
  MISC_FEATURE (973)..(973): Absent or His
  MISC_FEATURE (974)..(974): Absent or Ile
  MISC_FEATURE (975)..(975): Absent or Leu
  MISC_FEATURE (976)..(976): Absent or Leu
  MISC_FEATURE (977)..(977): Absent or Gln
  MISC_FEATURE (978)..(978): Absent or Lys
  MISC_FEATURE (979)..(979): Absent or Val
  MISC_FEATURE (980)..(980): Absent or Ser
  MISC_FEATURE (981)..(981): Absent or Gln
  MISC_FEATURE (982)..(982): Absent or Ser
  MISC_FEATURE (983)..(983): Absent or Phe
  MISC_FEATURE (984)..(984): Absent or Leu
  MISC_FEATURE (985)..(985): Absent or Ile
  MISC_FEATURE (986)..(986): Absent or Asp
  MISC_FEATURE (987)..(987): Absent or Phe
  MISC_FEATURE (988)..(988): Absent or His
  MISC_FEATURE (989)..(989): Absent or Asn
  MISC_FEATURE (990)..(990): Absent or Ser
  MISC_FEATURE (991)..(991): Absent or Thr
  MISC_FEATURE (992)..(992): Absent or Pro
  MISC_FEATURE (993)..(993): Absent or Tyr
  MISC_FEATURE (994)..(994): Absent or Pro
  MISC_FEATURE (995)..(995): Absent or Ala
  MISC_FEATURE (996)..(996): Absent or Leu
  MISC_FEATURE (997)..(997): Absent or Thr
  MISC_FEATURE (998)..(998): Absent or Ser
  MISC_FEATURE (999)..(999): Absent or Gln
  MISC_FEATURE (1000)..(1000): Absent or Asp
  MISC_FEATURE (1001)..(1001): Absent or Phe
  MISC_FEATURE (1002)..(1002): Absent or His
  MISC_FEATURE (1003)..(1003): Absent or Pro
  MISC_FEATURE (1004)..(1004): Absent or Pro
  MISC_FEATURE (1005)..(1005): Absent or Tyr
  MISC_FEATURE (1006)..(1006): Absent or Tyr
  MISC_FEATURE (1007)..(1007): Absent or Pro
  MISC_FEATURE (1008)..(1008): Absent or Tyr
  MISC_FEATURE (1009)..(1009): Absent or Phe
  MISC_FEATURE (1010)..(1010): Absent or Pro
  MISC_FEATURE (1011)..(1011): Absent or Leu
  MISC_FEATURE (1012)..(1012): Absent or Met
  MISC_FEATURE (1013)..(1013): Absent or Thr
  MISC_FEATURE (1014)..(1014): Absent or Cys
  MISC_FEATURE (1015)..(1015): Absent or Ser
  MISC_FEATURE (1016)..(1016): Absent or Arg
  MISC_FEATURE (1017)..(1017): Absent or Gly
  MISC_FEATURE (1018)..(1018): Absent or Pro
  MISC_FEATURE (1019)..(1019): Absent or Glu
  MISC_FEATURE (1020)..(1020): Absent or Ile
  MISC_FEATURE (1021)..(1021): Absent or Ser
  MISC_FEATURE (1022)..(1022): Absent or Pro
  MISC_FEATURE (1023)..(1023): Absent or Met
  MISC_FEATURE (1024)..(1024): Absent or Glu
  MISC_FEATURE (1025)..(1025): Absent or Thr
  MISC_FEATURE (1026)..(1026): Absent or Ser
  MISC_FEATURE (1027)..(1027): Absent or Ser
  MISC_FEATURE (1028)..(1028): Absent or Tyr
  MISC_FEATURE (1029)..(1029): Absent or Val
  MISC_FEATURE (1030)..(1030): Absent or Arg
  MISC_FEATURE (1031)..(1031): Absent or Val
  MISC_FEATURE (1032)..(1032): Absent or Pro
  MISC_FEATURE (1033)..(1033): Absent or Cys
  MISC_FEATURE (1034)..(1034): Absent or Asn
  MISC_FEATURE (1035)..(1035): Absent or His
  MISC_FEATURE (1036)..(1036): Absent or Gln
  MISC_FEATURE (1037)..(1037): Absent or Ser
  MISC_FEATURE (1038)..(1038): Absent or Gln or Asn or Leu or Ala
  MISC_FEATURE (1039)..(1039): Absent or His or Gln or Ala or Gly
  MISC_FEATURE (1040)..(1040): Absent or Ser or Asn or Gly
  MISC_FEATURE (1041)..(1041): Absent or Thr or Leu or Ser
  MISC_FEATURE (1042)..(1042): Absent or Cys or Thr or Glu or Ser
  MISC_FEATURE (1043)..(1043): Absent or Thr or Arg or Glu
  MISC_FEATURE (1044)..(1044): Absent or Glu or Val or Gly or Lys
  MISC_FEATURE (1045)..(1045): Absent or Met or Asp or Asn or Leu
  MISC_FEATURE (1046)..(1046): Absent or Ile or Phe or Lys or Glu
  MISC_FEATURE (1047)..(1047): Absent or Cys or Ser or His or Gln
  MISC_FEATURE (1048)..(1048): Absent or Lys or Leu
  MISC_FEATURE (1049)..(1049): Absent or Ser or Pro or Gln or Ala
  MISC_FEATURE (1050)..(1050): Absent or Glu or Asp or Gly
  MISC_FEATURE (1051)..(1051): Absent or Gly or Glu or Ala or Ile
  MISC_FEATURE (1052)..(1052): Absent or Glu or Val or Lys or Ala
  MISC_FEATURE (1053)..(1053): Absent or Asn or Thr or Val
  MISC_FEATURE (1054)..(1054): Absent or Leu or Met or Phe or Ala
  MISC_FEATURE (1055)..(1055): Absent or Glu or Leu or Met or Asp
  MISC_FEATURE (1057)..(1057): Absent or Leu or Val
  MISC_FEATURE (1058)..(1058): Absent or Val or Ser or Cys
  MISC_FEATURE (1061)..(1061): Absent or Arg or Ile or Gln or Lys
  MISC_FEATURE (1062)..(1062): Absent or Asn or Lys or Ser
  MISC_FEATURE (1063)..(1063): Absent or Thr or Met or Leu or Ser
  MISC_FEATURE (1065)..(1065): Absent or Val or Leu or Ile or Thr
  MISC_FEATURE (1067)..(1067): Absent or Glu or Asp or Lys
  MISC_FEATURE (1068)..(1068): Absent or Leu or Phe or His
  MISC_FEATURE (1071)..(1071): Absent or Glu or Gln or Asp or His
  MISC_FEATURE (1074)..(1074): Absent or Val or Leu or Ile
  MISC_FEATURE (1079)..(1079): Absent or Ile or Val or Leu
  MISC_FEATURE (1080)..(1080): Absent or Tyr or Val or His
  MISC_FEATURE (1081)..(1081): Absent or Phe or Tyr or Leu or Val
  MISC_FEATURE (1083)..(1083): Asn or His or Leu or Ser
  MISC_FEATURE (1084)..(1084): Lys or Arg or Gln
  MISC_FEATURE (1087)..(1087): Gly or Gln or Asp or Asn or Ser
  MISC_FEATURE (1088)..(1088): Asn or Thr or Gly or Asp or Tyr
  MISC_FEATURE (1089)..(1089): Val or Ala or Leu
  MISC_FEATURE (1090)..(1090): Ile or Val or Ala or Tyr or Gly
  MISC_FEATURE (1091)..(1091): Thr or Ala or Ser or Absent or Gly
  MISC_FEATURE (1092)..(1092): Arg or Lys or Met or Absent or Ala
  MISC_FEATURE (1095)..(1095): Leu or Ile or Arg or Absent
  MISC_FEATURE (1096)..(1096): Ser or Leu or Tyr or Absent
  MISC_FEATURE (1097)..(1097): Absent or Val
  MISC_FEATURE (1098)..(1098): Absent or Leu
  MISC_FEATURE (1099)..(1099): Absent or Ile or Leu
  MISC_FEATURE (1100)..(1100): Absent or Ile
  MISC_FEATURE (1101)..(1101): Absent or Ser or Phe
  MISC_FEATURE (1102)..(1102): Absent or any naturally occurring amino acid or Ala
  MISC_FEATURE (1103)..(1103): Asp or Ile or Glu
  MISC_FEATURE (1104)..(1104): Asp or any naturally occurring amino acid or Asn
  MISC_FEATURE (1106)..(1106): Ile or Val or Met
  MISC_FEATURE (1107)..(1107): Cys or Tyr or Leu or Pro
  MISC_FEATURE (1108)..(1108): Lys or Ser or Glu
  MISC_FEATURE (1109)..(1109): Val or Ile
  MISC_FEATURE (1110)..(1110): Val or Ala
  MISC_FEATURE (1111)..(1111): Lys or Gln
  MISC_FEATURE (1112)..(1112): Ser or Lys or Asn
  MISC_FEATURE (1114)..(1114): Pro or Ser
  MISC_FEATURE (1115)..(1115): Gln or His or Leu or Tyr
  MISC_FEATURE (1116)..(1116): Glu or Asp
  MISC_FEATURE (1117)..(1117): Ile or Leu or Met
  MISC_FEATURE (1119)..(1119): Val or Lys or Glu or Ser
  MISC_FEATURE (1120)..(1120): Val or Ala or Gln or Phe or Ser
  MISC_FEATURE (1121)..(1121): Trp or Arg or His or Asn
  MISC_FEATURE (1122)..(1122): Lys or Gln or Gly
  MISC_FEATURE (1124)..(1124): Lys or Arg
  MISC_FEATURE (1127)..(1127): Phe or Ser or Glu or Asp or His
  MISC_FEATURE (1128)..(1128): Met or Val or Ile
  MISC_FEATURE (1129)..(1129): Leu or Ile
  MISC_FEATURE (1130)..(1130): Val or Ala
  MISC_FEATURE (1133)..(1133): Tyr or Phe
  MISC_FEATURE (1135)..(1135): Cys or Arg or His
  MISC_FEATURE (1137)..(1137): Ile or Leu or Val
  MISC_FEATURE (1143)..(1143): His or Gln or Arg
  MISC_FEATURE (1145)..(1145): X or Arg or Asn
  MISC_FEATURE (1146)..(1146): Lys or Ser or Thr
  MISC_FEATURE (1148)..(1148): X or Arg or Gln
  MISC_FEATURE (1156)..(1156): Val or Ile
  MISC_FEATURE (1157)..(1157): Leu or Met
  MISC_FEATURE (1161)..(1161): Thr or Ala
  MISC_FEATURE (1162)..(1162): Ile or Ala or Pro or Arg
  MISC_FEATURE (1163)..(1163): Ile or Ala or Ser or Cys
  MISC_FEATURE (1164)..(1164): Ala or Val or Ile
  MISC_FEATURE (1165)..(1165): Val or Ala or Thr or Leu
  MISC_FEATURE (1166)..(1166): Asp or Ala or Thr or Pro
  MISC_FEATURE (1167)..(1167): Ser or Thr
  MISC_FEATURE (1171)..(1171): Ser or Absent or Thr or Val or Ala
  MISC_FEATURE (1172)..(1172): Ser or Ala or Thr or Asn or Pro
  MISC_FEATURE (1173)..(1173): Phe or Leu or Val or Ile
  MISC_FEATURE (1176)..(1176): Asp or Glu or Val
  MISC_FEATURE (1177)..(1177): Val or Ala or Asn or Met or Thr
  MISC_FEATURE (1178)..(1178): Ile or Leu or Ser or Glu
  MISC_FEATURE (1179)..(1179): Asp or Glu or Asn or Cys
  MISC_FEATURE (1180)..(1180): Glu or Asn or Asp
  MISC_FEATURE (1181)..(1181): Pro or Ser or Val or Ala
  MISC_FEATURE (1182)..(1182): Ala or Met or Thr or Leu
  MISC_FEATURE (1183)..(1183): His or Gln or Pro or Ser
  MISC_FEATURE (1184)..(1184): Absent or Gln or Ala
  MISC_FEATURE (1185)..(1185): Absent or Glu or Lys
  MISC_FEATURE (1186)..(1186): Absent or Val or Gln
  MISC_FEATURE (1187)..(1187): Absent or Asn or Glu
  MISC_FEATURE (1188)..(1188): Absent or Leu
  MISC_FEATURE (1189)..(1189): Absent or Phe
  MISC_FEATURE (1190)..(1190): Absent or Val
  MISC_FEATURE (1191)..(1191): Absent or Cys
  MISC_FEATURE (1192)..(1192): Absent or Leu
  MISC_FEATURE (1193)..(1193): Absent or Gln
  MISC_FEATURE (1194)..(1194): Absent or Ser
  MISC_FEATURE (1195)..(1195): Absent or Val
  MISC_FEATURE (1196)..(1196): Absent or Pro
  MISC_FEATURE (1197)..(1197): Absent or Val
  MISC_FEATURE (1198)..(1198): Absent or Ala
  MISC_FEATURE (1199)..(1199): Absent or Val
  MISC_FEATURE (1200)..(1200): Absent or Pro
  MISC_FEATURE (1201)..(1201): Absent or Ala
  MISC_FEATURE (1202)..(1202): Absent or Lys
  MISC_FEATURE (1203)..(1203): Absent or Gln
  MISC_FEATURE (1204)..(1204): Absent or Glu
  MISC_FEATURE (1205)..(1205): Absent or Val
  MISC_FEATURE (1206)..(1206): Absent or Arg or His
  MISC_FEATURE (1207)..(1207): Absent or Gln or Ser
  MISC_FEATURE (1208)..(1208): Absent or Glu or Ala or Pro
  MISC_FEATURE (1209)..(1209): Absent or Asn or Met or Lys or His
  MISC_FEATURE (1210)..(1210): Absent or Leu or Ser or Arg or Ala or Gln
  MISC_FEATURE (1211)..(1211): Absent or any naturally occurring amino acid or Thr or Glu or Ser
  MISC_FEATURE (1212)..(1212): Absent or Ser or Asn
  MISC_FEATURE (1213)..(1213): Absent or Arg or Met or Ile
  MISC_FEATURE (1214)..(1214): Absent or Thr or Arg or Pro or Ala
  MISC_FEATURE (1216)..(1216): Absent or Ser or Ile or Val or Phe
  MISC_FEATURE (1217)..(1217): Absent or Gly or Val or Ile or His or Asn
  MISC_FEATURE (1218)..(1218): Absent or Arg or Tyr or Gly or Thr or Ala
  MISC_FEATURE (1219)..(1219): Absent or Ala or Ser or Gly
  MISC_FEATURE (1221)..(1221): Absent or Leu or Gly or His or Ser
  MISC_FEATURE (1222)..(1222): Absent or Ser or Thr or Leu or Arg
  MISC_FEATURE (1224)..(1224): Absent or Gln or Pro or Gly or Ser
  MISC_FEATURE (1226)..(1226): Absent or Met or Ala or Thr or Leu
  MISC_FEATURE (1227)..(1227): Absent or Pro or Arg or Lys or Ser or Thr or Ile
  MISC_FEATURE (1228)..(1228): Absent or Arg or Glu or Ser
  MISC_FEATURE (1229)..(1229): Absent or Ala or Arg or Ser or Leu or Val
  MISC_FEATURE (1230)..(1230): Absent or Lys or Gln or Leu or Pro
  MISC_FEATURE (1231)..(1231): Absent or Glu or Lys or Leu or Gln
  MISC_FEATURE (1232)..(1232): Absent or Thr or Gly or Lys or Ala
  MISC_FEATURE (1233)..(1233): Absent or Leu or Val or Met or Lys or Asn
  MISC_FEATURE (1234)..(1234): Absent or Ser or Ala or Asp
  MISC_FEATURE (1235)..(1235): Absent or Arg or Val or Leu or Pro
  MISC_FEATURE (1237)..(1237): Absent or Ala or Arg or Gly or Phe or Ser
  MISC_FEATURE (1239)..(1239): Absent or Pro or Ser or Asn or Asp
  MISC_FEATURE (1241)..(1241): Absent or Val or Glu or Asp or Pro or Lys
  MISC_FEATURE (1242)..(1242): Absent or Ser or Lys or Val or Leu
  MISC_FEATURE (1243)..(1243): Absent or Ser or Tyr or Arg or Pro
  MISC_FEATURE (1244)..(1244): Absent or Glu or Ser or Asp or Ala
  MISC_FEATURE (1246)..(1246): Absent or Phe or His or Thr or Ala
  MISC_FEATURE (1247)..(1247): Absent or Ser or Cys or His or Asn
  MISC_FEATURE (1248)..(1248): Absent or Asp or Met or Thr or Phe or Ile
  MISC_FEATURE (1249)..(1249): Absent or Phe or Pro or Gly
  MISC_FEATURE (1250)..(1250): Absent or Val or Thr or Ile or Ser
  MISC_FEATURE (1251)..(1251): Absent or Gln or Ser or Phe
  MISC_FEATURE (1252)..(1252): Absent or Ser or Asn or Asp
  MISC_FEATURE (1253)..(1253): Absent or Asn or Leu
  MISC_FEATURE (1254)..(1254): Absent or Leu or Ala
  MISC_FEATURE (1255)..(1255): Absent or Asp or Lys
  MISC_FEATURE (1257)..(1257): Absent or Ser or Leu
  MISC_FEATURE (1258)..(1258): Absent or Lys or Val
  MISC_FEATURE (1259)..(1259): Absent or Glu or Lys
  MISC_FEATURE (1261)..(1261): Absent or Gly or Cys or Pro or Ala
  MISC_FEATURE (1262)..(1262): Absent or Arg or Lys or Leu
  MISC_FEATURE (1263)..(1263): Absent or Ser or Thr or Pro
  MISC_FEATURE (1268)..(1268): Absent or Arg or Met
  MISC_FEATURE (1273)..(1273): Absent or Ile or Val
  MISC_FEATURE (1274)..(1274): Absent or Leu or Trp
  MISC_FEATURE (1276)..(1276): Absent or Pro or Leu or Arg
  MISC_FEATURE (1278)..(1278): Absent or Leu or Val or Phe
  MISC_FEATURE (1285)..(1285): Absent or Val or Ala
  MISC_FEATURE (1289)..(1289): Absent or Leu or Ile
  MISC_FEATURE (1293)..(1293): Absent or Arg or Lys or Gln
  MISC_FEATURE (1294)..(1294): Absent or Ser or Cys
  MISC_FEATURE (1295)..(1295): Absent or Val or Ala or Leu or Arg
  MISC_FEATURE (1296)..(1296): Absent or Thr or Lys or Val
  MISC_FEATURE (1297)..(1297): Absent or Asp or Glu or Tyr or Asn
  MISC_FEATURE (1298)..(1298): Absent or Ser or Thr or Pro
  MISC_FEATURE (1303)..(1303): Absent or Tyr or Lys
  MISC_FEATURE (1308)..(1308): Absent or Glu or Ala or His or Gln
  MISC_FEATURE (1310)..(1310): Absent or Leu or Ser or Met
  MISC_FEATURE (1311)..(1311): Absent or Val or Ser or Pro or Leu
  MISC_FEATURE (1313)..(1313): Absent or Pro or Arg or Glu or Asp
  MISC_FEATURE (1314)..(1314): Absent or Ala or Ser or Pro or Val
  MISC_FEATURE (1315)..(1315): Absent or Val or Ser
  MISC_FEATURE (1316)..(1316): Absent or Asn or Gly or Thr or Val or Ala
  MISC_FEATURE (1317)..(1317): Absent or Phe or Ala or Ser or Gly
  MISC_FEATURE (1318)..(1318): Absent or Gly or Asp
  MISC_FEATURE (1319)..(1319): Absent or Ala or Glu or Ser
  MISC_FEATURE (1320)..(1320): Absent or Ala or Gln
  MISC_FEATURE (1321)..(1321): Absent or Ile or Phe or Ser
  MISC_FEATURE (1322)..(1322): Absent or Asn or Asp
  MISC_FEATURE (1323)..(1323): Absent or Phe or Gln or Cys
  MISC_FEATURE (1324)..(1324): Absent or Trp or Gly or Asn or Ser or Asp
  MISC_FEATURE (1325)..(1325): Absent or Glu or Gly
  MISC_FEATURE (1326)..(1326): Absent or Lys or Pro or Ser
  MISC_FEATURE (1327)..(1327): Absent or Pro or Lys
  MISC_FEATURE (1328)..(1328): Absent or Ala or Asn or Ser or Pro
  MISC_FEATURE (1329)..(1329): Absent or Phe or Ser or Cys or Trp
  MISC_FEATURE (1330)..(1330): Absent or Ala or Val or Ser or Leu
  MISC_FEATURE (1331)..(1331): Absent or Val or Thr or Leu
  MISC_FEATURE (1332)..(1332): Absent or Glu or Gln
  MISC_FEATURE (1334)..(1334): Absent or Gly or Ala or Thr or Asp
  MISC_FEATURE (1337)..(1337): Absent or Gly or His
  MISC_FEATURE (1340)..(1340): Absent or Ala or Thr or Ser
  MISC_FEATURE (1347)..(1347): Absent or Thr or Ser or Val or Ile
  MISC_FEATURE (1348)..(1348): Absent or Asp or Asn or Lys
  MISC_FEATURE (1350)..(1350): Absent or Gln or Arg
  MISC_FEATURE (1351)..(1351): Absent or Trp or Cys
  MISC_FEATURE (1352)..(1352): Absent or Val or Ile
  MISC_FEATURE (1359)..(1359): Absent or Trp or Val
  MISC_FEATURE (1360)..(1360): Absent or Lys
  MISC_FEATURE (1361)..(1361): Absent or Phe
  MISC_FEATURE (1362)..(1362): Absent or Pro
  MISC_FEATURE (1363)..(1363): Absent or Leu
  MISC_FEATURE (1364)..(1364): Absent or Arg
  MISC_FEATURE (1365)..(1365): Absent or Gln
  MISC_FEATURE (1366)..(1366): Absent or Gln
  MISC_FEATURE (1367)..(1367): Absent or Leu
  MISC_FEATURE (1368)..(1368): Absent or Leu
  MISC_FEATURE (1369)..(1369): Absent or Ala
  MISC_FEATURE (1370)..(1370): Absent or Gly
  MISC_FEATURE (1371)..(1371): Absent or Ser
  MISC_FEATURE (1372)..(1372): Absent or Gly
  MISC_FEATURE (1373)..(1373): Absent or Val
  MISC_FEATURE (1374)..(1374): Absent or Leu
  MISC_FEATURE (1375)..(1375): Absent or Tyr
  MISC_FEATURE (1376)..(1376): Absent or Ser
  MISC_FEATURE (1377)..(1377): Absent or Val
  MISC_FEATURE (1378)..(1378): Absent or Leu
  MISC_FEATURE (1379)..(1379): Absent or Asn
  MISC_FEATURE (1380)..(1380): Absent or Ile
  MISC_FEATURE (1381)..(1381): Absent or Ala
  MISC_FEATURE (1382)..(1382): Absent or Asn
  MISC_FEATURE (1383)..(1383): Absent or Asn
  MISC_FEATURE (1384)..(1384): Absent or Leu
  MISC_FEATURE (1385)..(1385): Absent or Val
  MISC_FEATURE (1386)..(1386): Absent or Tyr
  MISC_FEATURE (1387)..(1387): Absent or Asn
  MISC_FEATURE (1388)..(1388): Absent or Phe
  MISC_FEATURE (1389)..(1389): Absent or Trp
  MISC_FEATURE (1390)..(1390): Absent or Gln
  MISC_FEATURE (1391)..(1391): Absent or Trp
  MISC_FEATURE (1392)..(1392): Absent or Val or Ser or Leu
  MISC_FEATURE (1393)..(1393): Absent or Leu or Phe
  MISC_FEATURE (1395)..(1395): Absent or Ser or Thr or Asn
  MISC_FEATURE (1396)..(1396): Absent or Thr or Ser
  MISC_FEATURE (1398)..(1398): Absent or Arg or Lys or Ile or Thr
  MISC_FEATURE (1399)..(1399): Absent or Lys or Arg
  MISC_FEATURE (1402)..(1402): Absent or Val or Ile or His or Cys or Tyr
  MISC_FEATURE (1403)..(1403): Absent or Asn or Asp
  MISC_FEATURE (1404)..(1404): Absent or Pro or Ala
  MISC_FEATURE (1406)..(1406): Absent or Glu or Gln or Asp
  MISC_FEATURE (1410)..(1410): Absent or Thr or Ser or Tyr or Arg or Gly
  MISC_FEATURE (1411)..(1411): Absent or Val or Leu or Gly or Tyr
  MISC_FEATURE (1412)..(1412): Absent or Ser or Gln or Ala or Asn or Gly or His or Leu or Pro
  MISC_FEATURE (1413)..(1413): Absent or Lys or His
  MISC_FEATURE (1414)..(1414): Absent or Lys
  MISC_FEATURE (1415)..(1415): Absent or Gly or Lys or Asp
  MISC_FEATURE (1416)..(1416): Absent or Ser or Thr or Pro or Lys
  MISC_FEATURE (1417)..(1417): Absent or Asp
  MISC_FEATURE (1418)..(1418): Absent or Val or Asn or Thr
  MISC_FEATURE (1419)..(1419): Absent or Cys
  MISC_FEATURE (1420)..(1420): Absent or Tyr or Cys or Ser or Ala
  MISC_FEATURE (1421)..(1421): Absent or Ile or Val or Leu
  MISC_FEATURE (1422)..(1422): Absent or Cys or Phe
  MISC_FEATURE (1423)..(1423): Absent or His or Gln or Cys
  MISC_FEATURE (1424)..(1424): Absent or Arg or Leu or His
  MISC_FEATURE (1425)..(1425): Absent or Lys or Ile or Cys or Asn
  MISC_FEATURE (1426)..(1426): Absent or Asn or Tyr or Val
  MISC_FEATURE (1427)..(1427): Absent or Gly
  MISC_FEATURE (1428)..(1428): Absent or Val or Ala or Thr or Ser
  MISC_FEATURE (1429)..(1429): Absent or Cys
  MISC_FEATURE (1430)..(1430): Absent or Ile or Thr or Leu
  MISC_FEATURE (1431)..(1431): Absent or Lys
  MISC_FEATURE (1433)..(1433): Absent or Asn or Ser or Cys
  MISC_FEATURE (1434)..(1434): Absent or Tyr or Thr
  MISC_FEATURE (1435)..(1435): Absent or Gly or Leu or Val
  MISC_FEATURE (1436)..(1436): Absent or His or Asn or Asp or Gly
  MISC_FEATURE (1439)..(1439): Absent or Ser or Thr or Ile or Val
  MISC_FEATURE (1444)..(1444): Absent or Ser or Ala or Thr
  MISC_FEATURE (1448)..(1448): Absent or Ser or Arg or Asp
  MISC_FEATURE (1451)..(1451): Absent or Leu or Phe
  MISC_FEATURE (1452)..(1452): Absent or Tyr or His
  MISC_FEATURE (1454)..(1454): Absent or Asn or Thr or Asp
  MISC_FEATURE (1455)..(1455): Absent or Val or Gly or Thr
  MISC_FEATURE (1456)..(1456): Absent or Lys or Arg
  MISC_FEATURE (1457)..(1457): Absent or Thr or Pro or Arg or Lys
  MISC_FEATURE (1458)..(1458): Absent or Gly or Thr or Leu or Phe or Ile
  MISC_FEATURE (1460)..(1460): Absent or Gly or Asn or Ser
  MISC_FEATURE (1461)..(1461): Absent or Lys or Met or Leu or Thr
  MISC_FEATURE (1462)..(1462): Absent or Leu or Ala or His or Trp
  MISC_FEATURE (1463)..(1463): Absent or Gln or Pro or Glu
  MISC_FEATURE (1469)..(1469): Absent or Glu or Cys or Gly
  MISC_FEATURE (1472)..(1472): Absent or Ser or Gly
  MISC_FEATURE (1473)..(1473): Absent or Leu or Met or Ile
  MISC_FEATURE (1476)..(1476): Absent or Arg or Lys
  MISC_FEATURE (1477)..(1477): Absent or Ala or Lys
  MISC_FEATURE (1478)..(1478): Absent or Lys or Ala or Val
  MISC_FEATURE (1479)..(1479): Absent or Ala or Tyr or Asp
  MISC_FEATURE (1480)..(1480): Absent or Glu or Ser or Leu
  MISC_FEATURE (1481)..(1481): Absent or Thr or Ser or Leu
  MISC_FEATURE (1483)..(1483): Absent or Lys or Gln or Leu
  MISC_FEATURE (1486)..(1486): Absent or Ile or Ala or Pro
  MISC_FEATURE (1489)..(1489): Absent or Leu or Ile or Val
  MISC_FEATURE (1491)..(1491): Absent or Asn or Ser or Gly or Ile
  MISC_FEATURE (1492)..(1492): Absent or Ile or Leu or Met
  MISC_FEATURE (1494)..(1494): Absent or Gln
  MISC_FEATURE (1495)..(1495): Absent or Ile
  MISC_FEATURE (1496)..(1496): Absent or Arg
  MISC_FEATURE (1497)..(1497): Absent or Val
  MISC_FEATURE (1498)..(1498): Absent or Gln or His
  MISC_FEATURE (1499)..(1499): Absent or Ile or Tyr or Met
  MISC_FEATURE (1502)..(1502): Absent or Gly
  MISC_FEATURE (1503)..(1503): Absent or Val
  MISC_FEATURE (1504)..(1504): Absent or Leu
  MISC_FEATURE (1505)..(1505): Absent or Ser
  MISC_FEATURE (1506)..(1506): Absent or Glu
  MISC_FEATURE (1507)..(1507): Absent or Val
  MISC_FEATURE (1508)..(1508): Absent or Glu or Asp
  MISC_FEATURE (1511)..(1511): Absent or Arg or Leu or Val
  MISC_FEATURE (1515)..(1515): Absent or Leu or Ile
  MISC_FEATURE (1519)..(1519): Absent or Ile or Val
  MISC_FEATURE (1527)..(1527): Absent or Arg or Val or Lys
  MISC_FEATURE (1528)..(1528): Absent or Glu or Phe or Asp
  MISC_FEATURE (1530)..(1530): Absent or Ile or Val or Ala or Leu
  MISC_FEATURE (1531)..(1531): Absent or Leu or Ile or Glu or Gly or Val
  MISC_FEATURE (1532)..(1532): Absent or Cys or Ser or Leu
  MISC_FEATURE (1533)..(1533): Absent or Ser or Lys or Ala or Glu or Gly
  MISC_FEATURE (1535)..(1535): Absent or Asp or Glu
  MISC_FEATURE (1536)..(1536): Absent or Ile or Thr
  MISC_FEATURE (1540)..(1540): Absent or Lys or Arg
  MISC_FEATURE (1542)..(1542): Absent or Asp or Ile or Asn
  MISC_FEATURE (1543)..(1543): Absent or Ser or His or Thr or Tyr
  MISC_FEATURE (1544)..(1544): Absent or Val or Ala or Ile
  MISC_FEATURE (1546)..(1546): Absent or Leu or Arg or Ser or Phe or Tyr
  MISC_FEATURE (1547)..(1547): Absent or Ser or Pro
  MISC_FEATURE (1548)..(1548): Absent or Val or Leu or Met or Thr
  MISC_FEATURE (1549)..(1549): Absent or Leu or His or Trp or Arg
  MISC_FEATURE (1550)..(1550): Absent or Val or Ala or Thr
  MISC_FEATURE (1551)..(1551): Absent or His or Arg or Ser
  MISC_FEATURE (1552)..(1552): Absent or Ser or Asn or Cys or Tyr
  MISC_FEATURE (1553)..(1553): Absent or Pro or His or Tyr or Cys
  MISC_FEATURE (1554)..(1554): Absent or Phe or Thr or Gly
  MISC_FEATURE (1556)..(1556): Absent or Pro or Leu or Gly or Ala
  MISC_FEATURE (1558)..(1558): Absent or Asp or Glu or Gly
  MISC_FEATURE (1559)..(1559): Absent or Val or Gly or Ala
  MISC_FEATURE (1562)..(1562): Absent or Glu or Asp
  MISC_FEATURE (1568)..(1568): Absent or Leu or Ile or Val
  MISC_FEATURE (1569)..(1569): Absent or Lys or Asn
  MISC_FEATURE (1570)..(1570): Absent or Gly or Asn
  MISC_FEATURE (1571)..(1571): Absent or His or Asn or Lys
  MISC_FEATURE (1572)..(1572): Absent or Met or Thr or Pro or Ser
  MISC_FEATURE (1573)..(1573): Absent or Asp or Glu or Tyr
  MISC_FEATURE (1574)..(1574): Absent or Gly or Ser
  MISC_FEATURE (1575)..(1575): Absent or Tyr or Asn or Gly
  MISC_FEATURE (1576)..(1576): Absent or Lys or Arg or Ile
  MISC_FEATURE (1577)..(1577): Absent or Ser or Arg
  MISC_FEATURE (1578)..(1578): Absent or Gln
  MISC_FEATURE (1579)..(1579): Absent or Arg
  MISC_FEATURE (1580)..(1580): Absent or Ser or Cys or Gly
  MISC_FEATURE (1581)..(1581): Absent or Ser or Asp
  MISC_FEATURE (1582)..(1582): Absent or Glu or Asp
  MISC_FEATURE (1583)..(1583): Absent or Ala or Pro or Gln or Ile or Leu
  MISC_FEATURE (1584)..(1584): Absent or Ile or Leu or Phe or Thr or Met
  MISC_FEATURE (1587)..(1587): Absent or Ser or Trp or Thr
  MISC_FEATURE (1590)..(1590): Absent or Ile or Val
  MISC_FEATURE (1591)..(1591): Absent or Thr or Ala
  MISC_FEATURE (1592)..(1592): Absent or Val or Ile or Ala
  MISC_FEATURE (1595)..(1595): Absent or Thr or Ser or Gln or Ile
  MISC_FEATURE (1596)..(1596): Absent or Ile or Val or Leu
  MISC_FEATURE (1597)..(1597): Absent or Ser or Thr or Pro
  MISC_FEATURE (1598)..(1598): Absent or Gly or Ala or Asp or Lys or Arg
  MISC_FEATURE (1600)..(1600): Absent or His or Arg or Pro
  MISC_FEATURE (1601)..(1601): Absent or Cys or Arg or Thr
  MISC_FEATURE (1602)..(1602): Absent or Ile or Val or Gly
  MISC_FEATURE (1603)..(1603): Absent or Lys or Arg
  MISC_FEATURE (1604)..(1604): Absent or Leu or Val or Gly or Phe
  MISC_FEATURE (1605)..(1605): Absent or Pro or Ser
  MISC_FEATURE (1606)..(1606): Absent or Val or Ala or Pro or Leu
  MISC_FEATURE (1607)..(1607): Absent or Ser or Ile or Leu or Ala or His or Asn
  MISC_FEATURE (1608)..(1608): Absent or Met or Ser or Leu or Asn
  MISC_FEATURE (1609)..(1609): Absent or Asp or Met or Arg or Lys or Ser
  MISC_FEATURE (1611)..(1611): Absent or Asp or Thr or any naturally occurring amino acid or Ala
  MISC_FEATURE (1613)..(1613): Absent or Lys or Pro or Gln or Arg
  MISC_FEATURE (1614)..(1614): Absent or Thr or Lys or Asn
  MISC_FEATURE (1615)..(1615): Absent or Leu or Thr or any naturally occurring amino acid
  MISC_FEATURE (1616)..(1616): Absent or Asp or Ala or Thr
  MISC_FEATURE (1617)..(1617): Absent or Asp or any naturally occurring amino acid or Ala
  MISC_FEATURE (1620)..(1620): Absent or Ser or Ala
  MISC_FEATURE (1623)..(1623): Absent or Gln or Lys or Thr or Ser
  MISC_FEATURE (1624)..(1624): Absent or His or Ser or any naturally occurring amino acid or Ile
  MISC_FEATURE (1625)..(1625): Absent or Leu or Arg or Thr or Ser
  MISC_FEATURE (1626)..(1626): Absent or Cys or Tyr or Phe
  MISC_FEATURE (1627)..(1627): Absent or Thr or Asn or Ser or Lys
  MISC_FEATURE (1628)..(1628): Absent or Arg or His or any naturally occurring amino acid or Gln
  MISC_FEATURE (1631)..(1631): Absent or Ser or Leu or Thr or any naturally occurring amino acid or Asp
  MISC_FEATURE (1632)..(1632): Absent or Glu or Asp or Gln
  MISC_FEATURE (1634)..(1634): Absent or Ala or Ser or Gln or Gly or Glu
  MISC_FEATURE (1635)..(1635): Absent or Ser or Gln or Ile or Asn
  MISC_FEATURE (1637)..(1637): Absent or Cys or Ser or Ala
  MISC_FEATURE (1638)..(1638): Absent or Gly or Ser or Leu or Asp
  MISC_FEATURE (1640)..(1640): Absent or Gln or Lys or Thr or Asn
  MISC_FEATURE (1641)..(1641): Absent or Ile or Val or Phe or Leu
  MISC_FEATURE (1643)..(1643): Absent or Leu or Arg or Gly or Glu or Lys
  MISC_FEATURE (1644)..(1644): Absent or Arg or Gln or Lys or His
  MISC_FEATURE (1645)..(1645): Absent or Pro or Arg or His or Ala
  MISC_FEATURE (1646)..(1646): Absent or Ser or Ala or Cys
  MISC_FEATURE (1647)..(1647): Absent or Ser or Ala or Ile or Thr
  MISC_FEATURE (1648)..(1648): Absent or Val or Ala
  MISC_FEATURE (1649)..(1649): Absent or Ala or Ser or Leu or Met
  MISC_FEATURE (1650)..(1650): Absent or Ser or Arg or Pro or Gln
  MISC_FEATURE (1651)..(1651): Absent or Arg or Asn or Ser
  MISC_FEATURE (1652)..(1652): Absent or Asn or Ile or Val or Lys
  MISC_FEATURE (1655)..(1655): Absent or Gly or Glu or Asp
  MISC_FEATURE (1657)..(1657): Absent or Val or Gly or Asp or Glu
  MISC_FEATURE (1658)..(1658): Absent or Glu or Trp or Asn or Thr
  MISC_FEATURE (1659)..(1659): Absent or Lys or Arg or Gly
  MISC_FEATURE (1661)..(1661): Absent or Ser or Lys or Thr
  MISC_FEATURE (1662)..(1662): Absent or Lys or Ser or Pro or Asp
  MISC_FEATURE (1663)..(1663): Absent or Ser or Arg or Lys or Asn
  MISC_FEATURE (1665)..(1665): Absent or Lys or Gln or Leu or Asn
  MISC_FEATURE (1666)..(1666): Absent or His or Gln
  MISC_FEATURE (1667)..(1667): Absent or Thr or Ser or Val or Lys or Arg
  MISC_FEATURE (1668)..(1668): Absent or Glu or Ser or Pro
  MISC_FEATURE (1669)..(1669): Absent or Thr or Glu or Pro
  MISC_FEATURE (1670)..(1670): Absent or Phe or Asp or Lys
  MISC_FEATURE (1671)..(1671): Absent or Glu or Gly or Ala or Ser
  MISC_FEATURE (1672)..(1672): Absent or Lys or Glu or Ile
  MISC_FEATURE (1673)..(1673): Absent or Glu or Ile or Val
  MISC_FEATURE (1674)..(1674): Absent or Leu or Lys or Tyr
  MISC_FEATURE (1675)..(1675): Absent or Val or Ser or Thr
  MISC_FEATURE (1676)..(1676): Absent or Met or Thr or Arg
  MISC_FEATURE (1677)..(1677): Absent or Thr or Asp or Arg
  MISC_FEATURE (1679)..(1679): Absent or Asp or Ala
  MISC_FEATURE (1680)..(1680): Absent or Gln or Glu or Leu
  MISC_FEATURE (1681)..(1681): Absent or Ala or Gln or Ser
  MISC_FEATURE (1682)..(1682): Absent or Ser or Lys
  MISC_FEATURE (1683)..(1683): Absent or Val or Met or Phe or Ser or Lys
  MISC_FEATURE (1684)..(1684): Absent or Lys or Glu or Arg
  MISC_FEATURE (1685)..(1685): Absent or Asn or Asp or Gln
  MISC_FEATURE (1686)..(1686): Absent or Gln or Ser or Arg or Gly
  MISC_FEATURE (1687)..(1687): Absent or Arg or Met or Glu
  MISC_FEATURE (1688)..(1688): Absent or Leu or Thr
  MISC_FEATURE (1689)..(1689): Absent or Pro or Lys
  MISC_FEATURE (1690)..(1690): Absent or Lys or Ser
  MISC_FEATURE (1691)..(1691): Absent or Gly or Thr
  MISC_FEATURE (1692)..(1692): Absent or Phe or Tyr or Asp
  MISC_FEATURE (1693)..(1693): Absent or Val or Ala or Phe or Asn
  MISC_FEATURE (1694)..(1694): Absent or Tyr or Ala
  MISC_FEATURE (1695)..(1695): Absent or Val or Leu
  MISC_FEATURE (1696)..(1696): Absent or Pro or Gln or Ser
  MISC_FEATURE (1697)..(1697): Absent or Ile or Ala or Val or Lys or Gln
  MISC_FEATURE (1698)..(1698): Absent or Gly or Asp or Ser or Asn
  MISC_FEATURE (1699)..(1699): Absent or Cys or Glu or Val
  MISC_FEATURE (1700)..(1700): Absent or Leu or Asp or Glu
  MISC_FEATURE (1701)..(1701): Absent or Ser or Gln or Gly
  MISC_FEATURE (1702)..(1702): Absent or Lys or Asn or Glu or Pro
  MISC_FEATURE (1703)..(1703): Absent or Glu or Asp or Thr or Gly
  MISC_FEATURE (1704)..(1704): Absent or Lys or Gly
  MISC_FEATURE (1705)..(1705): Absent or Gln or His or Pro or Ser
  MISC_FEATURE (1706)..(1706): Absent or Ile or Ser or Gly or Thr
  MISC_FEATURE (1707)..(1707): Absent or Asn or Asp
  MISC_FEATURE (1708)..(1708): Absent or Gln or Glu or Asn
  MISC_FEATURE (1709)..(1709): Absent or Asp or Lys or Ala
  MISC_FEATURE (1710)..(1710): Absent or Ala or Val or Leu
  MISC_FEATURE (1711)..(1711): Absent or Cys or Tyr or Ala or Gln
  MISC_FEATURE (1712)..(1712): Absent or Pro or Ala or Ser or Lys
  MISC_FEATURE (1713)..(1713): Absent or Arg or Ser
  MISC_FEATURE (1714)..(1714): Absent or Glu or Asp
  MISC_FEATURE (1715)..(1715): Absent or Ser or Pro or Lys or Asp
  MISC_FEATURE (1716)..(1716): Absent or Val or Pro or Arg
  MISC_FEATURE (1717)..(1717): Absent or Glu or Ala or Arg
  MISC_FEATURE (1718)..(1718): Absent or Arg or His or Asn
  MISC_FEATURE (1719)..(1719): Absent or Asp or Gln or Lys
  MISC_FEATURE (1720)..(1720): Absent or Gly or Arg or Lys or Val
  MISC_FEATURE (1721)..(1721): Absent or Thr or Asn
  MISC_FEATURE (1722)..(1722): Absent or Ser or Arg
  MISC_FEATURE (1723)..(1723): Absent or Ser
  MISC_FEATURE (1724)..(1724): Absent or Gly
  MISC_FEATURE (1725)..(1725): Absent or Asp
  MISC_FEATURE (1726)..(1726): Absent or Gln
  MISC_FEATURE (1727)..(1727): Absent or Ser
  MISC_FEATURE (1728)..(1728): Absent or Gly
  MISC_FEATURE (1729)..(1729): Absent or any naturally occurring amino acid
  MISC_FEATURE (1730)..(1730): Absent or Phe
  MISC_FEATURE (1731)..(1731): Absent or Thr
  MISC_FEATURE (1732)..(1732): Absent or Asn
  MISC_FEATURE (1733)..(1733): Absent or Trp
  MISC_FEATURE (1734)..(1734): Absent or Leu
  MISC_FEATURE (1735)..(1735): Absent or Lys
  MISC_FEATURE (1736)..(1736): Absent or Ala
  MISC_FEATURE (1737)..(1737): Absent or Lys
  MISC_FEATURE (1738)..(1738): Absent or Asp or Glu
  MISC_FEATURE (1739)..(1739): Absent or Asp or Gln
  MISC_FEATURE (1740)..(1740): Absent or Gly or Met
  MISC_FEATURE (1741)..(1741): Absent or Val
  MISC_FEATURE (1742)..(1742): Absent or Leu
  MISC_FEATURE (1743)..(1743): Absent or Arg
  MISC_FEATURE (1744)..(1744): Absent or Tyr
  MISC_FEATURE (1745)..(1745): Absent or Lys
  MISC_FEATURE (1746)..(1746): Absent or Arg
  MISC_FEATURE (1747)..(1747): Absent or Ala
  MISC_FEATURE (1748)..(1748): Absent or Val
  MISC_FEATURE (1749)..(1749): Absent or Ala
  MISC_FEATURE (1750)..(1750): Absent or Ala
  MISC_FEATURE (1751)..(1751): Absent or Thr
  MISC_FEATURE (1752)..(1752): Absent or Glu
  MISC_FEATURE (1753)..(1753): Absent or Asn
  MISC_FEATURE (1754)..(1754): Absent or Gln
  MISC_FEATURE (1755)..(1755): Absent or Leu
  MISC_FEATURE (1756)..(1756): Absent or Lys
  MISC_FEATURE (1757)..(1757): Absent or Lys
  MISC_FEATURE (1758)..(1758): Absent or any naturally occurring amino acid or Ala
  MISC_FEATURE (1759)..(1759): Absent or Ile
  MISC_FEATURE (1760)..(1760): Absent or Val
  MISC_FEATURE (1761)..(1761): Absent or Lys
  MISC_FEATURE (1762)..(1762): Absent or Leu
  MISC_FEATURE (1763)..(1763): Absent or Leu
  MISC_FEATURE (1764)..(1764): Absent or Gly
  MISC_FEATURE (1765)..(1765): Absent or Thr
  MISC_FEATURE (1766)..(1766): Absent or Arg
  MISC_FEATURE (1767)..(1767): Absent or Tyr
  MISC_FEATURE (1768)..(1768): Absent or Lys
  MISC_FEATURE (1769)..(1769): Absent or Leu
  MISC_FEATURE (1770)..(1770): Absent or Cys
  MISC_FEATURE (1771)..(1771): Absent or Leu
  MISC_FEATURE (1772)..(1772): Absent or Leu
  MISC_FEATURE (1773)..(1773): Absent or Val
  MISC_FEATURE (1774)..(1774): Absent or Met
  MISC_FEATURE (1775)..(1775): Absent or Phe
  MISC_FEATURE (1776)..(1776): Absent or Glu
  MISC_FEATURE (1777)..(1777): Absent or Ile
XXXXXXXXXXXXXXXXXXXXXXXXXXXXXXXXXXXXXXXXXXXXXXXXXXXXXXXXXXXXXXXXXXXXXXXXXXXXXXXXXXXXXXXXXXXXXXXXXXXXXXXXXXXXXXXXXXXXXXXXXXXXXXXXXXXXXXXXXXXXXXXXXXXXXXXXXXXXXXXXXXXXXXXXXXXXXXXXXXXXXXXXXXXXXXXXXXXXXXXXXXXXXXXXXXXXXXXXXXXXXXXXXXXXXXXXXXXXXXXXXXXXXXXXXXXXXXXXXXXXXXXXXXXXXXXXXXXXXXXXXXXXXXXXXXXXXXXXXXXXXXXXXXXXXXXXXXXXXXXXXXXXXXXXXXXXXXXXXXXXXXXXXXXXXXXXXXXXXXXXXXXXXXXXXXXXXXXXXXXXXXXXXXXXXXXXXXXXXXXXXXXXXXXXXXXXXXXXXXXXXXXXXXXXXXXXXXXXXXXXXXXXXXXXXXXXXXXXXXXXXXXXXXXXXXXXXXXXXXXXXXXXXXXXXXXXXXXXXXXXXXXXXXXXXXXXXXXXXXXXXXXXXXXXXXXXXXXXXXXXXXXXXXXXXXXXXXXXXXXXXXXXXXXXXXXXXXXXXXXXXXXXXXXXXXXXXXXXXXXXXXXXXXXXXXXXXXXXXXXXXXXXXXXXXXXXXXXXXXXXXXXXXXXXXXXXXXXXXXXXXXXXXXXXXXXXXXXXXXXXXXXXXXXXXXXXXXXXXXXXXXXXXXXXXXXXXXXXXXXXXXXXXXXXXXXXXXXXXXXXXXXXXXXXXXXXXXXXXXXXXXXXXXXXXXXXXXXXXXXXXXXXXXXXXXXXXXXXXXXXXXXXXXXXXXXXXXXXXXXXXXXXXXXXXXXXXXXXXXXXXXXXXXXXXXXXXXXXXXXXXXXXXXXXXXXXXXXXXXXXXXXXXXXXXXXXXXXXXXXXXXXXXXXXXXXXXXXXXXXXXXXXXXXXXXXXXXXXXXXXXXXXXXXXXXXXXXXXXXXXXXXXXXXXXXXXXXXXXXXXXXXXXXXXXXXXXXXXXXXXXXXXXXXXXXXXXXXXXXXXXXXXXXXXXXXXXXXXXXXXXXXXXXXXXXXXXXXQXXKAXXXGXLXXSPXDEXEGELXXXQXXLLXXXXXXKQXXXXXXXXXXLXXXXXXXLXXXXDXXXXRXWDXXXXNQXLXDXREAKKXGXXEXRHKEAQAXXAAAXXXXXXXSRNXXXRKXXXXXXXXXXXXXXXXXXXXXXXXXXXXXXXXXXXXXXXKXXXXSXXVXQXXXXXXXXXXSXPXSXXXXDXXXXXXXXXXFXXXNXXXCDICXRSETXXNXIXVCSSCKXAVHXDCYXXXXXXTGPWXCELCXEXXSXXXXXXXXXXXXXXXXXXXXCXLCXGTXGAFRKTXXGXXXHAFCAEXXXXXXXXXXXXXXXXXXXXXXXXXXXXXXXXXXXEXXFXXGQXXXVXGMEXXXXXXXXXXXXXXXXXXXXXXCXXXXCQXTFHPXCARXAGXXMXXXXXGXXXXHKAYCXKHXXEQXXXXXXQXHGXEEXKXXKXXXXXXRVXXXXXXXLEXLRLXCERXVKREKLKXXLXXXXHXXLAAXRXXXAXXXXXXXXXSXPXXSSXSATTSXXXXXXXXXXXXXXXXXQRXDDXXXDSXXXXKXXXXXXXXXXDXDXXXXXDSXTSXXXXXXKLXXRXXLXXKXXPXXXXXXXXXXSEXGXXXSXXXKXXXXXXXXXXXXXSXXXXXXXXXXXXXXXXXXXXXXXXXXXXXXXXXXXXXXXXXXXXXXXXXXXXXXXXXXXXXXXXXXXXXXXXXXXXXXXXXXXXXXXXXXXXXXXXXXX

SEQ ID NO: 17388 - protein, 97 aa, Artificial
  Consensus Sequence of SEQ ID NO. 155 and its homologs
  MISC_FEATURE (17)..(17): Ala or Ser
  MISC_FEATURE (22)..(22): Ala or Val
  MISC_FEATURE (25)..(25): Phe or Leu
  MISC_FEATURE (39)..(39): Ile or Ala
  MISC_FEATURE (40)..(40): Ser or Absent
  MISC_FEATURE (41)..(41): Gln or Absent
  MISC_FEATURE (42)..(42): Lys or Absent
  MISC_FEATURE (43)..(43): Tyr or Absent
  MISC_FEATURE (44)..(44): Tyr or Absent
  MISC_FEATURE (45)..(45): Asn or Absent
  MISC_FEATURE (46)..(46): Leu or Absent
  MISC_FEATURE (47)..(47): Met or Absent
  MISC_FEATURE (48)..(48): Met or Absent
  MISC_FEATURE (49)..(49): Asn or Absent
  MISC_FEATURE (50)..(50): Phe or Absent
  MISC_FEATURE (51)..(51): Pro or Absent
  MISC_FEATURE (52)..(52): Phe or Absent
  MISC_FEATURE (53)..(53): Met or Absent
  MISC_FEATURE (54)..(54): Ser or Absent
  MISC_FEATURE (55)..(55): Leu or Absent
  MISC_FEATURE (56)..(56): Phe or Absent
  MISC_FEATURE (57)..(57): Ser or Absent
  MISC_FEATURE (58)..(58): Leu or Absent
  MISC_FEATURE (59)..(59): Ile or Absent
  MISC_FEATURE (61)..(61): Pro or Gln
  MISC_FEATURE (65)..(65): Ile or Val
  MISC_FEATURE (67)..(67): Glu or Arg
  MISC_FEATURE (68)..(68): Thr or Ile
  MISC_FEATURE (74)..(74): Ala or Glu
  MISC_FEATURE (78)..(78): Lys or His
  MISC_FEATURE (79)..(79): Arg or Gln
  MISC_FEATURE (85)..(85): Ser or Asn
  MISC_FEATURE (87)..(87): Arg or Lys
  MISC_FEATURE (89)..(89): Pro or Ser
  MISC_FEATURE (92)..(92): Ile or Asn
MGYLWRVRLSSFAAGAXTASAXGFXLLYKDHLLARAAIXXXXXXXXXXXXXXXXXXXXXRXVEDXKXXSEKHYXALNXXISALEXRXEXGTXKEASD

SEQ ID NO: 17389 - protein, 658 aa, Artificial
  Consensus Sequence of SEQ ID NO. 173 and its homologs
  MISC_FEATURE (1)..(1): Absent or Met
  MISC_FEATURE (2)..(2): Absent or Thr or Met
  MISC_FEATURE (3)..(3): Absent or Ser or Leu
  MISC_FEATURE (4)..(4): Absent or Ala or Pro
  MISC_FEATURE (5)..(5): Absent or Gly or Cys or Met
  MISC_FEATURE (6)..(6): Absent or Ala or Val or Thr
  MISC_FEATURE (7)..(7): Absent or Tyr or His or Cys or Ser
  MISC_FEATURE (8)..(8): Absent or Glu or Gly or Gln or Ala
  MISC_FEATURE (9)..(9): Absent or Ile or His or Met or Pro
  MISC_FEATURE (10)..(10): Absent or Arg or Leu or Ser or Ala or Met
  MISC_FEATURE (11)..(11): Absent or Glu or Met or Leu or Ala or Tyr
  MISC_FEATURE (12)..(12): Absent or Asp or Gln or Ser or Arg or Thr or Ala or Gly or Tyr or Pro
  MISC_FEATURE (13)..(13): Absent or Glu or Arg or Cys or Leu or Thr or Val or Gln or Pro or Ser
  MISC_FEATURE (14)..(14): Absent or Glu or Val or Ile or Lys or Thr or Gly or Asn or Ser or Pro
  MISC_FEATURE (15)..(15): Absent or Gly or Lys or Arg or Ser or Ala or Val or Pro or Gln
  MISC_FEATURE (16)..(16): Absent or Arg or Leu or Val or Pro or Ile or Met
  MISC_FEATURE (17)..(17): Absent or Val or Asn or Arg or Gln or Asp or Ser or Gly
  MISC_FEATURE (18)..(18): Absent or Asp or Met or Leu or Ala or Lys or Ile
  MISC_FEATURE (19)..(19): Absent or Ala or Ser or Ile or Glu or Pro
  MISC_FEATURE (20)..(20): Absent or Ser or Pro or Gly or Thr or Val or Ile
  MISC_FEATURE (21)..(21): Absent or Ser or Ala or Gln or Pro or Thr
  MISC_FEATURE (22)..(22): Absent or Ala or Trp or Thr or Leu or Tyr or Ser or Asp
  MISC_FEATURE (23)..(23): Absent or Lys or Ile or Leu or Ser or Pro
  MISC_FEATURE (24)..(24): Absent or Cys or Lys or Asn or Ser or Thr or Pro or Gln or Glu
  MISC_FEATURE (25)..(25): Absent or Ala or Asp or His or Pro or Leu or Glu
  MISC_FEATURE (26)..(26): Absent or Gly or Ile or Val or Thr or Lys or Ser or Pro
  MISC_FEATURE (27)..(27): Absent or Ser or Met or Pro or Arg or Thr or Phe or Glu
  MISC_FEATURE (28)..(28): Absent or Ser or Ala or Lys or Arg or Leu or Asp or Ile
  MISC_FEATURE (29)..(29): Absent or Arg or Leu or Tyr or Lys or Met or Cys or Thr
  MISC_FEATURE (30)..(30): Absent or Glu or Gln or Leu or Ile or Ala or Pro or Asp
  MISC_FEATURE (31)..(31): Absent or Glu or Asn or Gly or Gln or Trp or Pro or Ala or Thr or His or Met
  MISC_FEATURE (32)..(32): Absent or Thr or Ala or Ser or Arg or His or Phe or Glu or Pro or Gln
  MISC_FEATURE (33)..(33): Absent or Trp or Lys or Thr or Leu or Met or Ile or Ala or Glu or Pro
  MISC_FEATURE (34)..(34): Absent or Val or Gln or Leu or Phe or Ala or Glu or Ser or Lys or Pro or Cys or Thr
  MISC_FEATURE (35)..(35): Absent or Ser or Asn or Met or Gln or Cys or Thr or Asp or Pro or His or Ala or Gly or Lys or Leu
  MISC_FEATURE (36)..(36): Absent or Gly or Met or Val or Ser or Ala or Thr or Glu or Asp or Arg
  MISC_FEATURE (37)..(37): Absent or Ala or Leu or Phe or Val or Thr or Met or Ile or Asp or Gly or Asn or Ser
  MISC_FEATURE (38)..(38): Absent or Thr or Lys or Arg or Ser or Ala or Gly or Pro or Asn or Asp or Val
  MISC_FEATURE (39)..(39): Absent or Gly or Ser or Leu or Asp or Pro or Glu or Phe or Asn or Gln
  MISC_FEATURE (40)..(40): Absent or Thr or Phe or Arg or Cys or Pro or Leu or Gly or Ala or Glu
  MISC_FEATURE (41)..(41): Absent or Ala or Ser or Lys or Leu or Thr or Phe or Gly or Asn
  MISC_FEATURE (42)..(42): Absent or Ala or Pro or Met or Ile or Leu or Thr or Ser or Gly or Arg
  MISC_FEATURE (43)..(43): Absent or Ala or Thr or Val or Pro or Ser or Gly or Asp or Leu
  MISC_FEATURE (44)..(44): Absent or Thr or Asp or Leu or Val or Gly or Pro or Ser
  MISC_FEATURE (45)..(45): Absent or Ala or Gln or Met or Thr or Glu or Arg or Lys or Phe or Gly
  MISC_FEATURE (46)..(46): Absent or Ala or Thr or Ser or Pro or Gly or Gln or Met or Phe
  MISC_FEATURE (47)..(47): Absent or Arg or Met or Ile or Glu or Ser or Gly or Leu or Pro or Lys or Ala
  MISC_FEATURE (48)..(48): Absent or Gly or Arg or Pro or Thr or Asp or Leu or Ile or Glu or Lys or Ala or Gln
  MISC_FEATURE (49)..(49): Absent or Ala or Phe or Ser or Gly or His or Arg or Asp or Ile or Thr
  MISC_FEATURE (50)..(50): Absent or Ser or Leu or Met or Gly or Arg or Pro or Phe or Val or Ala or Ile or Thr or Tyr
  MISC_FEATURE (51)..(51): Absent or Thr or His or Pro or Gln or Ser or Lys or Arg or Leu or Cys or Asn or Ala or Val or Phe
  MISC_FEATURE (52)..(52): Lys or Leu or Thr or Ile or Phe or Absent or Gly or Arg or Ala or Glu or Asn or Gln or His
  MISC_FEATURE (53)..(53): Lys or Arg or Asn or Ser or Thr or Absent or Pro or Phe or Trp or Glu
  MISC_FEATURE (54)..(54): Ser or Ala or Glu or Arg or Absent or Thr or Asn or Phe or Leu or Val or Trp
  MISC_FEATURE (55)..(55): Cys or Arg or Asn or His or Tyr or Absent or Ile or Gly or Gln or Pro or Phe or Val or Lys
  MISC_FEATURE (56)..(56): Phe or Gly or Ala or Ser or Asn or Met or Absent or Asp or His or Pro or Arg or Glu or Thr
  MISC_FEATURE (57)..(57): Ser or Arg or Ile or Phe or Trp or Leu or Thr or Gln or Met or Lys or Asn or Absent
  MISC_FEATURE (58)..(58): Pro or Lys or Glu or Arg or Ala or Ser or Leu or Thr or Ile or Phe or Absent or Val or Met
  MISC_FEATURE (59)..(59): Pro or Phe or Thr or Glu or Leu or Gly or His or Ser or Gln or Arg or Lys or Ala or Val or Absent
  MISC_FEATURE (60)..(60): Arg or Trp or Leu or Phe or Ala or Val or Pro or Absent or Tyr or His
  MISC_FEATURE (61)..(61): Pro or Asp or Ala or Arg or Leu or Asn or Tyr or Phe or Gly or Ser or Lys or Gln or His or Absent
  MISC_FEATURE (62)..(62): Pro or Glu or Gln or His or Ala or Gly or Arg or Lys or Leu or Asn or Thr or Absent
  MISC_FEATURE (63)..(63): Ala or Phe or Leu or Asp or Gln or His or Tyr or Asn or Ser or Arg or Pro or Thr or Absent
  MISC_FEATURE (64)..(64): Arg or Thr or Pro or Tyr or Ser or Asp or Asn or Leu or Absent or Val or Ala or Lys
  MISC_FEATURE (65)..(65): Arg or Trp or Leu or Val or Ile or Ser or Phe or Absent
  MISC_FEATURE (66)..(66): Pro or Arg or Ser or Ala or Thr or Gln or Met or His or Asn or Gly or Val or Leu or Absent or Glu
  MISC_FEATURE (68)..(68): Pro or Ala or Val or Ile or Leu or Trp or Thr or Absent
  MISC_FEATURE (69)..(69): Pro or Ser or Ala or Thr or Gly or Asn or Absent
  MISC_FEATURE (71)..(71): Gln or Ser or Ala or Absent or Cys
  MISC_FEATURE (72)..(72): Arg or Leu or Phe or Ile or Val or Met or Absent
  MISC_FEATURE (78)..(78): Val or Phe or Leu or Asp or Tyr or Absent
  MISC_FEATURE (79)..(79): Ile or Leu or Absent or Val
  MISC_FEATURE (81)..(81): Ser or Leu or Ile or Phe or Val or Absent
  MISC_FEATURE (82)..(82): Cys or Leu or Met or Ala or Val or Thr or Ser or Absent
  MISC_FEATURE (83)..(83): Gly or Ile or Leu or Ala or Val or Absent
  MISC_FEATURE (84)..(84): Gly or Ala or Thr or Ser or Absent
  MISC_FEATURE (86)..(86): Pro or Ser or Val or Ala or Thr or Ile or Absent
  MISC_FEATURE (87)..(87): Thr or Ile or Gln or Leu or Ala or Val or Gly or Met or Absent
  MISC_FEATURE (88)..(88): Ala or Glu or Lys or Gln or Asn or Val or Leu or Ser or Absent
  MISC_FEATURE (89)..(89): Pro or Cys or Val or Ser or Gly or Asp or Ala or Leu or Asn or Thr or Arg or Lys or Absent
  MISC_FEATURE (90)..(90): Cys or Gly or His or Ser or Thr or Gln or Lys or Asn or Asp or Absent
  MISC_FEATURE (92)..(92): Absent or any naturally occurring amino acid
  MISC_FEATURE (93)..(93): Absent or Asp or Ser or His or Ala or Asn
  MISC_FEATURE (95)..(95): Ile or Gly or Ser or Pro or Ala or Phe or Met or Thr or Val or Gln or Absent
  MISC_FEATURE (96)..(96): Ser or Thr or Ala or Gly or Pro or Val or Absent
  MISC_FEATURE (99)..(99): Leu or Thr or Val or Ile or Phe or Absent
  MISC_FEATURE (100)..(100): Ala or Phe or Ile or Leu or Ser or Gly or Trp or Absent
  MISC_FEATURE (101)..(101): Thr or Ser or Phe or Val or Ile or Absent
  MISC_FEATURE (102)..(102): Gly or Ala or Absent
  MISC_FEATURE (103)..(103): Absent or any naturally occurring amino acid
  MISC_FEATURE (104)..(104): Absent or Ala or Leu or Ile or Val or Phe or Met
  MISC_FEATURE (105)..(105): Absent or Tyr or Phe or Ala or Cys
  MISC_FEATURE (107)..(107): Absent or Val or Ile or Leu or Phe or Ala
  MISC_FEATURE (108)..(108): Absent or Leu or Ile or Phe or Val or Ala or Ser
  MISC_FEATURE (109)..(109): Absent or Thr or Ser or Cys or Ala or Trp or Ile
  MISC_FEATURE (111)..(111): Absent or Phe or Trp or Ile or Ala or Leu or His or Ser or Val or Thr
  MISC_FEATURE (112)..(112): Absent or Leu or Gln or Val or Phe or Tyr or Ile or Met
  MISC_FEATURE (113)..(113): Pro or Tyr or Phe or Absent
  MISC_FEATURE (114)..(114): Glu or Arg or Gly or Lys or Asp or Ser or Absent
  MISC_FEATURE (115)..(115): Asn or Ile or Leu or Thr or Val or Arg or Absent
  MISC_FEATURE (117)..(117): Gly or Met or Leu or Phe or Val or Ile or Absent
  MISC_FEATURE (124)..(124): Thr or Ala or Ser or Val or Absent
  MISC_FEATURE (128)..(128): Leu or Val or Ala or Ile or Tyr or Thr or Gln or Absent
  MISC_FEATURE (130)..(130): Val or Leu or Ile or Met or Ala or Absent
  MISC_FEATURE (131)..(131): Leu or Gly or Ala or Gln or Thr or Ser or Absent
  MISC_FEATURE (132)..(132): Phe or Absent or Gly or Glu or Asn or Arg or Gln or Thr or Ser or Ala or Asp or Pro
  MISC_FEATURE (133)..(133): Arg or Absent or Gly or His or Asp or Ser or Lys or Ala or Gln or Thr or Pro
  MISC_FEATURE (134)..(134): Arg or Asp or Ala or Thr or Ser or Phe or Leu or Val or Met or Ile or Absent or Pro or any naturally occurring amino acid
  MISC_FEATURE (135)..(135): Absent or Asp or Ala or Ser or Gln or Gly or Thr or Glu
  MISC_FEATURE (136)..(136): Absent or Ala or Gly or Thr
  MISC_FEATURE (137)..(137): Absent or Leu or Ala
  MISC_FEATURE (138)..(138): Absent or Asn or Asp or Val or His or Pro or Leu or Ser or Thr or Glu or Ile
  MISC_FEATURE (139)..(139): Absent or Val or Leu or Phe
  MISC_FEATURE (140)..(140): Absent or Thr or Ser or Gly or Asp or Ala
  MISC_FEATURE (141)..(141): Ala or Val or Leu or Met or Gly or Pro or Thr or Ile or Absent
  MISC_FEATURE (142)..(142): Leu or Asn or Pro or Arg or Gly or Asp or Ala or Ser or Gln or Absent
  MISC_FEATURE (143)..(143): Pro or Glu or Gln or Val or Ser or Ile or Ala or Met or Absent
  MISC_FEATURE (144)..(144): Leu or Ile or Thr or Val or Absent
  MISC_FEATURE (145)..(145): Ser or Met or Leu or Val or Thr or Ala or Trp or Tyr or Ile or Gln or Absent
  MISC_FEATURE (146)..(146): Pro or Thr or His or Ala or Ser or Val or Gly or Absent
  MISC_FEATURE (148)..(148): Pro or Gly or Ala or Cys or Thr or Absent or Ser
  MISC_FEATURE (149)..(149): Leu or Ile or Gly or Gln or Trp or Val or Met or Absent or Ala
  MISC_FEATURE (150)..(150): Gly or Phe or Leu or Trp or Met or Val or Ile or Ala or Absent or Ser or Cys
  MISC_FEATURE (151)..(151): Gly or Val or Ala or Thr or Met or Ile or Leu or Absent
  MISC_FEATURE (152)..(152): Gly or Ser or Ala or Absent
  MISC_FEATURE (153)..(153): Phe or Ala or Gly or Val or Leu or Ile or Absent
  MISC_FEATURE (154)..(154): Glu or Ile or Cys or Ala or Val or Met or Gly or Leu or Absent or Thr or Phe
  MISC_FEATURE (155)..(155): Ala or Val or Ile or Leu or Met or Trp or Absent or Pro
  MISC_FEATURE (156)..(156): Phe or Leu or Gly or Absent or Val or Ala
  MISC_FEATURE (157)..(157): Phe or Ala or Leu or Ile or Val or Absent or Gly
  MISC_FEATURE (160)..(160): Arg or Ser or Ala or Val or Ile or Leu or Thr or Phe or Absent
  MISC_FEATURE (162)..(162): Asn or Arg or Gln or Gly or Absent or Ser
  MISC_FEATURE (163)..(163): Gly or Met or Ala or Leu or Ile or Trp or Ser or Absent
  MISC_FEATURE (164)..(164): Arg or Met or Ile or Leu or Val or Ala or Absent
  MISC_FEATURE (165)..(165): Gly or Asp or Arg or Gln or Thr or Ser or Glu or Asn or Absent or Lys
  MISC_FEATURE (166)..(166): Phe or Val or Leu or Arg or Trp or Gln or Ala or Thr or Cys or Absent
  MISC_FEATURE (167)..(167): Pro or Phe or Ala or Val or Leu or Ile or Absent
  MISC_FEATURE (168)..(168): Phe or Asn or Thr or Val or Ala or Arg or Tyr or Absent
  MISC_FEATURE (169)..(169): Pro or Arg or Trp or Asn or Gln or Lys or Absent or Leu or Met or Phe
  MISC_FEATURE (170)..(170): Phe or Leu or Val or Ala or Trp or His or Gln or Tyr or Absent or Ile
  MISC_FEATURE (171)..(171): Pro or Thr or Val or Ile or Leu or Absent
  MISC_FEATURE (173)..(173): Gly or Leu or Pro or Val or Ile or Gln or Thr or Asp or Absent
  MISC_FEATURE (174)..(174): Pro or Ala or Thr or Ser or Absent or Cys
  MISC_FEATURE (179)..(179): Ala or Met or Val or Ile or Cys or Leu or Absent
  MISC_FEATURE (182)..(182): Val or Gly or Ala or Ser or Absent
  MISC_FEATURE (183)..(183): Arg or Leu or Val or Ala or Thr or Ile or Gln or Absent
  MISC_FEATURE (186)..(186): Leu or Lys or Ser or Gly or Met or Val or Gln or Absent or Ala or Asn
  MISC_FEATURE (187)..(187): Ile or Leu or Phe or Absent or Trp
  MISC_FEATURE (188)..(188): Ser or Ala or Val or Ile or Met or Leu or Absent or Cys or Gly
  MISC_FEATURE (189)..(189): Pro or Arg or Met or Ile or Leu or Ser or Thr or Glu or Trp or Phe or Absent
  MISC_FEATURE (190)..(190): Arg or Lys or Ser or Gly or Ala or Ile or Gln or Met or Thr or Absent
  MISC_FEATURE (191)..(191): Ala or Gly or Ser or Absent or Thr
  MISC_FEATURE (192)..(192): Arg or Phe or Val or Gly or Cys or Leu or Ile or Ala or Thr or Absent
  MISC_FEATURE (193)..(193): Glu or Leu or Asp or Ser or Ala or Thr or Lys or Arg or Gly or Absent
  MISC_FEATURE (194)..(194): Lys or Leu or Met or Ser or Thr or Phe or Tyr or Absent
  MISC_FEATURE (195)..(195): Gly or Ala or Leu or Tyr or Met or Ile or Val or Absent
  MISC_FEATURE (196)..(196): Arg or Val or Leu or Lys or His or Gln or Met or Ala or Ser or Absent
  MISC_FEATURE (197)..(197): Thr or Tyr or Arg or Gln or Gly or Pro or Absent or Phe or Lys or Asn
  MISC_FEATURE (198)..(198): Arg or Lys or Leu or Pro or Absent or Thr or Asp or Val or Asn or Glu or Ile
  MISC_FEATURE (199)..(199): Gly or Ser or His or Leu or Met or Absent or Gln or Tyr
  MISC_FEATURE (200)..(200): Absent or Gly or His or Ser or Asn or Asp or Lys
  MISC_FEATURE (201)..(201): Absent or Asp or Gly or Trp or Leu or Phe or Thr
  MISC_FEATURE (202)..(202): Absent or Pro or Leu or Ala or Ile or Thr or Gln or Ser or Gly
  MISC_FEATURE (203)..(203): Absent or Ala or Ser or His or Glu or Ile or Arg or Thr or Lys
  MISC_FEATURE (204)..(204): Absent or Ile or Ser or Pro or Met or Leu or Gly
  MISC_FEATURE (205)..(205): Absent or Glu or Gly or Arg or Ser or Gln or Lys
  MISC_FEATURE (206)..(206): Absent or Val or Trp or Ile or Ala or Gln or Asn or Ser or Pro or Thr
  MISC_FEATURE (207)..(207): Absent or Ala
  MISC_FEATURE (208)..(208): Absent or Ser
  MISC_FEATURE (209)..(209): Absent or Thr or Ser
  MISC_FEATURE (210)..(210): Absent or Ser or Ala or Gly or Leu or Val or Thr
  MISC_FEATURE (211)..(211): Pro or Arg or Leu or Ala or Absent or Val or Ser or Gly or Asp
  MISC_FEATURE (212)..(212): Asn or Glu or Pro or Asp or Absent or Ser or Val or Thr or Ala or Arg or Gln
  MISC_FEATURE (213)..(213): Arg or Met or Trp or Asn or Ala or Ser or Glu or Asp or Phe or Absent
  MISC_FEATURE (214)..(214): Ala or Leu or Arg or Tyr or Phe or Asp or Pro or Trp or Absent or Ser or Ile or Asn or His
  MISC_FEATURE (215)..(215): Gly or Leu or Ile or Trp or Phe or Ser or Pro or Arg or Absent
  MISC_FEATURE (216)..(216): Cys or Thr or Trp or Tyr or Leu or Absent or Val or Phe or Arg
  MISC_FEATURE (217)..(217): Pro or Asp or Glu or Ala or Val or Leu or Ile or Gly or Absent
  MISC_FEATURE (218)..(218): Thr or Gly or Phe or Leu or Ile or Ala or Absent or Val or Met
  MISC_FEATURE (219)..(219): Arg or Leu or Gly or Val or Ala or Gln or Asp or Absent
  MISC_FEATURE (220)..(220): Ser or Ile or Val or Ala or Gly or Absent or Trp
  MISC_FEATURE (221)..(221): Arg or Val or Leu or Phe or Ile or Gly or Absent or any naturally occurring amino acid
  MISC_FEATURE (222)..(222): Gly or Thr or Val or Leu or Ala or Ile or Absent or Trp or Lys
  MISC_FEATURE (223)..(223): Val or Ile or Ala or Gly or Phe or Ser or Pro or Leu or Absent
  MISC_FEATURE (224)..(224): Ile or Val or Leu or Ala or Absent or Trp or Met
  MISC_FEATURE (225)..(225): Gly or Ala or Val or Leu or Ile or Thr or Pro or Phe or Absent
  MISC_FEATURE (226)..(226): Ser or Met or Leu or Val or Gly or Trp or Ile or Ala or Absent
  MISC_FEATURE (227)..(227): Ala or Cys or Thr or Leu or Ser or Phe or Absent or Val
  MISC_FEATURE (228)..(228): Arg or Ala or His or Gln or Asn or Leu or Ile or Lys or Glu or Cys or Absent
  MISC_FEATURE (229)..(229): Leu or Val or Met or Absent or Ser or Ile or Lys or Phe or Thr or any naturally occurring amino acid or Ala
  MISC_FEATURE (230)..(230): Gly or Met or Ile or Arg or Lys or Thr or Pro or Leu or Cys or Absent or Ala
  MISC_FEATURE (231)..(231): Leu or Tyr or Ala or Phe or Pro or Lys or Asn or Gly or Gln or Absent
  MISC_FEATURE (232)..(232): Val or Thr or Arg or Pro or Lys or Glu or Leu or Ile or His or Absent
  MISC_FEATURE (233)..(233): Val or Cys or Thr or Arg or Lys or Ala or Leu or Ser or Ile or Absent
  MISC_FEATURE (234)..(234): Trp or Ser or Leu or Val or Phe or Gly or Ala or Tyr or Met or Glu or Absent or Ile
  MISC_FEATURE (235)..(235): Cys or Pro or Ile or Leu or Ser or Gln or Thr or Ala or Absent or Val
  MISC_FEATURE (236)..(236): Pro or Absent or Thr or Ser or Tyr or Asn
  MISC_FEATURE (237)..(237): Absent or Arg or Gly
  MISC_FEATURE (238)..(238): Absent or Ala or Ser or Asp
  MISC_FEATURE (239)..(239): Absent or Ala or Gly
  MISC_FEATURE (240)..(240): Absent or Arg or Asp or Thr or Asn or Ser or Glu or Gly
  MISC_FEATURE (241)..(241): Absent or Arg or Asp or Glu or Tyr or Gly
  MISC_FEATURE (242)..(242): Absent or Gly or Asp or Glu or Arg or Pro or Ser or Thr
  MISC_FEATURE (243)..(243): Absent or Thr or Asp or Glu or Pro or Gly or Ser or Val or Ile
  MISC_FEATURE (244)..(244): Absent or Leu or Ala or Val or Cys or Pro or Ser or Glu or Asp or His
  MISC_FEATURE (245)..(245): Absent or Glu or Ile or Ser or Asn or Ala or Pro or Arg or Gln
  MISC_FEATURE (246)..(246): Absent or Ala or Asn or Gly or Arg or Phe or Cys
  MISC_FEATURE (247)..(247): Absent or Ala or Gly or Pro
  MISC_FEATURE (248)..(248): Absent or Asp or Arg or Lys or Ser
  MISC_FEATURE (249)..(249): Absent or Glu or Lys or Asp
  MISC_FEATURE (250)..(250): Absent or Gly or Arg
  MISC_FEATURE (251)..(251): Absent or Gly or Arg
  MISC_FEATURE (252)..(252): Absent or Leu or Arg
  MISC_FEATURE (253)..(253): Absent or Gly or Ala
  MISC_FEATURE (254)..(254): Absent or Pro or Met
  MISC_FEATURE (255)..(255): Absent or Arg or Ala
  MISC_FEATURE (256)..(256): Absent or Pro or Ile
  MISC_FEATURE (257)..(257): Absent or Thr or Arg
  MISC_FEATURE (258)..(258): Absent or Asp or Glu
  MISC_FEATURE (259)..(259): Absent or Thr or Gln
  MISC_FEATURE (260)..(260): Absent or Ala or Gly
  MISC_FEATURE (261)..(261): Absent or Phe or Ala
  MISC_FEATURE (262)..(262): Absent or Glu or His
  MISC_FEATURE (263)..(263): Absent or Pro
  MISC_FEATURE (264)..(264): Absent or Leu or Glu
  MISC_FEATURE (265)..(265): Absent or Leu or Arg
  MISC_FEATURE (266)..(266): Absent or Arg
  MISC_FEATURE (267)..(267): Absent or Glu or Arg
  MISC_FEATURE (268)..(268): Absent or Tyr or Leu
  MISC_FEATURE (269)..(269): Absent or Pro
  MISC_FEATURE (270)..(270): Absent or Ala
  MISC_FEATURE (271)..(271): Absent or Ala or Cys
  MISC_FEATURE (272)..(272): Absent or Cys
  MISC_FEATURE (273)..(273): Absent or Ser or Gly
  MISC_FEATURE (274)..(274): Absent or Gln or Gly
  MISC_FEATURE (275)..(275): Absent or Gly
  MISC_FEATURE (276)..(276): Absent or Glu or Asp
  MISC_FEATURE (277)..(277): Absent or Arg
  MISC_FEATURE (278)..(278): Absent or Ala
  MISC_FEATURE (279)..(279): Absent or Pro
  MISC_FEATURE (280)..(280): Absent or Gln
  MISC_FEATURE (281)..(281): Absent or Val
  MISC_FEATURE (282)..(282): Absent or Glu
  MISC_FEATURE (283)..(283): Absent or Gly
  MISC_FEATURE (284)..(284): Absent or Ala
  MISC_FEATURE (285)..(285): Absent or Ala
  MISC_FEATURE (286)..(286): Absent or Val
  MISC_FEATURE (287)..(287): Absent or Ser
  MISC_FEATURE (288)..(288): Absent or Ala
  MISC_FEATURE (289)..(289): Absent or Glu
  MISC_FEATURE (290)..(290): Absent or Arg
  MISC_FEATURE (291)..(291): Absent or Ala
  MISC_FEATURE (292)..(292): Absent or Gly
  MISC_FEATURE (293)..(293): Absent or Leu
  MISC_FEATURE (294)..(294): Absent or Leu
  MISC_FEATURE (295)..(295): Absent or Ala
  MISC_FEATURE (296)..(296): Absent or His
  MISC_FEATURE (297)..(297): Absent or Ala
  MISC_FEATURE (298)..(298): Absent or Glu
  MISC_FEATURE (299)..(299): Absent or Gly
  MISC_FEATURE (300)..(300): Absent or Gly
  MISC_FEATURE (301)..(301): Absent or Glu
  MISC_FEATURE (302)..(302): Absent or Arg
  MISC_FEATURE (303)..(303): Absent or Ser
  MISC_FEATURE (304)..(304): Absent or Gly
  MISC_FEATURE (305)..(305): Absent or Asn or Gln or Glu or Ser
  MISC_FEATURE (306)..(306): Absent or Leu or Glu or Asp or Gln or Ile or Val
  MISC_FEATURE (307)..(307): Absent or Asp or Ala or Pro or Glu or His or Gly or Arg
  MISC_FEATURE (308)..(308): Absent or Thr or Asp or Ala or Ser or Arg or Gly or Pro or Glu or Leu
  MISC_FEATURE (309)..(309): Absent or Gly or Asp or Gln or Glu or His or Ser or Leu
  MISC_FEATURE (310)..(310): Absent or Glu or Thr or Gly or Phe or Leu or Gln or Asp or Asn
  MISC_FEATURE (311)..(311): Absent or Glu or Arg or Met or Thr or Ala or Gln or His or Asp or Gly
  MISC_FEATURE (312)..(312): Absent or Arg or Ala or Ser or Glu or Gln or Gly or Ile
  MISC_FEATURE (313)..(313): Absent or Gly or Thr or Ser or Glu or His or Asn
  MISC_FEATURE (314)..(314): Absent or Val or Ser or Glu or Gln or Gly or Arg or Asp or Leu or Asn
  MISC_FEATURE (315)..(315): Absent or Gly or Pro or Ile or Arg or His or Met or Asp or Glu
  MISC_FEATURE (316)..(316): Absent or Ala or Ser or Asp or Gln or Gly or Val or Asn
  MISC_FEATURE (317)..(317): Absent or Ala or Asn or Asp or Gly or Gln or Glu or Arg or Pro or Ile
  MISC_FEATURE (318)..(318): Absent or Ala or Glu or Arg or Gly or Gln or Thr
  MISC_FEATURE (319)..(319): Absent or Gly or Thr or Ser or Arg or Gln or Ala
  MISC_FEATURE (320)..(320): Absent or Gly or Gln or Glu or Thr or Arg or Pro
  MISC_FEATURE (321)..(321): Absent or Gly or Ser or Lys or Trp or Gln or Arg or Glu
  MISC_FEATURE (322)..(322): Absent or Gly or Arg or Val or Gln or Trp or Lys
  MISC_FEATURE (323)..(323): Absent or Cys or Arg or Ser or Gln or Gly
  MISC_FEATURE (324)..(324): Absent or Gly or Ala or Arg or Thr or Trp or Ser or Met
  MISC_FEATURE (325)..(325): Absent or Arg or Gly or Val or Trp or Leu or Pro
  MISC_FEATURE (326)..(326): Absent or Lys or Gly or Arg or Leu or Ser or Glu
  MISC_FEATURE (327)..(327): Absent or Pro or Gly or Arg or Lys or Gln
  MISC_FEATURE (328)..(328): Absent or Arg or Gly or Ser or Leu or Val or Ala or Ile or Lys
  MISC_FEATURE (329)..(329): Absent or Arg or Gly or Cys or Leu or Ala or Ile or Val or Phe
  MISC_FEATURE (330)..(330): Absent or His or Gly or Tyr or Pro or Ala or Thr or Leu or Ser or Val
  MISC_FEATURE (331)..(331): Absent or Tyr or Arg or Ala or Gly or Met or Cys or Ile or Ser or Thr or Val or Asn or Leu
  MISC_FEATURE (332)..(332): Absent or Ile or Leu or Gly or Phe or Ala or Thr or Pro or Val or Ser
  MISC_FEATURE (333)..(333): Absent or Pro or Ile or His or Val or Leu or Phe or Ala or Glu
  MISC_FEATURE (334)..(334): Absent or Val or Ser or Phe or Leu or Gly or Ala or Lys or Asn or Arg or Thr
  MISC_FEATURE (335)..(335): Absent or Ala or Phe or Val or Leu or Ile or Ser
  MISC_FEATURE (336)..(336): Absent or Leu or Ile or Val or Ala or Phe
  MISC_FEATURE (337)..(337): Absent or Ile or Leu or Phe or Asn or Asp or Ala or Val or Met or Ser
  MISC_FEATURE (338)..(338): Absent or Leu or Ala or Gly or Asn or Ser or Val or Ile
  MISC_FEATURE (339)..(339): Absent or Val or Thr or Leu or Gly or Ile or Pro or Arg or Met or Ala or Phe
  MISC_FEATURE (340)..(340): Absent or Ile or Val or Ala or Gly or Thr or Arg or Leu or Phe
  MISC_FEATURE (341)..(341): Absent or Ile or Val or Phe or Leu or Gly or Trp
  MISC_FEATURE (342)..(342): Absent or Gly or Ala or Val or Pro or Gln
  MISC_FEATURE (343)..(343): Absent or Ile or Leu or Ala or Phe or Val
  MISC_FEATURE (344)..(344): Absent or Ile or Ala or Val or Met or Leu or Asn
  MISC_FEATURE (345)..(345): Absent or Met or Ala or Lys or Ser or Arg or Gln or Leu or Phe
  MISC_FEATURE (346)..(346): Absent or Ala or Val or Leu or Arg or Asn or Met or Gly or Gln or Cys or Thr
  MISC_FEATURE (347)..(347): Absent or Met or Val or Ala or Thr or Pro or Ser or Glu or Phe or Ile
  MISC_FEATURE (348)..(348): Absent or Thr or Leu or Ala or Ser or Val or Ile or Pro or Asp
  MISC_FEATURE (349)..(349): Absent or Lys or His or Ser or Ala or Leu or Gly or Met or Ile or Arg
  MISC_FEATURE (350)..(350): Absent or Asp or Arg or Gly or Leu or Ser or Ala or Val or His or Lys or Gln
  MISC_FEATURE (351)..(351): Absent or Arg or Pro or Thr or Gly
  MISC_FEATURE (352)..(352): Absent or Ala or Gly or Asn or His or Lys or Glu or Leu or Phe or Thr or Ser or Arg
  MISC_FEATURE (353)..(353): Absent or Leu or Glu or Gly or Ser or Trp or Thr or Pro or Ile or Ala or Val
  MISC_FEATURE (354)..(354): Absent or Asp or Val or Arg or Ser or Asn or His or Lys or Leu or Thr or Ala or Phe or Met or Ile
  MISC_FEATURE (355)..(355): Absent or Gly or Trp or Leu or Gln or Arg or Lys or His or Ser
  MISC_FEATURE (356)..(356): Absent or Glu or Pro or Leu or Ile or Gly or Asp or His or Lys
  MISC_FEATURE (357)..(357): Absent or Val or Thr
  MISC_FEATURE (358)..(358): Absent or Phe or Leu
  MISC_FEATURE (359)..(359): Absent or Ser or Gly
  MISC_FEATURE (360)..(360): Absent or Asp or Arg
  MISC_FEATURE (361)..(361): Absent or Gly
  MISC_FEATURE (362)..(362): Absent or Ile
  MISC_FEATURE (363)..(363): Absent or Asp
  MISC_FEATURE (364)..(364): Absent or Ile
  MISC_FEATURE (365)..(365): Absent or Ala or Gly
  MISC_FEATURE (366)..(366): Absent or Thr or Val
  MISC_FEATURE (367)..(367): Absent or Phe or Gly
  MISC_FEATURE (368)..(368): Absent or Ser or Asn
  MISC_FEATURE (369)..(369): Absent or Gly or Phe or Leu
  MISC_FEATURE (370)..(370): Absent or Leu or Gly or Trp or His or Ser or Ile or Ala or Val or Met or Phe
  MISC_FEATURE (371)..(371): Absent or Thr or Arg or Val or Phe or Ala or Leu or Pro or Lys or Asn or His
  MISC_FEATURE (372)..(372): Absent or Met or Leu or Ala or Tyr or Ser or Ile or Phe or His
  MISC_FEATURE (373)..(373): Ala or Gly or Pro or Ile or His or Leu or Val or Absent
  MISC_FEATURE (374)..(374): Pro or Trp or Thr or Phe or Asp or Ser or Absent
  MISC_FEATURE (375)..(375): Pro or Ala or Thr or Val or Arg or Ile or His or Gln or Ser or Absent
  MISC_FEATURE (376)..(376): Gly or Arg or Leu or Pro or Phe or Thr or Ile or Absent or Ser or Lys
  MISC_FEATURE (377)..(377): Phe or Pro or Arg or Ser or Leu or Absent or Ile or Val or Met
  MISC_FEATURE (378)..(378): Pro or Lys or Arg or Leu or Phe or Ala or Ile or His or Met or Gly or Absent or Ser or Glu or Gln
  MISC_FEATURE (379)..(379): Leu or Ile or Val or Ser or Phe or Pro or Absent or Ala
  MISC_FEATURE (380)..(380): Gly or Leu or Met or Gln or Ile or Thr or Ala or Val or Absent or His
  MISC_FEATURE (381)..(381): Ala or Ser or Arg or Pro or Asp or Leu or Ile or Trp or Lys or Gly or Absent or His or Gln or Glu or Thr
  MISC_FEATURE (382)..(382): Pro or Ala or Arg or Absent or Leu or Ile or Thr or Phe or Met
  MISC_FEATURE (383)..(383): Gly or Ser or Trp or Thr or Val or Glu or Ala or Absent or Gln or Asp
  MISC_FEATURE (384)..(384): Gly or Trp or Thr or Ile or Pro or Leu or Met or Absent or Arg or Ala or Lys
  MISC_FEATURE (385)..(385): Ala or Ser or Pro or Gly or Asp or Gln or Thr or Asn or Glu or Absent or Arg or Lys or His
  MISC_FEATURE (386)..(386): Gly or Glu or Asp or Absent or Asn or Ala or Gln or Leu or Ile or Val
  MISC_FEATURE (387)..(387): Lys or Ala or Phe or Absent or Gly or Trp or Leu or Ser or Tyr
  MISC_FEATURE (388)..(388): Lys or Absent or Asp or Ser or Met or Phe or Ala or Thr or Gln or Leu or Arg
  MISC_FEATURE (389)..(389): Pro or Arg or Thr or Ser or Val or Glu or Tyr or Phe or Gln or Ile or Absent or Asn
  MISC_FEATURE (390)..(390): Gly or Val or Pro or Ala or Absent or Arg
  MISC_FEATURE (391)..(391): Pro or Val or Ala or Ile or Leu or Phe or Thr or Absent or Lys
  MISC_FEATURE (392)..(392): Phe or Val or Leu or Ile or Pro or Ser or Gly or Trp or Absent or Met
  MISC_FEATURE (393)..(393): Gln or His or Arg or Ser or Trp or Asp or Ile or Leu or Val or Glu or Absent or Lys
  MISC_FEATURE (394)..(394): Asp or Ala or Gly or Met or Leu or Absent or Arg
  MISC_FEATURE (395)..(395): Arg or Gly or Ala or Val or Absent or Thr
  MISC_FEATURE (396)..(396): Val or Leu or Ile or Met or Absent
  MISC_FEATURE (399)..(399): Ala or Leu or Ile or Absent or Val
  MISC_FEATURE (402)..(402): Ala or Thr or Ser or Absent
  MISC_FEATURE (403)..(403): Ser or Thr or Ile or Leu or Val or Absent or Phe
  MISC_FEATURE (404)..(404): Pro or Leu or Ala or Gly or Thr or Absent or Val
  MISC_FEATURE (406)..(406): Val or Ser or Ala or Absent or Phe
  MISC_FEATURE (408)..(408): Leu or Ile or Val or Absent or Trp or Gly
  MISC_FEATURE (410)..(410): Arg or Val or Thr or Ile or Asn or Tyr or Absent or Leu
  MISC_FEATURE (411)..(411): Val or Cys or Thr or Ser or Gln or Lys or Ala or Absent
  MISC_FEATURE (412)..(412): Ser or Ala or Gln or His or Glu or Asp or Leu or Val or Lys or Absent or Tyr or Asn
  MISC_FEATURE (413)..(413): Arg or Leu or Thr or Glu or Val or Met or Absent or Lys
  MISC_FEATURE (414)..(414): Trp or Ser or Ala or Asn or Val or Leu or Absent or Thr or Phe
  MISC_FEATURE (415)..(415): Pro or Lys or Asn or Ala or His or Gly or Gln or Ser or Absent or Arg or Ile or Tyr
  MISC_FEATURE (416)..(416): Pro or Glu or Ala or Asp or Arg or Thr or Lys or Absent
  MISC_FEATURE (417)..(417): Val or Leu or Tyr or Lys or Absent
  MISC_FEATURE (419)..(419): Asp or Pro or Gly or Absent
  MISC_FEATURE (420)..(420): Leu or Asn or Asp or Glu or Ser or His or Arg or Absent or Gly or Thr
  MISC_FEATURE (421)..(421): Phe or Lys or Leu or Val or Arg or Ser or Gln or Absent or Asp
  MISC_FEATURE (422)..(422): Pro or His or Absent or Ser or Ala or Lys or Arg
  MISC_FEATURE (423)..(423): Glu or Ala or Absent or Ser or His or Lys or Asn or Asp
  MISC_FEATURE (424)..(424): Arg or Ser or Ala or Thr or Pro or Asp or Lys or Leu or Absent or Val or Glu or Phe or Cys
  MISC_FEATURE (425)..(425): Ala or Absent or Glu or Pro or Leu or Val or Ser or Gln
  MISC_FEATURE (426)..(426): Ser or Absent or Arg or Thr or Pro or Ala or Val
  MISC_FEATURE (427)..(427): Ser or Absent or Arg or Val or Ile or Glu or Pro or Asn or Ala or Thr or Met or Phe
  MISC_FEATURE (428)..(428): Gly or Absent or Arg or Thr or Ala or Asp or Lys or His or Ser or Pro
  MISC_FEATURE (429)..(429): X or Absent or Trp
  MISC_FEATURE (430)..(430): Absent or Arg
  MISC_FEATURE (431)..(431): Absent or Pro
  MISC_FEATURE (432)..(432): Gly or Ser or Absent
  MISC_FEATURE (433)..(433): Pro or Ser or Ala or Glu or Gln or Gly or Lys or Arg or Asn or Absent
  MISC_FEATURE (434)..(434): Val or Met or Ile or Leu or Absent
  MISC_FEATURE (435)..(435): Ser or Ala or Gly or Cys or Absent or Lys
  MISC_FEATURE (436)..(436): Val or Thr or Leu or Ile or Phe or Tyr or Asn or Absent or Met
  MISC_FEATURE (437)..(437): Ser or Thr or Absent
  MISC_FEATURE (438)..(438): Val or Tyr or Thr or Met or Ser or Absent
  MISC_FEATURE (439)..(439): Gly or Ala or Ser or Absent
  MISC_FEATURE (440)..(440): Leu or Val or Ser or Met or Ile or Ala or Absent or Gly
  MISC_FEATURE (441)..(441): Met or Leu or Thr or Ala or Absent
  MISC_FEATURE (443)..(443): Ser or Leu or Gly or Thr or Val or Phe or Absent or Arg or Met or Ile
  MISC_FEATURE (444)..(444): Val or Ala or Ile or Thr or Phe or Gly or Leu or Absent or Pro
  MISC_FEATURE (445)..(445): Gly or Ser or Leu or Ala or Absent or Lys
  MISC_FEATURE (446)..(446): Ala or Cys or Val or Thr or Pro or Phe or Absent or Ser or Gly
  MISC_FEATURE (447)..(447): X or Trp or Cys or Phe or Ser or Leu or Pro or Absent or Met or Arg
  MISC_FEATURE (448)..(448): Val or Leu or Phe or Absent or His or Trp
  MISC_FEATURE (451)..(451): Met or Val or Leu or Phe or Ala or Ser or Absent or Lys or Ile
  MISC_FEATURE (453)..(453): Cys or Ser or Val or Leu or Met or Absent or Gly or Thr or Ala
  MISC_FEATURE (462)..(462): Gly or Ala or Val or Absent
  MISC_FEATURE (465)..(465): Thr or Ala or Lys or Arg or His or Absent
  MISC_FEATURE (468)..(468): Gly or Ala or Absent
  MISC_FEATURE (470)..(470): Ser or Gly or Thr or Absent
  MISC_FEATURE (472)..(472): Ala or Gly or His or Ser or Leu or Absent or Met
  MISC_FEATURE (473)..(473): Ser or Ala or Glu or Absent or Cys
  MISC_FEATURE (474)..(474): Val or Ile or Pro or Asn or Ala or Absent
  MISC_FEATURE (475)..(475): Val or Ile or Leu or Lys or Absent or Ala
  MISC_FEATURE (476)..(476): X or Phe or Leu or Ile or Met or Absent or Ala
  MISC_FEATURE (479)..(479): Ile or Val or Cys or Ala or Ser or Leu or Thr or Gly or Absent
  MISC_FEATURE (480)..(480): Gly or Cys or Ile or Phe or Val or Leu or Thr or Absent or Ala
  MISC_FEATURE (481)..(481): Lys or Tyr or Leu or Phe or Cys or Absent
  MISC_FEATURE (482)..(482): Leu or Met or Ala or Ile or Val or Absent
  MISC_FEATURE (483)..(483): Ala or Phe or Leu or Ile or Val or Absent
  MISC_FEATURE (484)..(484): Leu or Val or Phe or Ile or Thr or Absent
  MISC_FEATURE (485)..(485): X or Absent
  MISC_FEATURE (486)..(486): Gly or Ala or Ser or Absent
  MISC_FEATURE (488)..(488): Val or Leu or Ile or Phe or Met or Absent
  MISC_FEATURE (489)..(489): Phe or Leu or Pro or Ala or Trp or Absent
  MISC_FEATURE (491)..(491): His or Ser or Gly or Glu or Asn or Asp or Ala or Absent or Thr
  MISC_FEATURE (492)..(492): Ser or Thr or Gly or Lys or Absent or Val or Gln
  MISC_FEATURE (493)..(493): Phe or Leu or Val or Met or Ser or Absent or Ile
  MISC_FEATURE (494)..(494): Val or Leu or Asp or Glu or Absent or Ser or Ala or Gly
  MISC_FEATURE (495)..(495): Thr or Lys or Val or Asp or Asn or Gln or Absent or Ala or Trp or Arg or Gly or Met or His
  MISC_FEATURE (496)..(496): Ile or Leu or Ala or Absent or Tyr or Val or Phe
  MISC_FEATURE (498)..(498): Gly or Glu or Asp or Arg or Tyr or His or Gln or Asn or Absent or Ser or Val or Lys or Ala
  MISC_FEATURE (499)..(499): Gln or His or Ala or Arg or Ser or Val or Leu or Absent or Lys or Glu or Phe
  MISC_FEATURE (500)..(500): Phe or Tyr or Leu or Absent or Ile
  MISC_FEATURE (502)..(502): Ile or Lys or Gln or His or Thr or Leu or Absent or Val
  MISC_FEATURE (503)..(503): Gly or Thr or Pro or Ala or Ser or Absent
  MISC_FEATURE (504)..(504): Ile or Leu or Phe or Val or Absent
  MISC_FEATURE (507)..(507): Val or Ala or Ile or Thr or Absent or Ser or Cys
  MISC_FEATURE (508)..(508): Met or Leu or Ile or Absent or Val
  MISC_FEATURE (510)..(510): Leu or Phe or Thr or Val or Ile or Absent or Ser
  MISC_FEATURE (511)..(511): Phe or Ser or Val or Ala or Leu or Absent or Ile or Cys
  MISC_FEATURE (512)..(512): Ser or Ala or Glu or Thr or Absent or Ile or Gly
  MISC_FEATURE (514)..(514): Ile or Leu or Trp or Ala or Val or Absent or Phe
  MISC_FEATURE (515)..(515): Glu or Val or Gln or Absent
  MISC_FEATURE (517)..(517): Ala or Ile or Val or Met or Cys or Absent or Gly
  MISC_FEATURE (518)..(518): Met or Gly or Ser or Lys or Arg or Leu or Absent or Trp or Ala
  MISC_FEATURE (519)..(519): Ala or Met or Val or Phe or Gly or Thr or Absent or Ser
  MISC_FEATURE (520)..(520): Ser or Gly or Val or Ile or Absent or Lys or Ala or Cys
  MISC_FEATURE (521)..(521): Arg or Leu or Gln or Asn or Glu or Lys or Ser or Met or Absent or Val
  MISC_FEATURE (522)..(522): Asp or Lys or His or Ser or Ala or Absent or Leu
  MISC_FEATURE (523)..(523): Met or Thr or Leu or Gln or Phe or Val or Absent or Ser or Ile
  MISC_FEATURE (524)..(524): Gly or Lys or Arg or Asn or Ala or Pro or Leu or Absent or Thr or Asp or Ser
  MISC_FEATURE (525)..(525): X or Pro or Ser or Absent or Thr or Met
  MISC_FEATURE (526)..(526): Lys or Gly or Absent or His or Gln or Thr or Ser or Arg
  MISC_FEATURE (527)..(527): Absent or Gly or Arg
  MISC_FEATURE (528)..(528): Absent or Ala
  MISC_FEATURE (529)..(529): Absent or Ala or Ser or Trp or Arg
  MISC_FEATURE (530)..(530): Absent or Asp
  MISC_FEATURE (531)..(531): Absent or Leu
  MISC_FEATURE (532)..(532): Absent or Trp or Gly
  MISC_FEATURE (533)..(533): Absent or Glu or His or Asn or Arg
  MISC_FEATURE (534)..(534): Absent or Ser or Thr or Asn or Gln
  MISC_FEATURE (535)..(535): Absent or Ser or Ala or Asp or Val
  MISC_FEATURE (536)..(536): Absent or Met or Ser or Arg or Glu
  MISC_FEATURE (537)..(537): Absent or Glu or Gly or Ser or Asp
  MISC_FEATURE (538)..(538): Absent or Gly or Ser or Glu
  MISC_FEATURE (539)..(539): Absent or Asn or Ser
  MISC_FEATURE (540)..(540): Absent or Ala or Leu or Gly
  MISC_FEATURE (541)..(541): Absent or Pro
  MISC_FEATURE (542)..(542): Absent or Glu
  MISC_FEATURE (543)..(543): Absent or Ala
  MISC_FEATURE (544)..(544): Absent or Leu or Gln or Thr
  MISC_FEATURE (545)..(545): Absent or Ser or Gly or Leu
  MISC_FEATURE (546)..(546): Absent or Thr or Pro or Arg
  MISC_FEATURE (547)..(547): Absent or Arg or Leu
  MISC_FEATURE (548)..(548): Absent or Ile or Arg or Ala or Glu
  MISC_FEATURE (549)..(549): Absent or His or Gln or Glu
  MISC_FEATURE (550)..(550): Absent or Arg or Val
  MISC_FEATURE (551)..(551): Absent or Ser or Asp or Lys or His
  MISC_FEATURE (552)..(552): Absent or Leu
  MISC_FEATURE (553)..(553): Absent or Ser or Thr
  MISC_FEATURE (554)..(554): Absent or Glu
  MISC_FEATURE (555)..(555): Absent or Glu or Asp or Pro or Ala or Arg or Gly
  MISC_FEATURE (556)..(556): Absent or Trp or Glu or Met or Arg or Asp or Lys
  MISC_FEATURE (557)..(557): Absent or Gln or Arg or Pro or Ser or Glu
  MISC_FEATURE (558)..(558): Absent or Gln or Pro or Ala or Leu or Lys or Asn or Glu or Ser or Phe
  MISC_FEATURE (559)..(559): Glu or His or Arg or Lys or Asn or Gly or Asp or Absent or Cys or Gln or Ala or Thr
  MISC_FEATURE (560)..(560): Glu or Gln or Gly or Arg or Trp or Leu or Tyr or Ile or Absent or Asp
  MISC_FEATURE (561)..(561): Ser or Lys or Tyr or Trp or Met or Val or Phe or Ala or Absent
  MISC_FEATURE (562)..(562): Phe or Tyr or Thr or Ser or Met or Ile or Val or Absent or Leu
  MISC_FEATURE (563)..(563): Val or Leu or Phe or Thr or Ala or Ile or Absent
  MISC_FEATURE (564)..(564): Met or Val or Ala or Leu or Phe or Thr or Absent
  MISC_FEATURE (565)..(565): Leu or Met or Ile or Cys or Ala or Ser or Absent
  MISC_FEATURE (566)..(566): Val or Leu or Ile or Met or Thr or Absent or Ser
  MISC_FEATURE (567)..(567): Cys or Thr or Gly or Ala or Leu or Pro or Absent or Val
  MISC_FEATURE (568)..(568): Ala or Thr or Val or Gly or Arg or Ser or Absent
  MISC_FEATURE (569)..(569): Gly or Ala or Val or Ile or Phe or Leu or Absent or Thr or Ser
  MISC_FEATURE (570)..(570): Val or Ala or Gly or Leu or Cys or Thr or Absent or Ile
  MISC_FEATURE (571)..(571): Ser or Thr or Ile or Leu or Met or Absent or Val
  MISC_FEATURE (572)..(572): Leu or Ile or Val or Ser or Trp or Thr or Ala or Absent or Met
  MISC_FEATURE (573)..(573): Thr or Ser or Ala or Gly or Val or Asn or Absent or Ile
  MISC_FEATURE (574)..(574): Gly or Thr or Leu or Phe or Pro or Absent or Asn
  MISC_FEATURE (575)..(575): Ser or Lys or Asp or Arg or Gln or Val or Leu or Absent or Ala
  MISC_FEATURE (576)..(576): Ser or Asn or Gly or Ala or Absent
  MISC_FEATURE (577)..(577): Ala or Thr or Asp or Phe or Val or Absent or Leu or Ser
  MISC_FEATURE (578)..(578): Ala or Gly or Leu or Ser or Absent
  MISC_FEATURE (579)..(579): Leu or Ile or Thr or Val or Phe or Absent
  MISC_FEATURE (580)..(580): Gly or Absent
  MISC_FEATURE (581)..(581): Phe or Thr or Absent
  MISC_FEATURE (582)..(582): Ile or Ala or Leu or Phe or Val or Absent or Gly
  MISC_FEATURE (583)..(583): Ser or Ala or Val or Absent or Leu or Cys
  MISC_FEATURE (585)..(585): Ile or Met or Leu or Absent or Thr or Val or Asp
  MISC_FEATURE (586)..(586): Val or Ser or Absent or Pro or Thr or Ala or Ile or Leu or Cys
  MISC_FEATURE (587)..(587): Leu or Thr or Gly or Absent or Ala or Val or Ile
  MISC_FEATURE (588)..(588): Tyr or Absent or Leu or His or Phe or Val or Ser
  MISC_FEATURE (589)..(589): Leu or Absent or His or Gly or Ala or Val
  MISC_FEATURE (590)..(590): Leu or Absent or Lys or Val
  MISC_FEATURE (591)..(591): Leu or Absent or Ala
  MISC_FEATURE (592)..(592): Arg or Absent or Ala or Lys or Met or Tyr or Trp or His
  MISC_FEATURE (593)..(593): Leu or Absent or Gly or Met or Val or Ala
  MISC_FEATURE (594)..(594): Arg or Absent or Pro
  MISC_FEATURE (595)..(595): Asp or His or Val or Absent or Ser or Thr or Glu or Gln or Ala or Asn
  MISC_FEATURE (596)..(596): Leu or Ala or Absent or Lys or Val or Met or Trp or Cys or Tyr or Arg
  MISC_FEATURE (597)..(597): Glu or Leu or Ala or Absent or Ile or Val or Asp or Gly or Thr or His or Gln
  MISC_FEATURE (598)..(598): Trp or Met or Val or Absent or Ser or Cys or Asn or His or Ala or Gln or Glu or Leu or Arg or Lys or Thr
  MISC_FEATURE (599)..(599): Asp or Glu or Ala or Absent or His or Leu or Tyr or Lys or Gln or Ser or Arg or Gly or Trp
  MISC_FEATURE (600)..(600): Ile or Val or Ala or Absent or Trp or Gly or Leu or Cys or Tyr or Ser or Glu or Lys or Gln
  MISC_FEATURE (601)..(601): Arg or Gln or Tyr or Absent or Thr or Ala or Ser or Met or Leu or Gly or Val or Phe or Pro or Lys
  MISC_FEATURE (602)..(602): Gly or Arg or Glu or Absent or Tyr or Ala or Phe or Lys or Gln or Thr or Leu or Ile or Ser or Cys
  MISC_FEATURE (603)..(603): Leu or Arg or Gly or Absent or Glu or Lys or Trp or Thr or Phe or Asn or Val or Ser or Pro
  MISC_FEATURE (604)..(604): Leu or Ile or Ala or Absent or Ser or Met or Gly or Glu or Trp or Val or Phe or Cys or Thr or Asn or Arg
  MISC_FEATURE (605)..(605): Gly or Glu or Val or Absent or Ala or Ser or Lys or Pro or Arg or Asn or Thr or Leu or Ile
  MISC_FEATURE (606)..(606): Arg or Val or Ala or Absent or Gln or Glu or Leu or Met or Ile or Phe or Ser or Pro or Trp
  MISC_FEATURE (607)..(607): Trp or Pro or Ala or Absent or His or Arg or Cys or Leu or Gln or Thr or Ser or Asn or Asp or Gly or Lys
  MISC_FEATURE (608)..(608): Ala or Val or Absent or Trp or Leu or Cys or Ile or Met or Arg or Gly or Ser or His or Pro or Asp or Asn
  MISC_FEATURE (609)..(609): Ala or Gly or Absent or Arg or His or Ser or Met or Asp or Thr or Lys or Leu or Gln or Glu
  MISC_FEATURE (610)..(610): Gly or Absent or Ala or Arg or Glu or Asp or Lys
  MISC_FEATURE (611)..(611): Arg or Absent or Gly or Ala or Ser or Pro or His or Asn
  MISC_FEATURE (612)..(612): Arg or Absent or Trp or Thr or Tyr or Glu or Gln or Ser or Val or Ala
  MISC_FEATURE (613)..(613): Gln or Absent or Pro or Gly or Ser or Arg or His or Thr or Val or Leu or Ala or Glu or Asn
  MISC_FEATURE (614)..(614): Ser or Absent or Arg or Glu or His or Trp or Thr or Ala or Asp or Val or Gln or Pro
  MISC_FEATURE (615)..(615): Thr or Absent or Val or Arg or Trp or Leu or Gly or Ser or Asp or Ala
  MISC_FEATURE (616)..(616): Asn or Absent or Phe or Gln or Ile or Cys or Ser or Leu or His or Glu or Asp or Pro
  MISC_FEATURE (617)..(617): Glu or Absent or Ala or Gly or Lys or Val or Gln or Arg
  MISC_FEATURE (618)..(618): Ala or Absent or Arg or Gly or Val or Thr or Pro
  MISC_FEATURE (619)..(619): Asn or Absent or Gly or Ser or Pro or Phe
  MISC_FEATURE (620)..(620): Glu or Absent or Gly or Met or Asp or Arg or Leu or Pro
  MISC_FEATURE (621)..(621): Asp or Absent or Arg or His or Ile or Asn or Ser
  MISC_FEATURE (622)..(622): Gly or Absent or Ala or Ile or Glu or Val or Pro
  MISC_FEATURE (623)..(623): Ala or Absent or Thr or Asp or Tyr
  MISC_FEATURE (624)..(624): Gly or Absent or Pro or Ser or Thr or Ala or Asp
  MISC_FEATURE (625)..(625): Asp or Absent or Leu or Pro or Ser or Ile
  MISC_FEATURE (626)..(626): Ala or Absent or Ile or Val or Glu or Lys or Leu
  MISC_FEATURE (627)..(627): Absent or Ser or Glu or Thr
  MISC_FEATURE (628)..(628): Absent or Arg or Gly
  MISC_FEATURE (629)..(629): Absent or Gly or Ile
  MISC_FEATURE (630)..(630): Absent or Gln or Ser
  MISC_FEATURE (631)..(631): Absent or Phe or Gly or Asn
  MISC_FEATURE (632)..(632): Absent or Tyr or Pro
  MISC_FEATURE (633)..(633): Absent or Leu or His or Pro
  MISC_FEATURE (634)..(634): Absent or Ile or Ser
  MISC_FEATURE (635)..(635): Absent or Glu or His
  MISC_FEATURE (636)..(636): Absent or Pro or Glu or Lys or Arg or Ile
  MISC_FEATURE (637)..(637): Absent or Phe or Ala or Val
  MISC_FEATURE (638)..(638): Absent or His or Leu or Glu or Arg
  MISC_FEATURE (639)..(639): Absent or Leu
  MISC_FEATURE (640)..(640): Absent or Arg or Pro
  MISC_FEATURE (641)..(641): Absent or Thr
  MISC_FEATURE (642)..(642): Absent or Gly
  MISC_FEATURE (643)..(643): Absent or Arg
  MISC_FEATURE (644)..(644): Absent or Trp
  MISC_FEATURE (645)..(645): Absent or Val
  MISC_FEATURE (646)..(646): Absent or Ala
  MISC_FEATURE (647)..(647): Absent or Arg
  MISC_FEATURE (648)..(648): Absent or Glu
  MISC_FEATURE (649)..(649): Absent or Ala
  MISC_FEATURE (650)..(650): Absent or Gly
  MISC_FEATURE (651)..(651): Absent or Gln
  MISC_FEATURE (652)..(652): Absent or Ser
  MISC_FEATURE (653)..(653): Absent or Gly
  MISC_FEATURE (654)..(654): Absent or Pro
  MISC_FEATURE (655)..(655): Absent or Ser
  MISC_FEATURE (656)..(656): Absent or Ser
  MISC_FEATURE (657)..(657): Absent or Val
  MISC_FEATURE (658)..(658): Absent or Gly
XXXXXXXXXXXXXXXXXXXXXXXXXXXXXXXXXXXXXXXXXXXXXXXXXXXXXXXXXXXXXXXXXXEXXGXXGDLGTXXPXXXXLXXXXXLXXLXXTLXXXXXXXNXXXGXXXXXPXPVQPMKXIAAXAXXXXXXXXXXXXXXXXXAXXXXXXXXXXLGXTXXXXXXXXXXPXXVVRGXQLXXGLXXXXXXXXXXXXXXXXXXXXXXXXXXXXXXXXXXXXXXXXXXXXXXXXXXXXXXXXXXXXXXXXXXXXXXXXXXXXXXXXXXXXXXXXXXXXXXXXXXXXXXXXXXXXXXXXXXXXXXXXXXXXXXXXXXXXXXXXXXXXXXXXXXXXXXXXXXXXXXXXXXXXXXXXXXXXXXXXXXXXXXXXXXXXXXXXXXXXXXXXXXXXXXXXXXXPQXPLXXXNXVXAXXXXXXXXFXXXXXXXXXXXXXXXXXXXXXXXNXXXXXXGAXPXCHGAGGLAXQYXFGXRXGXXXXXLGXXXXXXXXLXXGXXXXXXLXXXPXXXLGXXLXXXGXXLXXXXXXXXXXXXXXXXXXXXXXXXXXXXXXXXXXXXXXXXXXXXXXXXXXXXXXXXXXXXXXXXXXXGXXXXXXXXXXXXXXXXXXXXXXXXXXXXXXXXXXXXXXXXXXXXXXXXXXXXXXXXXXXXXXXXXXXXXXXXXX
